United States Patent Application Publication US 2023/0026259 A1 - sequence listing, part 86

SEQ ID NO: 192780 - DNA, 5145 bp, Homo sapiens
  Payload ID: 18055
  Gene Name: transient receptor potential cation channel, subfamily M, member 3
  ENST ID: ENST00000357533
  CDS Start-End: 1-5136
atggggaagaagtggagggatgcggcggaaatggagcggggctgctccgaccgcgaggacaacgcggagagccgcagacgcagccggagcgccagccggggcaggtttgccgagtcgtggaaaaggttaagttccaagcaggggtccaccaaacgctcgggactcccgtcgcagcagacgccggctcagaaatcctggatagaaagagcattttataaaagagaatgtgtccacatcatacccagcaccaaagacccccataggtgttgctgtgggcgtctgataggccagcatgttggcctcacccccagtatctccgtgcttcagaatgagaaaaatgaaagtcgcctctcccgaaatgacatccagtctgaaaagtggtccatcagcaaacacactcaactcagccctacggatgcttttgggaccattgagttccaaggaggtggccattccaacaaagccatgtatgtgcgagtatcttttgatacaaaacctgatctcctcttacacctgatgaccaaggaatggcagttggagcttcccaagcttctcatctctgtccatgggggcctgcagaactttgaactccagccaaaactcaagcaagtctttgggaaagggctcatcaaagcagcaatgacaactggagcgtggatattcactggaggggttaacacaggtgttattcgtcatgttggcgatgccttgaaggatcatgcctctaagtctcgaggaaagatatgcaccataggtattgccccctggggaattgtggaaaaccaggaggacctcattggaagagatgttgtccggccataccagaccatgtccaatcccatgagcaagctcactgttctcaacagcatgcattcccacttcattctggctgacaacgggaccactggaaaatatggagcagaggtgaaacttcgaagacaactggaaaagcatatttcactccagaagataaacacaagaatcggtcaaggtgttcctgtggtggcactcatagtggaaggaggacccaatgtgatctcgattgttttggagtaccttcgagacacccctcccgtgccagtggttgtctgtgatgggagtggacgggcatcggacatcctggcctttgggcataaatactcagaagaaggcggactgataaatgaatctttgagggaccagctgttggtgactatacagaagactttcacatacactcgaacccaagctcagcatctgttcatcatcctcatggagtgcatgaagaagaaggaattgattacggtatttcggatgggatcagaaggacaccaggacattgatttggctatcctgacagctttactcaaaggagccaatgcctcggccccagaccaactgagcttagctttagcctggaacagagtcgacatcgctcgcagccagatctttatttacgggcaacagtggccggtgggatctctggagcaagccatgttggatgccttagttctggacagagtggattttgtgaaattactcatagagaatggagtaagcatgcaccgttttctcaccatctccagactagaggaattgtacaatacgagacatgggccctcaaatacattgtaccacttggtcagggatgtcaaaaagcgagagtatccaggtttcggttggatctattttaaggggaacctgcccccagactacagaatcagcctgattgacatcggcctggtgatcgagtacctgatgggcggggcttatcgctgcaactacacgcgcaagcgcttccggaccctctaccacaacctcttcggccccaagagggatgatattcccttgaggcgaggaagaaagacaaccaagaaacgtgaagaagaggtggacattgacttggatgatcctgagatcaaccacttccccttccctttccatgagctcatggtgtgggctgttctcatgaagcggcagaagatggccctgttcttctggcagcacggtgaggaggccatggccaaggccctggtggcctgcaagctctgcaaagccatggctcatgaggcctctgagaacgacatggttgacgacatttcccaggagctgaatcacaattccagagactttggccagctggctgtggagctcctggaccagtcctacaagcaggacgaacagctggccatgaaactgctgacgtatgagctgaagaactggagcaacgccacgtgcctgcagcttgccgtggctgccaaacaccgcgacttcatcgcgcacacgtgcagccagatgctgctcaccgacatgtggatgggccggctccgcatgcgcaagaactcaggcctcaaggtaattctgggaattctacttcctccttcaattctcagcttggagttcaagaacaaagacgacatgccctatatgtctcaggcccaggaaatccacctccaagagaaggaggcagaagaaccagagaagcccacaaaggaaaaagaggaagaggacatggagctcacagcaatgttgggacgaaacaacggggagtcctccaggaagaaggatgaagaggaagttcagagcaagcaccggttaatccccctcggcagaaaaatctatgaattctacaatgcacccatcgtgaagttctggttctacacactggcgtatatcggatacctgatgctcttcaactatatcgtgttagtgaagatggaacgctggccgtccacccaggaatggatcgtaatctcctatattttcaccctgggaatagaaaagatgagagagattctgatgtcagagccagggaagttgctacagaaagtgaaggtatggctgcaggagtactggaatgtcacggacctcatcgccatccttctgttttctgtcggaatgatccttcgtctccaagaccagcccttcaggagtgacgggagggtcatctactgcgtgaacatcatttactggtatatccgtctcctagacatcttcggcgtgaacaagtatttgggcccgtatgtaatgatgattggaaaaatgatgatagacatgatgtactttgtcatcattatgctggtggttctgatgagctttggggtcgccaggcaagccatcctttttcccaatgaggagccatcatggaaactggccaagaacatcttctacatgccctattggatgatttatggggaagtgtttgcggaccagatagaccctccctgtggacagaatgagacccgagaggatggtaaaataatccagctgcctccctgcaagacaggagcttggatcgtgccggccatcatggcctgctacctcttagtggcaaacatcttgctggtcaacctcctcattgctgtctttaacaatacattttttgaagtaaaatcgatatccaaccaagtctggaagtttcagaggtatcagctcatcatgactttccatgaaaggccagttctgcccccaccactgatcatcttcagccacatgaccatgatattccagcacctgtgctgccgatggaggaaacacgagagcgacccggatgaaagggactacggcctgaaactcttcataaccgatgatgagctcaagaaagtacatgactttgaagagcaatgcatagaagaatacttcagagaaaaggatgatcggttcaactcatctaatgatgagaggatacgggtgacttcagaaagggtggagaacatgtctatgcggctggaggaagtcaacgagagagagcactccatgaaggcttcactccagaccgtggacatccggctggcgcagctggaagaccttatcgggcgcatggccacggccctggagcgcctgacaggtctggagcgggccgagtccaacaaaatccgctcgaggacctcgtcagactgcacggacgccgcctacattgtccgtcagagcagcttcaacagccaggaagggaacaccttcaagctccaagagagtatagaccctgcaggtgaggagaccatgtccccaacttctccaaccttaatgccccgtatgcgaagccattctttctattcggtcaatatgaaagacaaaggtggtatagaaaagttggaaagtatttttaaagaaaggtccctgagcctacaccgggctactagttcccactctgtagcaaaagaacccaaagctcctgcagcccctgccaacaccttggccattgttcctgattccagaagaccatcatcgtgtatagacatctatgtctctgctatggatgagctccactgtgatatagaccctctggacaattccgtgaacatccttgggctgggcgagccaagcttttcaactccagtaccttccacagccccttcaagtagtgcctatgcaacacttgcacccacagacagacctccaagccggagcattgattttgaggacatcacctccatggacactagatctttttcttcagactacacccacctcccagaatgccaaaacccctgggactcagagcctccgatgtaccacaccattgagcgttccaaaagtagccgctacctagccaccacaccctttcttctagaagaggctcccattgtgaaatctcatagctttatgttttccccctcaaggagctattatgccaactttggggtgcctgtaaaaacagcagaatacacaagtattacagactgtattgacacaaggtgtgtcaatgcccctcaagcaattgcggacagagctgccttccctggaggtcttggagacaaagtggaggacttaacttgctgccatccagagcgagaagcagaactgagtcaccccagctctgacagtgaggagaatgaggccaaaggccgcagagccaccattgcaatatcctcccaggagggtgataactcagagagaaccctgtccaacaacatcactgttcccaagatagagcgcgccaacagctactcggcagaggagccaagtgcgccatatgcacacaccaggaagagcttctccatcagtgacaaactcgacaggcagcggaacacagcaagcctgcgaaatcccttccagagaagcaagtcctccaagccggagggccgaggggacagcctgtccatgaggagactgtccagaacatcggctttccaaagctttgaaagcaagcacaactaaaccttctta

SEQ ID NO: 192781 - DNA, 4710 bp, Homo sapiens
  Payload ID: 18055
  Gene Name: transient receptor potential cation channel, subfamily M, member 3
  ENST ID: ENST00000358082
  CDS Start-End: 1-4710
atgtatgtgcgagtatcttttgatacaaaacctgatctcctcttacacctgatgaccaaggaatggcagttggagcttcccaagcttctcatctctgtccatgggggcctgcagaactttgaactccagccaaaactcaagcaagtctttgggaaagggctcatcaaagcagcaatgacaactggagcgtggatattcactggaggggttaacacaggtgttattcgtcatgttggcgatgccttgaaggatcatgcctctaagtctcgaggaaagatatgcaccataggtattgccccctggggaattgtggaaaaccaggaggacctcattggaagagatgttgtccggccataccagaccatgtccaatcccatgagcaagctcactgttctcaacagcatgcattcccacttcattctggctgacaacgggaccactggaaaatatggagcagaggtgaaacttcgaagacaactggaaaagcatatttcactccagaagataaacacaagatgcctgccgtttttctctcttgactcccgcttgttttattcattttggggtagttgccagttagactcagttggaatcggtcaaggtgttcctgtggtggcactcatagtggaaggaggacccaatgtgatctcgattgttttggagtaccttcgagacacccctcccgtgccagtggttgtctgtgatgggagtggacgggcatcggacatcctggcctttgggcataaatactcagaagaaggcggactgataaatgaatctttgagggaccagctgttggtgactatacagaagactttcacatacactcgaacccaagctcagcatctgttcatcatcctcatggagtgcatgaagaagaaggaattgattacggtatttcggatgggatcagaaggacaccaggacattgatttggctatcctgacagctttactcaaaggagccaatgcctcggccccagaccaactgagcttagctttagcctggaacagagtcgacatcgctcgcagccagatctttatttacgggcaacagtggccggtgggatctctggagcaagccatgttggatgccttagttctggacagagtggattttgtgaaattactcatagagaatggagtaagcatgcaccgttttctcaccatctccagactagaggaattgtacaatacgagacatgggccctcaaatacattgtaccacttggtcagggatgtcaaaaaggggaacctgcccccagactacagaatcagcctgattgacatcggcctggtgatcgagtacctgatgggcggggcttatcgctgcaactacacgcgcaagcgcttccggaccctctaccacaacctcttcggccccaagagggatgatattcccttgaggcgaggaagaaagacaaccaagaaacgtgaagaagaggtggacattgacttggatgatcctgagatcaaccacttccccttccctttccatgagctcatggtgtgggctgttctcatgaagcggcagaagatggccctgttcttctggcagcacggtgaggaggccatggccaaggccctggtggcctgcaagctctgcaaagccatggctcatgaggcctctgagaacgacatggttgacgacatttcccaggagctgaatcacaattccagagactttggccagctggctgtggagctcctggaccagtcctacaagcaggacgaacagctggccatgaaactgctgacgtatgagctgaagaactggagcaacgccacgtgcctgcagcttgccgtggctgccaaacaccgcgacttcatcgcgcacacgtgcagccagatgctgctcaccgacatgtggatgggccggctccgcatgcgcaagaactcaggcctcaaggtaattctgggaattctacttcctccttcaattctcagcttggagttcaagaacaaagacgacatgccctatatgtctcaggcccaggaaatccacctccaagagaaggaggcagaagaaccagagaagcccacaaaggaaaaagaggaagaggacatggagctcacagcaatgttgggacgaaacaacggggagtcctccaggaagaaggatgaagaggaagttcagagcaagcaccggttaatccccctcggcagaaaaatctatgaattctacaatgcacccatcgtgaagttctggttctacacactggcgtatatcggatacctgatgctcttcaactatatcgtgttagtgaagatggaacgctggccgtccacccaggaatggatcgtaatctcctatattttcaccctgggaatagaaaagatgagagagattctgatgtcagagccagggaagttgctacagaaagtgaaggtatggctgcaggagtactggaatgtcacggacctcatcgccatccttctgttttctgtcggaatgatccttcgtctccaagaccagcccttcaggagtgacgggagggtcatctactgcgtgaacatcatttactggtatatccgtctcctagacatcttcggcgtgaacaagtatttgggcccgtatgtaatgatgattggaaaaatgatgatagacatgatgtactttgtcatcattatgctggtggttctgatgagctttggggtcgccaggcaagccatcctttttcccaatgaggagccatcatggaaactggccaagaacatcttctacatgccctattggatgatttatggggaagtgtttgcggaccagatagaccctccctgtggacagaatgagacccgagaggatggtaaaataatccagctgcctccctgcaagacaggagcttggatcgtgccggccatcatggcctgctacctcttagtggcaaacatcttgctggtcaacctcctcattgctgtctttaacaatacattttttgaagtaaaatcgatatccaaccaagtctggaagtttcagaggtatcagctcatcatgactttccatgaaaggccagttctgcccccaccactgatcatcttcagccacatgaccatgatattccagcacctgtgctgccgatggaggaaacacgagagcgacccggatgaaagggactacggcctgaaactcttcataaccgatgatgagctcaagaaagtacatgactttgaagagcaatgcatagaagaatacttcagagaaaaggatgatcggttcaactcatctaatgatgagaggatacgggtgacttcagaaagggtggagaacatgtctatgcggctggaggaagtcaacgagagagagcactccatgaaggcttcactccagaccgtggacatccggctggcgcagctggaagaccttatcgggcgcatggccacggccctggagcgcctgacaggtctggagcgggccgagtccaacaaaatccgctcgaggacctcgtcagactgcacggacgccgcctacattgtccgtcagagcagcttcaacagccaggaagggaacaccttcaagctccaagagagtatagaccctgcaggtgaggagaccatgtccccaacttctccaaccttaatgccccgtatgcgaagccattctttctattcggtcaatatgaaagacaaaggtggtatagaaaagttggaaagtatttttaaagaaaggtccctgagcctacaccgggctactagttcccactctgtagcaaaagaacccaaagctcctgcagcccctgccaacaccttggccattgttcctgattccagaagaccatcatcgtgtatagacatctatgtctctgctatggatgagctccactgtgatatagaccctctggacaattccgtgaacatccttgggctgggcgagccaagcttttcaactccagtaccttccacagccccttcaagtagtgcctatgcaacacttgcacccacagacagacctccaagccggagcattgattttgaggacatcacctccatggacactagatctttttcttcagactacacccacctcccagaatgccaaaacccctgggactcagagcctccgatgtaccacaccattgagcgttccaaaagtagccgctacctagccaccacaccctttcttctagaagaggctcccattgtgaaatctcatagctttatgttttccccctcaaggagctattatgccaactttggggtgcctgtaaaaacagcagaatacacaagtattacagactgtattgacacaaggtgtgtcaatgcccctcaagcaattgcggacagagctgccttccctggaggtcttggagacaaagtggaggacttaacttgctgccatccagagcgagaagcagaactgagtcaccccagctctgacagtgaggagaatgaggccaaaggccgcagagccaccattgcaatatcctcccaggagggtgataactcagagagaaccctgtccaacaacatcactgttcccaagatagagcgcgccaacagctactcggcagaggagccaagtgcgccatatgcacacaccaggaagagcttctccatcagtgacaaactcgacaggcagcggaacacagcaagcctgcgaaatcccttccagagaagcaagtcctccaagccggagggccgaggggacagcctgtccatgaggagactgtccagaacatcggctttccaaagctttgaaagcaagcacaactaa

SEQ ID NO: 192782 - DNA, 5966 bp, Homo sapiens
  Payload ID: 18055
  Gene Name: transient receptor potential cation channel, subfamily M, member 3
  ENST ID: ENST00000360823
  CDS Start-End: 356-5065
agctgcagcaaaatgaaagcaacaggagctgctccggggactgcttttgccagtacccagaatcagtgctcaggctcagaaatcctggatagaaagagcattttataaaagagaatgtgtccacatcatacccagcaccaaagacccccataggtgttgctgtgggcgtctgataggccagcatgttggcctcacccccagtatctccgtgcttcagaatgagaaaaatgaaagtcgcctctcccgaaatgacatccagtctgaaaagtggtccatcagcaaacacactcaactcagccctacggatgcttttgggaccattgagttccaaggaggtggccattccaacaaagccatgtatgtgcgagtatcttttgatacaaaacctgatctcctcttacacctgatgaccaaggaatggcagttggagcttcccaagcttctcatctctgtccatgggggcctgcagaactttgaactccagccaaaactcaagcaagtctttgggaaagggctcatcaaagcagcaatgacaactggagcgtggatattcactggaggggttaacacaggtgttattcgtcatgttggcgatgccttgaaggatcatgcctctaagtctcgaggaaagatatgcaccataggtattgccccctggggaattgtggaaaaccaggaggacctcattggaagagatgttgtccggccataccagaccatgtccaatcccatgagcaagctcactgttctcaacagcatgcattcccacttcattctggctgacaacgggaccactggaaaatatggagcagaggtgaaacttcgaagacaactggaaaagcatatttcactccagaagataaacacaagatgcctgccgtttttctctcttgactcccgcttgttttattcattttggggtagttgccagttagactcagttggaatcggtcaaggtgttcctgtggtggcactcatagtggaaggaggacccaatgtgatctcgattgttttggagtaccttcgagacacccctcccgtgccagtggttgtctgtgatgggagtggacgggcatcggacatcctggcctttgggcataaatactcagaagaaggcggactgataaatgaatctttgagggaccagctgttggtgactatacagaagactttcacatacactcgaacccaagctcagcatctgttcatcatcctcatggagtgcatgaagaagaaggaattgattacggtatttcggatgggatcagaaggacaccaggacattgatttggctatcctgacagctttactcaaaggagccaatgcctcggccccagaccaactgagcttagctttagcctggaacagagtcgacatcgctcgcagccagatctttatttacgggcaacagtggccggtgggatctctggagcaagccatgttggatgccttagttctggacagagtggattttgtgaaattactcatagagaatggagtaagcatgcaccgttttctcaccatctccagactagaggaattgtacaatacgagacatgggccctcaaatacattgtaccacttggtcagggatgtcaaaaaggggaacctgcccccagactacagaatcagcctgattgacatcggcctggtgatcgagtacctgatgggcggggcttatcgctgcaactacacgcgcaagcgcttccggaccctctaccacaacctcttcggccccaagagggatgatattcccttgaggcgaggaagaaagacaaccaagaaacgtgaagaagaggtggacattgacttggatgatcctgagatcaaccacttccccttccctttccatgagctcatggtgtgggctgttctcatgaagcggcagaagatggccctgttcttctggcagcacggtgaggaggccatggccaaggccctggtggcctgcaagctctgcaaagccatggctcatgaggcctctgagaacgacatggttgacgacatttcccaggagctgaatcacaattccagagactttggccagctggctgtggagctcctggaccagtcctacaagcaggacgaacagctggccatgaaactgctgacgtatgagctgaagaactggagcaacgccacgtgcctgcagcttgccgtggctgccaaacaccgcgacttcatcgcgcacacgtgcagccagatgctgctcaccgacatgtggatgggccggctccgcatgcgcaagaactcaggcctcaaggtaattctgggaattctacttcctccttcaattctcagcttggagttcaagaacaaagacgacatgccctatatgtctcaggcccaggaaatccacctccaagagaaggaggcagaagaaccagagaagcccacaaaggaaaaagaggaagaggacatggagctcacagcaatgttgggacgaaacaacggggagtcctccaggaagaaggatgaagaggaagttcagagcaagcaccggttaatccccctcggcagaaaaatctatgaattctacaatgcacccatcgtgaagttctggttctacacactggcgtatatcggatacctgatgctcttcaactatatcgtgttagtgaagatggaacgctggccgtccacccaggaatggatcgtaatctcctatattttcaccctgggaatagaaaagatgagagagattctgatgtcagagccagggaagttgctacagaaagtgaaggtatggctgcaggagtactggaatgtcacggacctcatcgccatccttctgttttctgtcggaatgatccttcgtctccaagaccagcccttcaggagtgacgggagggtcatctactgcgtgaacatcatttactggtatatccgtctcctagacatcttcggcgtgaacaagtatttgggcccgtatgtaatgatgattggaaaaatgatgatagacatgatgtactttgtcatcattatgctggtggttctgatgagctttggggtcgccaggcaagccatcctttttcccaatgaggagccatcatggaaactggccaagaacatcttctacatgccctattggatgatttatggggaagtgtttgcggaccagatagaccctccctgtggacagaatgagacccgagaggatggtaaaataatccagctgcctccctgcaagacaggagcttggatcgtgccggccatcatggcctgctacctcttagtggcaaacatcttgctggtcaacctcctcattgctgtctttaacaatacattttttgaagtaaaatcgatatccaaccaagtctggaagtttcagaggtatcagctcatcatgactttccatgaaaggccagttctgcccccaccactgatcatcttcagccacatgaccatgatattccagcacctgtgctgccgatggaggaaacacgagagcgacccggatgaaagggactacggcctgaaactcttcataaccgatgatgagctcaagaaagtacatgactttgaagagcaatgcatagaagaatacttcagagaaaaggatgatcggttcaactcatctaatgatgagaggatacgggtgacttcagaaagggtggagaacatgtctatgcggctggaggaagtcaacgagagagagcactccatgaaggcttcactccagaccgtggacatccggctggcgcagctggaagaccttatcgggcgcatggccacggccctggagcgcctgacaggtctggagcgggccgagtccaacaaaatccgctcgaggacctcgtcagactgcacggacgccgcctacattgtccgtcagagcagcttcaacagccaggaagggaacaccttcaagctccaagagagtatagaccctgcaggtgaggagaccatgtccccaacttctccaaccttaatgccccgtatgcgaagccattctttctattcggtcaatatgaaagacaaaggtggtatagaaaagttggaaagtatttttaaagaaaggtccctgagcctacaccgggctactagttcccactctgtagcaaaagaacccaaagctcctgcagcccctgccaacaccttggccattgttcctgattccagaagaccatcatcgtgtatagacatctatgtctctgctatggatgagctccactgtgatatagaccctctggacaattccgtgaacatccttgggctgggcgagccaagcttttcaactccagtaccttccacagccccttcaagtagtgcctatgcaacacttgcacccacagacagacctccaagccggagcattgattttgaggacatcacctccatggacactagatctttttcttcagactacacccacctcccagaatgccaaaacccctgggactcagagcctccgatgtaccacaccattgagcgttccaaaagtagccgctacctagccaccacaccctttcttctagaagaggctcccattgtgaaatctcatagctttatgttttccccctcaaggagctattatgccaactttggggtgcctgtaaaaacagcagaatacacaagtattacagactgtattgacacaaggtgtgtcaatgcccctcaagcaattgcggacagagctgccttccctggaggtcttggagacaaagtggaggacttaacttgctgccatccagagcgagaagcagaactgagtcaccccagctctgacagtgaggagaatgaggccaaaggccgcagagccaccattgcaatatcctcccaggagggtgataactcagagagaaccctgtccaacaacatcactgttcccaagatagagcgcgccaacagctactcggcagaggagccaagtgcgccatatgcacacaccaggaagagcttctccatcagtgacaaactcgacaggcagcggaacacagcaagcctgcgaaatcccttccagagaagcaagtcctccaagccggagggccgaggggacagcctgtccatgaggagactgtccagaacatcggctttccaaagctttgaaagcaagcacaactaaaccttcttaatatccgccacagaaggctcaagaatccagccctaaaattctctccaactccagtttttcccctttccttgaatcatacctgctttattcttagctgagcaaaacaagcaatgctttgggaggtgttaactcaaaggtgacttctgggccacagatcaagaaagcatttgatctgacccagtgccagacacaggggatttaaggcatgttcacacttgctgggcagggagggggaagagagggagaaggaagggttagagatgaatgtgtatccgcagtcacagcagaaagccatgagagcaggggaaacaaggggcttcgagcacgctccatgccaggaggcatctgttgatttctgaccattatcaagagttgtaggatgcagggctaaattgcaaaataaaataaaatagccagcgtacacaatgagatattctaaacttccattctgttttcttttcacattggctccatcactggtgactgatgaagagcatcctctttattcagtataagccggcagcaagcagttctacctaacgtcccacatccttctcatgccaacacttctgtaattgatcattataaagaaaaaacaaggtaacagtcatagttcacctgtctcttatctattcacttctggtgccacaactgtttatccttttttgaagaaaataagggaacagaaatgcctttttgtattgcaatcgaaatgaaagaagagttgatgttaaaaaaacaaaagtcaagtgatttattatatacagtgggcgttcaagtctagtcgagcaagctcaggagaatgtaattaaataattttatattttttaatttattttgtatctcacctgtcatggatgaattcattcactgaatatgtaatattgaactt

SEQ ID NO: 192783 - DNA, 1260 bp, Homo sapiens
  Payload ID: 18055
  Gene Name: transient receptor potential cation channel, subfamily M, member 3
  Uniprot ID: Q9HCF6
  ENST ID: ENST00000361823
  CDS Start-End: 327-1019
tgctccggggactgcttttgccagtacccagaatcagtgctcaggctcagaaatcctggatagaaagagcattttataaaagagaatgtgtccacatcatacccagcaccaaagacccccataggtgttgctgtgggcgtctgataggccagcatgttggcctcacccccagtatctccgtgcttcagaatgagaaaaatgaaagtcgcctctcccgaaatgacatccagtctgaaaagtggtccatcagcaaacacactcaactcagccctacggatgcttttgggaccattgagttccaaggaggtggccattccaacaaagccatgtatgtgcgagtatcttttgatacaaaacctgatctcctcttacacctgatgaccaaggaatggcagttggagcttcccaagcttctcatctctgtccatgggggcctgcagaactttgaactccagccaaaactcaagcaagtctttgggaaagggctcatcaaagcagcaatgacaactggagcgtggatattcactggaggggttaacacaggtgttattcgtcatgttggcgatgccttgaaggatcatgcctctaagtctcgaggaaagatatgcaccataggtattgccccctggggaattgtggaaaaccaggaggacctcattggaagagatgttgtccggccataccagaccatgtccaatcccatgagcaagctcactgttctcaacagcatgcattcccacttcattctggctgacaacgggaccactggaaaatatggagcagaggtgaaacttcgaagacaactggaaaagcatatttcactccagaagataaacacaagaatcggtcaaggtgttcctgtggtggcactcatagtggaaggaggacccaatgtgatctcgattgttttggagtaccttcgagacacccctcccgtgccagtggttgtctgtgatgggagtggacgggcatcggacatcctggcctttgggcataaatactcagaagaaggcgggtaggtaactttccaggccccatggaagaaccctaaagcctgtttggaaacgagggtatgagtggattatgttttcagtagctcaaccaagacctcaaatcaaaacaagctatgaacaaattgtctaaaaaatgtctgtcatgggagggctgtggtgaagaacagagaaacatattctaaatgtcctgtgaagtgggaaattctatgaaagctacacggataataaaaagggtgaggaaaagaga

SEQ ID NO: 192784 - DNA, 554 bp, Homo sapiens
  Payload ID: 18055
  Gene Name: transient receptor potential cation channel, subfamily M, member 3
  ENST ID: ENST00000377097
  CDS Start-End: 129-500
atgaaagtcgcctctcccgaaatgacatccagtctgaaaagtggtccatcagcaaacacactcaactcagccctacggatgcttttgggaccattgagttccaaggaggtggccattccaacaaagccatgtatgtgcgagtatcttttgatacaaaacctgatctcctcttacacctgatgaccaaggaatggcagttggagcttcccaagcttctcatctctgtccatgggggcctgcagaactttgaactccagccaaaactcaagcaagtctttgggaaagggctcatcaaagcagcaatgacaactggagcgtggatattcactggaggggttaacacaggtgttattcgtcatgttggcgatgccttgaaggatcatgcctctaagtctcgaggaaagatatgcaccataggtattgccccctggggaattgtggaaaaccaggaggacctcattggaagagatgtaagtcctgagtgctgtcgctttccatgacttctcctagaggggatatcagaaaagtataataaaattagtattcaaaatgtg

SEQ ID NO: 192785 - DNA, 2075 bp, Homo sapiens
  Payload ID: 18055
  Gene Name: transient receptor potential cation channel, subfamily M, member 3
  ENST ID: ENST00000377101
  CDS Start-End: 350-1321
agcaaaatgaaagcaacaggagctgctccggggactgcttttgccagtacccagaatcagtgctcaggctcagaaatcctggatagaaagagcattttataaaagagaatgtgtccacatcatacccagcaccaaagacccccataggtgttgctgtgggcgtctgataggccagcatgttggcctcacccccagtatctccgtgcttcagaatgagaaaaatgaaagtcgcctctcccgaaatgacatccagtctgaaaagtggtccatcagcaaacacactcaactcagccctacggatgcttttgggaccattgagttccaaggaggtggccattccaacaaagccatgtatgtgcgagtatcttttgatacaaaacctgatctcctcttacacctgatgaccaaggaatggcagttggagcttcccaagcttctcatctctgtccatgggggcctgcagaactttgaactccagccaaaactcaagcaagtctttgggaaagggctcatcaaagcagcaatgacaactggagcgtggatattcactggaggggttaacacaggtgttattcgtcatgttggcgatgccttgaaggatcatgcctctaagtctcgaggaaagatatgcaccataggtattgccccctggggaattgtggaaaaccaggaggacctcattggaagagatgttgtccggccataccagaccatgtccaatcccatgagcaagctcactgttctcaacagcatgcattcccacttcattctggctgacaacgggaccactggaaaatatggagcagaggtgaaacttcgaagacaactggaaaagcatatttcactccagaagataaacacaagaatcggtcaaggtgttcctgtggtggcactcatagtggaaggaggacccaatgtgatctcgattgttttggagtaccttcgagacacccctcccgtgccagtggttgtctgtgatgggagtggacgggcatcggacatcctggcctttgggcataaatactcagaagaaggcggactgataaatgaatctttgagggaccagctgttggtgactatacagaagactttcacatacactcgaacccaagctcagcatctgttcatcatcctcatggagtgcatgaagaagaaggaattggtaggtaattccgcatgggtggccagctgtctccacattttcagtcattttcttgaatcacacaacattttctcaaatcatgcaacattctctctttctggccgagcttacagctctcctcaggctccattggctccagtagcttcctctcctaagtaactaagacactgcttttactgccttcgagttaataaggtgtgtgcagcagagttttagcatcatttccttttggagctcatccaaacgctctgactgcctcaacaaaatgagttgaagtgataaaattggtcccctcctggagaacgcttcagcttgatcttcttaggtttcggatttcattttgcttggaagtcatgaaccactgaggtgctttctgtcaaatagctttaatgacaaagggtccaggctgttacactaatctgtacaggtagaaaacggagaaacataagaaatcctggaggaatctaaaatcagagcaaaatgtgtttctaaaatcagagcaaaatgtcttacaaatgtggtatgatcagagaccctgctagggtgaacaaaatcatgtgattttgttctctgcttactcaaacatttaacaagaacttgctatctgccaagcagggagcaagatctttatgcatataaactcatatgacctttgcaactgtcctgatgagagaggtacaattattaccctcatcttacagatgaggaaacccggctcatttgattagtaaatgaggagctaagactcaaaaccagtgatgtttaacctctgtatggagtatttttattcagaaagtgtctcactgaagccaatgcagtggatcacccactctgggtagatgcccccaggcctcagccagagagactattctcaaaggtcagttaaacccaactgctgagagagatagcaaaa

SEQ ID NO: 192786 - DNA, 5957 bp, Homo sapiens
  Payload ID: 18055
  Gene Name: transient receptor potential cation channel, subfamily M, member 3
  ENST ID: ENST00000377105
  CDS Start-End: 356-5056
agctgcagcaaaatgaaagcaacaggagctgctccggggactgcttttgccagtacccagaatcagtgctcaggctcagaaatcctggatagaaagagcattttataaaagagaatgtgtccacatcatacccagcaccaaagacccccataggtgttgctgtgggcgtctgataggccagcatgttggcctcacccccagtatctccgtgcttcagaatgagaaaaatgaaagtcgcctctcccgaaatgacatccagtctgaaaagtggtccatcagcaaacacactcaactcagccctacggatgcttttgggaccattgagttccaaggaggtggccattccaacaaagccatgtatgtgcgagtatcttttgatacaaaacctgatctcctcttacacctgatgaccaaggaatggcagttggagcttcccaagcttctcatctctgtccatgggggcctgcagaactttgaactccagccaaaactcaagcaagtctttgggaaagggctcatcaaagcagcaatgacaactggagcgtggatattcactggaggggttaacacaggtgttattcgtcatgttggcgatgccttgaaggatcatgcctctaagtctcgaggaaagatatgcaccataggtattgccccctggggaattgtggaaaaccaggaggacctcattggaagagatgttgtccggccataccagaccatgtccaatcccatgagcaagctcactgttctcaacagcatgcattcccacttcattctggctgacaacgggaccactggaaaatatggagcagaggtgaaacttcgaagacaactggaaaagcatatttcactccagaagataaacacaagaatcggtcaaggtgttcctgtggtggcactcatagtggaaggaggacccaatgtgatctcgattgttttggagtaccttcgagacacccctcccgtgccagtggttgtctgtgatgggagtggacgggcatcggacatcctggcctttgggcataaatactcagaagaaggcggactgataaatgaatctttgagggaccagctgttggtgactatacagaagactttcacatacactcgaacccaagctcagcatctgttcatcatcctcatggagtgcatgaagaagaaggaattgattacggtatttcggatgggatcagaaggacaccaggacattgatttggctatcctgacagctttactcaaaggagccaatgcctcggccccagaccaactgagcttagctttagcctggaacagagtcgacatcgctcgcagccagatctttatttacgggcaacagtggccggtgggatctctggagcaagccatgttggatgccttagttctggacagagtggattttgtgaaattactcatagagaatggagtaagcatgcaccgttttctcaccatctccagactagaggaattgtacaatacgagacatgggccctcaaatacattgtaccacttggtcagggatgtcaaaaagcgagagtatccaggtttcggttggatctattttaaggggaacctgcccccagactacagaatcagcctgattgacatcggcctggtgatcgagtacctgatgggcggggcttatcgctgcaactacacgcgcaagcgcttccggaccctctaccacaacctcttcggccccaagaggcccaaagccttgaaactgctgggaatggaggatgatattcccttgaggcgaggaagaaagacaaccaagaaacgtgaagaagaggtggacattgacttggatgatcctgagatcaaccacttccccttccctttccatgagctcatggtgtgggctgttctcatgaagcggcagaagatggccctgttcttctggcagcacggtgaggaggccatggccaaggccctggtggcctgcaagctctgcaaagccatggctcatgaggcctctgagaacgacatggttgacgacatttcccaggagctgaatcacaattccagagactttggccagctggctgtggagctcctggaccagtcctacaagcaggacgaacagctggccatgaaactgctgacgtatgagctgaagaactggagcaacgccacgtgcctgcagcttgccgtggctgccaaacaccgcgacttcatcgcgcacacgtgcagccagatgctgctcaccgacatgtggatgggccggctccgcatgcgcaagaactcaggcctcaaggtaattctgggaattctacttcctccttcaattctcagcttggagttcaagaacaaagacgacatgccctatatgtctcaggcccaggaaatccacctccaagagaaggaggcagaagaaccagagaagcccacaaaggaaaaagaggaagaggacatggagctcacagcaatgttgggacgaaacaacggggagtcctccaggaagaaggatgaagaggaagttcagagcaagcaccggttaatccccctcggcagaaaaatctatgaattctacaatgcacccatcgtgaagttctggttctacacactggcgtatatcggatacctgatgctcttcaactatatcgtgttagtgaagatggaacgctggccgtccacccaggaatggatcgtaatctcctatattttcaccctgggaatagaaaagatgagagagattctgatgtcagagccagggaagttgctacagaaagtgaaggtatggctgcaggagtactggaatgtcacggacctcatcgccatccttctgttttctgtcggaatgatccttcgtctccaagaccagcccttcaggagtgacgggagggtcatctactgcgtgaacatcatttactggtatatccgtctcctagacatcttcggcgtgaacaagtatttgggcccgtatgtaatgatgattggaaaaatgatgatagacatgatgtactttgtcatcattatgctggtggttctgatgagctttggggtcgccaggcaagccatcctttttcccaatgaggagccatcatggaaactggccaagaacatcttctacatgccctattggatgatttatggggaagtgtttgcggaccagatagaccctccctgtggacagaatgagacccgagaggatggtaaaataatccagctgcctccctgcaagacaggagcttggatcgtgccggccatcatggcctgctacctcttagtggcaaacatcttgctggtcaacctcctcattgctgtctttaacaatacattttttgaagtaaaatcgatatccaaccaagtctggaagtttcagaggtatcagctcatcatgactttccatgaaaggccagttctgcccccaccactgatcatcttcagccacatgaccatgatattccagcacctgtgctgccgatggaggaaacacgagagcgacccggatgaaagggactacggcctgaaactcttcataaccgatgatgagctcaagaaagtacatgactttgaagagcaatgcatagaagaatacttcagagaaaaggatgatcggttcaactcatctaatgatgagaggatacgggtgacttcagaaagggtggagaacatgtctatgcggctggaggaagtcaacgagagagagcactccatgaaggcttcactccagaccgtggacatccggctggcgcagctggaagaccttatcgggcgcatggccacggccctggagcgcctgacaggtctggagcgggccgagtccaacaaaatccgctcgaggacctcgtcagactgcacggacgccgcctacattgtccgtcagagcagcttcaacagccaggaagggaacaccttcaagctccaagagagtatagaccctgcaggtgaggagaccatgtccccaacttctccaaccttaatgccccgtatgcgaagccattctttctattcggtcaatatgaaagacaaaggtggtatagaaaagttggaaagtatttttaaagaaaggtccctgagcctacaccgggctactagttcccactctgtagcaaaagaacccaaagctcctgcagcccctgccaacaccttggccattgttcctgattccagaagaccatcatcgtgtatagacatctatgtctctgctatggatgagctccactgtgatatagaccctctggacaattccgtgaacatccttgggctgggcgagccaagcttttcaactccagtaccttccacagccccttcaagtagtgcctatgcaacacttgcacccacagacagacctccaagccggagcattgattttgaggacatcacctccatggacactagatctttttcttcagactacacccacctcccagaatgccaaaacccctgggactcagagcctccgatgtaccacaccattgagcgttccaaaagtagccgctacctagccaccacaccctttcttctagaagaggctcccattgtgaaatctcatagctttatgttttccccctcaaggagctattatgccaactttggggtgcctgtaaaaacagcagaatacacaagtattacagactgtattgacacaaggtgtgtcaatgcccctcaagcaattgcggacagagctgccttccctggaggtcttggagacaaagtggaggacttaacttgctgccatccagagcgagaagcagaactgagtcaccccagctctgacagtgaggagaatgaggccaaaggccgcagagccaccattgcaatatcctcccaggagggtgataactcagagagaaccctgtccaacaacatcactgttcccaagatagagcgcgccaacagctactcggcagaggagccaagtgcgccatatgcacacaccaggaagagcttctccatcagtgacaaactcgacaggcagcggaacacagcaagcctgcgaaatcccttccagagaagcaagtcctccaagccggagggccgaggggacagcctgtccatgaggagactgtccagaacatcggctttccaaagctttgaaagcaagcacaactaaaccttcttaatatccgccacagaaggctcaagaatccagccctaaaattctctccaactccagtttttcccctttccttgaatcatacctgctttattcttagctgagcaaaacaagcaatgctttgggaggtgttaactcaaaggtgacttctgggccacagatcaagaaagcatttgatctgacccagtgccagacacaggggatttaaggcatgttcacacttgctgggcagggagggggaagagagggagaaggaagggttagagatgaatgtgtatccgcagtcacagcagaaagccatgagagcaggggaaacaaggggcttcgagcacgctccatgccaggaggcatctgttgatttctgaccattatcaagagttgtaggatgcagggctaaattgcaaaataaaataaaatagccagcgtacacaatgagatattctaaacttccattctgttttcttttcacattggctccatcactggtgactgatgaagagcatcctctttattcagtataagccggcagcaagcagttctacctaacgtcccacatccttctcatgccaacacttctgtaattgatcattataaagaaaaaacaaggtaacagtcatagttcacctgtctcttatctattcacttctggtgccacaactgtttatccttttttgaagaaaataagggaacagaaatgcctttttgtattgcaatcgaaatgaaagaagagttgatgttaaaaaaacaaaagtcaagtgatttattatatacagtgggcgttcaagtctagtcgagcaagctcaggagaatgtaattaaataattttatattttttaatttattttgtatctcacctgtcatggatgaattcattcactgaatatgtaatattgaactt

SEQ ID NO: 192787 - DNA, 12258 bp, Homo sapiens
  Payload ID: 18055
  Gene Name: transient receptor potential cation channel, subfamily M, member 3
  Uniprot ID: Q9HCF6
  ENST ID: ENST00000377110
  CDS Start-End: 245-5368
tccgaccacaggctgttttgtgcaggctgtccctcttcttcaaaatcgtgcatcccctccccgaagcagcaggcagtgtgcctccattcagccacatttggtatgcatgagcacggctgcagagagaggggaggtggctgttttaagaaggttcaggggctcaggcaaggctacttgactagtcttccaagttccaggaagcctctgccctaatggaatttgcaggtgtggagatgaccatgggatgccagagccgtgggggaccgtttattttctaggcattgctcaggttttcagtttcttgttttcctggtggaatttggaaggggtcatgaatcaggctgatgctcctcgacccctaaactggaccatccggaagctgtgccacgcagcctttcttccatctgtcagacttctgaaggctcagaaatcctggatagaaagagcattttataaaagagaatgtgtccacatcatacccagcaccaaagacccccataggtgttgctgtgggcgtctgataggccagcatgttggcctcacccccagtatctccgtgcttcagaatgagaaaaatgaaagtcgcctctcccgaaatgacatccagtctgaaaagtggtccatcagcaaacacactcaactcagccctacggatgcttttgggaccattgagttccaaggaggtggccattccaacaaagccatgtatgtgcgagtatcttttgatacaaaacctgatctcctcttacacctgatgaccaaggaatggcagttggagcttcccaagcttctcatctctgtccatgggggcctgcagaactttgaactccagccaaaactcaagcaagtctttgggaaagggctcatcaaagcagcaatgacaactggagcgtggatattcactggaggggttaacacaggtgttattcgtcatgttggcgatgccttgaaggatcatgcctctaagtctcgaggaaagatatgcaccataggtattgccccctggggaattgtggaaaaccaggaggacctcattggaagagatgttgtccggccataccagaccatgtccaatcccatgagcaagctcactgttctcaacagcatgcattcccacttcattctggctgacaacgggaccactggaaaatatggagcagaggtgaaacttcgaagacaactggaaaagcatatttcactccagaagataaacacaagaatcggtcaaggtgttcctgtggtggcactcatagtggaaggaggacccaatgtgatctcgattgttttggagtaccttcgagacacccctcccgtgccagtggttgtctgtgatgggagtggacgggcatcggacatcctggcctttgggcataaatactcagaagaaggcggactgataaatgaatctttgagggaccagctgttggtgactatacagaagactttcacatacactcgaacccaagctcagcatctgttcatcatcctcatggagtgcatgaagaagaaggaattgattacggtatttcggatgggatcagaaggacaccaggacattgatttggctatcctgacagctttactcaaaggagccaatgcctcggccccagaccaactgagcttagctttagcctggaacagagtcgacatcgctcgcagccagatctttatttacgggcaacagtggccggtgggatctctggagcaagccatgttggatgccttagttctggacagagtggattttgtgaaattactcatagagaatggagtaagcatgcaccgttttctcaccatctccagactagaggaattgtacaatacgagacatgggccctcaaatacattgtaccacttggtcagggatgtcaaaaaggggaacctgcccccagactacagaatcagcctgattgacatcggcctggtgatcgagtacctgatgggcggggcttatcgctgcaactacacgcgcaagcgcttccggaccctctaccacaacctcttcggccccaagaggcccaaagccttgaaactgctgggaatggaggatgatattcccttgaggcgaggaagaaagacaaccaagaaacgtgaagaagaggtggacattgacttggatgatcctgagatcaaccacttccccttccctttccatgagctcatggtgtgggctgttctcatgaagcggcagaagatggccctgttcttctggcagcacggtgaggaggccatggccaaggccctggtggcctgcaagctctgcaaagccatggctcatgaggcctctgagaacgacatggttgacgacatttcccaggagctgaatcacaattccagagactttggccagctggctgtggagctcctggaccagtcctacaagcaggacgaacagctggccatgaaactgctgacgtatgagctgaagaactggagcaacgccacgtgcctgcagcttgccgtggctgccaaacaccgcgacttcatcgcgcacacgtgcagccagatgctgctcaccgacatgtggatgggccggctccgcatgcgcaagaactcaggcctcaaggtaattctgggaattctacttcctccttcaattctcagcttggagttcaagaacaaagacgacatgccctatatgtctcaggcccaggaaatccacctccaagagaaggaggcagaagaaccagagaagcccacaaaggaaaaagaggaagaggacatggagctcacagcaatgttgggacgaaacaacggggagtcctccaggaagaaggatgaagaggaagttcagagcaagcaccggttaatccccctcggcagaaaaatctatgaattctacaatgcacccatcgtgaagttctggttctacacactggcgtatatcggatacctgatgctcttcaactatatcgtgttagtgaagatggaacgctggccgtccacccaggaatggatcgtaatctcctatattttcaccctgggaatagaaaagatgagagagattctgatgtcagagccagggaagttgctacagaaagtgaaggtatggctgcaggagtactggaatgtcacggacctcatcgccatccttctgttttctgtcggaatgatccttcgtctccaagaccagcccttcaggagtgacgggagggtcatctactgcgtgaacatcatttactggtatatccgtctcctagacatcttcggcgtgaacaagtatttgggcccgtatgtaatgatgattggaaaaatgatgatagacatgatgtactttgtcatcattatgctggtggttctgatgagctttggggtcgccaggcaagccatcctttttcccaatgaggagccatcatggaaactggccaagaacatcttctacatgccctattggatgatttatggggaagtgtttgcggaccagatagaccctccctgtggacagaatgagacccgagaggatggtaaaataatccagctgcctccctgcaagacaggagcttggatcgtgccggccatcatggcctgctacctcttagtggcaaacatcttgctggtcaacctcctcattgctgtctttaacaatacattttttgaagtaaaatcgatatccaaccaagtctggaagtttcagaggtatcagctcatcatgactttccatgaaaggccagttctgcccccaccactgatcatcttcagccacatgaccatgatattccagcacctgtgctgccgatggaggaaacacgagagcgacccggatgaaagggactacggcctgaaactcttcataaccgatgatgagctcaagaaagtacatgactttgaagagcaatgcatagaagaatacttcagagaaaaggatgatcggttcaactcatctaatgatgagaggatacgggtgacttcagaaagggtggagaacatgtctatgcggctggaggaagtcaacgagagagagcactccatgaaggcttcactccagaccgtggacatccggctggcgcagctggaagaccttatcgggcgcatggccacggccctggagcgcctgacaggtctggagcgggccgagtccaacaaaatccgctcgaggacctcgtcagactgcacggacgccgcctacattgtccgtcagagcagcttcaacagccaggaagggaacaccttcaagctccaagagagtatagaccctgcaggtgaggagaccatgtccccaacttctccaaccttaatgccccgtatgcgaagccattctttctattcggtcaatatgaaagacaaaggtggtatagaaaagttggaaagtatttttaaagaaaggtccctgagcctacaccgggctactagttcccactctgtagcaaaagaacccaaagctcctgcagcccctgccaacaccttggccattgttcctgattccagaagaccatcatcgtgtatagacatctatgtctctgctatggatgagctccactgtgatatagaccctctggacaattccgtgaacatccttgggctgggcgagccaagcttttcaactccagtaccttccacagccccttcaagtagtgcctatgcaacacttgcacccacagacagacctccaagccggagcattgattttgaggacatcacctccatggacactagatctttttcttcagactacacccacctcccagaatgccaaaacccctgggactcagagcctccgatgtaccacaccattgagcgttccaaaagtagccgctacctagccaccacaccctttcttctagaagaggctcccattgtgaaatctcatagctttatgttttccccctcaaggagctattatgccaactttggggtgcctgtaaaaacagcagaatacacaagtattacagactgtattgacacaaggtgtgtcaatgcccctcaagcaattgcggacagagctgccttccctggaggtcttggagacaaagtggaggacttaacttgctgccatccagagcgagaagcagaactgagtcaccccagctctgacagtgaggagaatgaggccaaaggccgcagagccaccattgcaatatcctcccaggagggtgataactcagagagaaccctgtccaacaacatcactgttcccaagatagagcgcgccaacagctactcggcagaggagccaagtgcgccatatgcacacaccaggaagagcttctccatcagtgacaaactcgacaggcagcggaacacagcaagcctgcgaaatcccttccagagaagcaagtcctccaagccggagggccgaggggacagcctgtccatgaggagactgtccagaacatcggctttccaaagctttgaaagcaagcacaactaaaccttcttaatatccgccacagaaggctcaagaatccagccctaaaattctctccaactccagtttttcccctttccttgaatcatacctgctttattcttagctgagcaaaacaagcaatgctttgggaggtgttaactcaaaggtgacttctgggccacagatcaagaaagcatttgatctgacccagtgccagacacaggggatttaaggcatgttcacacttgctgggcagggagggggaagagagggagaaggaagggttagagatgaatgtgtatccgcagtcacagcagaaagccatgagagcaggggaaacaaggggcttcgagcacgctccatgccaggaggcatctgttgatttctgaccattatcaagagttgtaggatgcagggctaaattgcaaaataaaataaaatagccagcgtacacaatgagatattctaaacttccattctgttttcttttcacattggctccatcactggtgactgatgaagagcatcctctttattcagtataagccggcagcaagcagttctacctaacgtcccacatccttctcatgccaacacttctgtaattgatcattataaagaaaaaacaaggtaacagtcatagttcacctgtctcttatctattcacttctggtgccacaactgtttatccttttttgaagaaaataagggaacagaaatgcctttttgtattgcaatcgaaatgaaagaagagttgatgttaaaaaaacaaaagtcaagtgatttattatatacagtgggcgttcaagtctagtcgagcaagctcaggagaatgtaattaaataattttatattttttaatttattttgtatctcacctgtcatggatgaattcattcactgaatatgtaatattgaacttaaaaaaaaaaaaaaaaaaacagtggacagaactagcctgaaattgccatgtgggatgttctgttctcaccgttcatgtcgtgtgttgtgctgctgtgtgaccgtcatcatttgcatggctccaccacgtcctcctgaacacctccaagacgtaactgccaatttttcacaccactcatcacatgaccattttgtatatgaatatatggttatatgtggatattttcatacctagagttttgccatctaatctgagctcagcataaatttaattggagtttttcaagggctggtatcttttctatggaaatgttccaaagtactttttaaggaagtttcaaaactataaataaccttagatttgactgggagtttggtatcaacccaaagccatcagttgcaagcataccatgaatatttttcttatagacagagctataaaaaaagatacagtagaccaaaatagaaagcaaataaaccatataaagagttctatagtatatgccacttatacacatgtatatgcatttatgcagagacacatatttatatataaaataaatggacataaagagctttcttaagaggcttggacttttctatcaccttgaagtataatcaagattttttttaatatacaagaagttccattgaaagagttcattatactattagaccaaatgttgaaattatgaattttttaaattcctatgacttttcctcatatcaaactagagttgtcaaaatgactcactgctcgccttctgcccttttttgtctgaaatcactcactatcaggacatctcatttagtctcgcttttcctaaacaaagtttttacaccacgtacaatctgaatagacacgcaactttaaaccagctagtgttacagactctaaagtagaggcataatcttctagatcagaatctggattggaagtgggataaagaaatcttgaccccaaatctttggattcctatttggctcattaacgtttaaaaaagaataaagcctttaaggaaaacaatctattgttcctggcctgagatactacctggttcttttgtttaattataattgaaaacaccaagttttactttattttgtgaaatcaagtaaatacatggcctttaaatataagataaaaaacaaaataaaaactcttctgaataagcatttcaggtataaaaattgtgatgaggtcacatatgtaaagaattaaacaattcctttttcactccttggcatttaggtgaattgctaacaaacacccagactcccttatttacagctgttctagaaacacttaacattttattgggccccacgctggctatttccctctcagcaaacatgcactgggtctgagaataaatcagtcgttcttaaacttccttgagtcatgaatccctacgaggctctacgataactctaggctctctctccagaaagaaaaaaaaaatgtacataatgcaaagttgcaatataacttgaaagggttcatgagcccctggttctatattgattatgagggaaaggaaccatgtttgctcgtagttaatgcagttgtaataggcactttacatttgagaccatctctctgtgattctcaggaaggccaaatctcagcaccagagtttgaacaaagattttgttatttttgttctttaaattagatgttgccaatttaatgcacttacatcctaacatgttgatgattttaagtatcaagcacaatcacaatgctgaagtctccctgaagggtctatagaggaatccaagaaggaggtgaaaacattattcattgacatcaaacacctccaaggcctcattctgggccagattggaagtgagggaaagaaattttcagctcaagtgtttccattcatcgtgatttcagagagaaaaggataggaactgggaaacgaaatactcaacagtcctgatcttgcaattacctgattcttttgttgtgcatgaaaattaagttctaacgtctgtgaaacgtgtgaaatatataagccaaacttaaatgactgtagacacaaactgtgtaacttccatgagccatttccttcctgtgcacatgtatgtgtgttatttttcagtccatttccttccatttctgggttctctgtgcagcaatgtggcattgattctgtggccttgtgcagtcagcttatgctcagcccattgattccaccacatccctgatcgaggggacgttaattacctgtctttgtgaattaagcagtttatgagcagcaagttactgaggaccgtaaataaagtcatagagagctcaaggaagtaatagcttcggtttaatcatctgcttcaaaggtgccaatttttacatactactatatgtaatgatttgttctaaattgcttgttccttttgaaaaaaatttaaggatgttttatgaaaatgaccatggaggtctcctgcttaaccaatatactttatatttatagttagagggcccctccttgatagatttgaatgaggagctggaaagcttgggtacaattttcatgactagtttgtattatctctgcaagccaaaaggtgtattagcagtcagaatacagcactttacagaactggattttttaaatgtataagtttccaggtctaggatattatttagcactttgaaagttccccttttaaaatatatatataagaataatcaaacgagaaaaatgtactcataaaaacacaaaatgtgtttcttctgaatgtttcaaatgtattctaaaatatggtttctatagataatattatggtagataactggatagtacttttttactttctgagtctgtacagtctaatcttcctgaatgtttgggctgtttaatttctttaaagatgataaatattacccggtcatccatcatgctctatctataggctataccattcatatgttgggcaatgctgtattataaaacacatgtaaacatgtatgtaacccatgtttaacccagcgtagttgtagcatgtggttgtattaatgaacgttacaggagagctttataatcatttataaatctgtaacattcaataaagaaacacatgttgcaatgattaattatgttcccaattccatgttatttagcatctttgtgaaccgggcatttttgttcctgatctgcttgatgcttttcatgttcctttggaccactgtaaaatatgtgtgtaagctgatgtatatcctctaatgagtcctgcgagctgtggtaggcaagttgtgattttgtgaaagatgaactggcatgttatgcaaaagactatatgacaaatgaacttaaaatgatattttaaactccagttgaattagctgtttacatctgccaaccccatgcagaagcagtgtacagtattttataaatatgttcatttagtaacactatgttgtttctagataaagtgatactagtgtgtaggtggttatatatttggcctagatattgcattataactcactatccttgaacaataacaatgtgactgaaatgaagtaatctctctccaaacctggtcttaattttgtgtcaacaaaatgcatgcactgctttatgcatttcttttgacttttctaaggcacttaacattttactattgcctgctgtgacgcttaagccagttaagaattcactcaaacagttgggcttcttactatggggattatgttcagttttgaaaaattaaaaacaaaaaaaaagtaaccaagggatttttaaatcttttttttaagcactgaacaaataatatgaaataaagtattaactgcaggttgtatagccatgggacccagaggtggcaagccaacacctcttgggtctgccaaggtctaggtgttgtgcatctgtgatatatgcaagacacatttctgattcttcagagctactgggtgcaaattgctaagccggagatgagagcgaaaagtccatttgtgatagtgcagaagtgcgcagatcgctgtgaatgtgtgatccaatgatatgacaagagacctccctccttgtcttgtggcttcttcaccttgggggtgggaggcgtgtgtttgggtgtctgatgaagcactgggtggttctaaagagtttactcttttagaaaatcatcattactagaagccattcaacatctgttaaagagaggagccaatttgcacagttttgaaaatgactgctcctaaaatgagtagacaaaactttcctctcagcctgcattgacctaagctttctcttctttttacaagttggatattctgtctctcagattggagtcaaccaaaagaaaggctggttccaattaaggaaaagcaatttttttcttttaattcctctcagaaggtagttgtgttaccttttctctgatgatttccttgcactcatcactgctaatgaaagcaacgtgactgtttctacaggtcatctaagagaggattttggtgaccaggtaatccagatggcaataagaatgaggtgaattttcccttccttaccttacctagtctaccagcctccttaaacctgcaggcccttgtgcgtttgcacaatgtttgtgtgctggaaactgaaaagacatgtgtatggctagaagtccataggctttgtaaagagtgtcagtgccaatcaggacccatgccttcctctggaggagacaggtggctgaggcctatggggcaaagggggaaattcagccttgtgcctggatgtgcggctttctttctcccctcttcttgcttctcttctcttagtctaagactagctgctttttcaccagaccaacagacccttgcccacattacctttataccttgttgaccctcgcacagtaagctgaaacagcggccgcttggaaaaaggcaaacatttagactttgtcccaggcctgatcttcccaccaacttagcctcctcctgcctctaccccggctggtgttcacattgacctcgtccaatttttgcctctctaaatctcaagagtcctacacatcttcaccgcagcttcccacacatcattaaaaccagccatctgcacatagactgagaggctgcaaattcaaacacatggaggggccggatccagaaaacacaaatgtgtgaactggactggtgaaagtcaacagaagtagggtttgtaagtaaggcatgacagaatacacatcccaccacaaacaccttcaaattcagctttccaaacactgtcctagccaaacaaacatgtctgccagcagcattcagtcccaaaggcaatagtttgggacctctgatttagagccaacaggatcagattcttgatagtgacttggtgagtgtacacacaaaatacactgagaaccgagaggggggaaaagaaactcgccttattcagagttactcttgttctgaatgatatatgcatgtatatttgttagccacataattctaaacttgaacacagagtctttgtgagagagattcagaagaagagtaccatagcatggtatgaagacttacctgcttcctgtcactactgcgtctgacctgagtttatattgctgctaccgctgtgtaaaaacagtacgtgcagtatactgtactcatagccatttcataatataggacctagactctcatttgtaaacgttctaaccctagtttataatgggggaaattattcagatatcatttttaaatgaattcctacaaatacaatggttttaaaattgggtttgctgaatatatatacatcttttccttctttgtgtatggatggaccacggtatgcatatctatcgacactataaatatatataaatccttagaagaattgttcttttttaaaggtctattattggattcacaatgcactttgagtttgattgtttagatatacaattcagagcagaagttggcagataccacgggaaaaactttctgaaatttctgtaacaaatgttttgcaataaaaaaaaaaactcagtagtttaaaaca

SEQ ID NO: 192788 - DNA, 4618 bp, Homo sapiens
  Payload ID: 18055
  Gene Name: transient receptor potential cation channel, subfamily M, member 3
  Uniprot ID: Q9HCF6
  ENST ID: ENST00000377111
  CDS Start-End: 245-4222
tccgaccacaggctgttttgtgcaggctgtccctcttcttcaaaatcgtgcatcccctccccgaagcagcaggcagtgtgcctccattcagccacatttggtatgcatgagcacggctgcagagagaggggaggtggctgttttaagaaggttcaggggctcaggcaaggctacttgactagtcttccaagttccaggaagcctctgccctaatggaatttgcaggtgtggagatgaccatgggatgccagagccgtgggggaccgtttattttctaggcattgctcaggttttcagtttcttgttttcctggtggaatttggaaggggtcatgaatcaggctgatgctcctcgacccctaaactggaccatccggaagctgtgccacgcagcctttcttccatctgtcagacttctgaaggctcagaaatcctggatagaaagagcattttataaaagagaatgtgtccacatcatacccagcaccaaagacccccataggtgttgctgtgggcgtctgataggccagcatgttggcctcacccccagtatctccgtgcttcagaatgagaaaaatgaaagtcgcctctcccgaaatgacatccagtctgaaaagtggtccatcagcaaacacactcaactcagccctacggatgcttttgggaccattgagttccaaggaggtggccattccaacaaagccatgtatgtgcgagtatcttttgatacaaaacctgatctcctcttacacctgatgaccaaggaatggcagttggagcttcccaagcttctcatctctgtccatgggggcctgcagaactttgaactccagccaaaactcaagcaagtctttgggaaagggctcatcaaagcagcaatgacaactggagcgtggatattcactggaggggttaacacaggtgttattcgtcatgttggcgatgccttgaaggatcatgcctctaagtctcgaggaaagatatgcaccataggtattgccccctggggaattgtggaaaaccaggaggacctcattggaagagatgttgtccggccataccagaccatgtccaatcccatgagcaagctcactgttctcaacagcatgcattcccacttcattctggctgacaacgggaccactggaaaatatggagcagaggtgaaacttcgaagacaactggaaaagcatatttcactccagaagataaacacaagaatcggtcaaggtgttcctgtggtggcactcatagtggaaggaggacccaatgtgatctcgattgttttggagtaccttcgagacacccctcccgtgccagtggttgtctgtgatgggagtggacgggcatcggacatcctggcctttgggcataaatactcagaagaaggcggactgataaatgaatctttgagggaccagctgttggtgactatacagaagactttcacatacactcgaacccaagctcagcatctgttcatcatcctcatggagtgcatgaagaagaaggaattgattacggtatttcggatgggatcagaaggacaccaggacattgatttggctatcctgacagctttactcaaaggagccaatgcctcggccccagaccaactgagcttagctttagcctggaacagagtcgacatcgctcgcagccagatctttatttacgggcaacagtggccggtgggatctctggagcaagccatgttggatgccttagttctggacagagtggattttgtgaaattactcatagagaatggagtaagcatgcaccgttttctcaccatctccagactagaggaattgtacaatacgagacatgggccctcaaatacattgtaccacttggtcagggatgtcaaaaaggggaacctgcccccagactacagaatcagcctgattgacatcggcctggtgatcgagtacctgatgggcggggcttatcgctgcaactacacgcgcaagcgcttccggaccctctaccacaacctcttcggccccaagaggcccaaagccttgaaactgctgggaatggaggatgatattcccttgaggcgaggaagaaagacaaccaagaaacgtgaagaagaggtggacattgacttggatgatcctgagatcaaccacttccccttccctttccatgagctcatggtgtgggctgttctcatgaagcggcagaagatggccctgttcttctggcagcacggtgaggaggccatggccaaggccctggtggcctgcaagctctgcaaagccatggctcatgaggcctctgagaacgacatggttgacgacatttcccaggagctgaatcacaattccagagactttggccagctggctgtggagctcctggaccagtcctacaagcaggacgaacagctggccatgaaactgctgacgtatgagctgaagaactggagcaacgccacgtgcctgcagcttgccgtggctgccaaacaccgcgacttcatcgcgcacacgtgcagccagatgctgctcaccgacatgtggatgggccggctccgcatgcgcaagaactcaggcctcaaggtaattctgggaattctacttcctccttcaattctcagcttggagttcaagaacaaagacgacatgccctatatgtctcaggcccaggaaatccacctccaagagaaggaggcagaagaaccagagaagcccacaaaggaaaaagaggaagaggacatggagctcacagcaatgttgggacgaaacaacggggagtcctccaggaagaaggatgaagaggaagttcagagcaagcaccggttaatccccctcggcagaaaaatctatgaattctacaatgcacccatcgtgaagttctggttctacacactggcgtatatcggatacctgatgctcttcaactatatcgtgttagtgaagatggaacgctggccgtccacccaggaatggatcgtaatctcctatattttcaccctgggaatagaaaagatgagagagattctgatgtcagagccagggaagttgctacagaaagtgaaggtatggctgcaggagtactggaatgtcacggacctcatcgccatccttctgttttctgtcggaatgatccttcgtctccaagaccagcccttcaggagtgacgggagggtcatctactgcgtgaacatcatttactggtatatccgtctcctagacatcttcggcgtgaacaagtatttgggcccgtatgtaatgatgattggaaaaatgatgatagacatgatgtactttgtcatcattatgctggtggttctgatgagctttggggtcgccaggcaagccatcctttttcccaatgaggagccatcatggaaactggccaagaacatcttctacatgccctattggatgatttatggggaagtgtttgcggaccagatagaccctccctgtggacagaatgagacccgagaggatggtaaaataatccagctgcctccctgcaagacaggagcttggatcgtgccggccatcatggcctgctacctcttagtggcaaacatcttgctggtcaacctcctcattgctgtctttaacaatacattttttgaagtaaaatcgatatccaaccaagtctggaagtttcagaggtatcagctcatcatgactttccatgaaaggccagttctgcccccaccactgatcatcttcagccacatgaccatgatattccagcacctgtgctgccgatggaggaaacacgagagcgacccggatgaaagggactacggcctgaaactcttcataaccgatgatgagctcaagaaagtacatgactttgaagagcaatgcatagaagaatacttcagagaaaaggatgatcggttcaactcatctaatgatgagaggatacgggtgacttcagaaagggtggagaacatgtctatgcggctggaggaagtcaacgagagagagcactccatgaaggcttcactccagaccgtggacatccggctggcgcagctggaagaccttatcgggcgcatggccacggccctggagcgcctgacaggtctggagcgggccgagtccaacaaaatccgctcgaggacctcgtcagactgcacggacgccgcctacattgtccgtcagagcagcttcaacagccaggaagggaacaccttcaagctccaagagagtatagaccctgcagagcatcctctttattcagtataagccggcagcaagcagttctacctaacgtcccacatccttctcatgccaacacttctgtaattgatcattataaagaaaaaacaaggtaacagtcatagttcacctgtctcttatctattcacttctggtgccacaactgtttatccttttttgaagaaaataagggaacagaaatgcctttttgtattgcaatcgaaatgaaagaagagttgatgttaaaaaaacaaaagtcaagtgatttattatatacagtgggcgttcaagtctagtcgagcaagctcaggagaatgtaattaaataattttatattttttaatttattttgtatctcacctgtcatggatgaattcattcactgaatatgtaatattgaacttaaaaaaaaaaaaaaaaaaa

SEQ ID NO: 192789 - DNA, 4671 bp, Homo sapiens
  Payload ID: 18055
  Gene Name: transient receptor potential cation channel, subfamily M, member 3
  ENST ID: ENST00000396280
  CDS Start-End: 1-4671
atgtatgtgcgagtatcttttgatacaaaacctgatctcctcttacacctgatgaccaaggaatggcagttggagcttcccaagcttctcatctctgtccatgggggcctgcagaactttgaactccagccaaaactcaagcaagtctttgggaaagggctcatcaaagcagcaatgacaactggagcgtggatattcactggaggggttaacacaggtgttattcgtcatgttggcgatgccttgaaggatcatgcctctaagtctcgaggaaagatatgcaccataggtattgccccctggggaattgtggaaaaccaggaggacctcattggaagagatgttgtccggccataccagaccatgtccaatcccatgagcaagctcactgttctcaacagcatgcattcccacttcattctggctgacaacgggaccactggaaaatatggagcagaggtgaaacttcgaagacaactggaaaagcatatttcactccagaagataaacacaagaatcggtcaaggtgttcctgtggtggcactcatagtggaaggaggacccaatgtgatctcgattgttttggagtaccttcgagacacccctcccgtgccagtggttgtctgtgatgggagtggacgggcatcggacatcctggcctttgggcataaatactcagaagaaggcggactgataaatgaatctttgagggaccagctgttggtgactatacagaagactttcacatacactcgaacccaagctcagcatctgttcatcatcctcatggagtgcatgaagaagaaggaattgattacggtatttcggatgggatcagaaggacaccaggacattgatttggctatcctgacagctttactcaaaggagccaatgcctcggccccagaccaactgagcttagctttagcctggaacagagtcgacatcgctcgcagccagatctttatttacgggcaacagtggccggtgggatctctggagcaagccatgttggatgccttagttctggacagagtggattttgtgaaattactcatagagaatggagtaagcatgcaccgttttctcaccatctccagactagaggaattgtacaatacgagacatgggccctcaaatacattgtaccacttggtcagggatgtcaaaaagcgagagtatccaggtttcggttggatctattttaaggggaacctgcccccagactacagaatcagcctgattgacatcggcctggtgatcgagtacctgatgggcggggcttatcgctgcaactacacgcgcaagcgcttccggaccctctaccacaacctcttcggccccaagagggatgatattcccttgaggcgaggaagaaagacaaccaagaaacgtgaagaagaggtggacattgacttggatgatcctgagatcaaccacttccccttccctttccatgagctcatggtgtgggctgttctcatgaagcggcagaagatggccctgttcttctggcagcacggtgaggaggccatggccaaggccctggtggcctgcaagctctgcaaagccatggctcatgaggcctctgagaacgacatggttgacgacatttcccaggagctgaatcacaattccagagactttggccagctggctgtggagctcctggaccagtcctacaagcaggacgaacagctggccatgaaactgctgacgtatgagctgaagaactggagcaacgccacgtgcctgcagcttgccgtggctgccaaacaccgcgacttcatcgcgcacacgtgcagccagatgctgctcaccgacatgtggatgggccggctccgcatgcgcaagaactcaggcctcaaggtaattctgggaattctacttcctccttcaattctcagcttggagttcaagaacaaagacgacatgccctatatgtctcaggcccaggaaatccacctccaagagaaggaggcagaagaaccagagaagcccacaaaggaaaaagaggaagaggacatggagctcacagcaatgttgggacgaaacaacggggagtcctccaggaagaaggatgaagaggaagttcagagcaagcaccggttaatccccctcggcagaaaaatctatgaattctacaatgcacccatcgtgaagttctggttctacacactggcgtatatcggatacctgatgctcttcaactatatcgtgttagtgaagatggaacgctggccgtccacccaggaatggatcgtaatctcctatattttcaccctgggaatagaaaagatgagagagattctgatgtcagagccagggaagttgctacagaaagtgaaggtatggctgcaggagtactggaatgtcacggacctcatcgccatccttctgttttctgtcggaatgatccttcgtctccaagaccagcccttcaggagtgacgggagggtcatctactgcgtgaacatcatttactggtatatccgtctcctagacatcttcggcgtgaacaagtatttgggcccgtatgtaatgatgattggaaaaatgatgatagacatgatgtactttgtcatcattatgctggtggttctgatgagctttggggtcgccaggcaagccatcctttttcccaatgaggagccatcatggaaactggccaagaacatcttctacatgccctattggatgatttatggggaagtgtttgcggaccagatagaccctccctgtggacagaatgagacccgagaggatggtaaaataatccagctgcctccctgcaagacaggagcttggatcgtgccggccatcatggcctgctacctcttagtggcaaacatcttgctggtcaacctcctcattgctgtctttaacaatacattttttgaagtaaaatcgatatccaaccaagtctggaagtttcagaggtatcagctcatcatgactttccatgaaaggccagttctgcccccaccactgatcatcttcagccacatgaccatgatattccagcacctgtgctgccgatggaggaaacacgagagcgacccggatgaaagggactacggcctgaaactcttcataaccgatgatgagctcaagaaagtacatgactttgaagagcaatgcatagaagaatacttcagagaaaaggatgatcggttcaactcatctaatgatgagaggatacgggtgacttcagaaagggtggagaacatgtctatgcggctggaggaagtcaacgagagagagcactccatgaaggcttcactccagaccgtggacatccggctggcgcagctggaagaccttatcgggcgcatggccacggccctggagcgcctgacaggtctggagcgggccgagtccaacaaaatccgctcgaggacctcgtcagactgcacggacgccgcctacattgtccgtcagagcagcttcaacagccaggaagggaacaccttcaagctccaagagagtatagaccctgcaggtgaggagaccatgtccccaacttctccaaccttaatgccccgtatgcgaagccattctttctattcggtcaatatgaaagacaaaggtggtatagaaaagttggaaagtatttttaaagaaaggtccctgagcctacaccgggctactagttcccactctgtagcaaaagaacccaaagctcctgcagcccctgccaacaccttggccattgttcctgattccagaagaccatcatcgtgtatagacatctatgtctctgctatggatgagctccactgtgatatagaccctctggacaattccgtgaacatccttgggctgggcgagccaagcttttcaactccagtaccttccacagccccttcaagtagtgcctatgcaacacttgcacccacagacagacctccaagccggagcattgattttgaggacatcacctccatggacactagatctttttcttcagactacacccacctcccagaatgccaaaacccctgggactcagagcctccgatgtaccacaccattgagcgttccaaaagtagccgctacctagccaccacaccctttcttctagaagaggctcccattgtgaaatctcatagctttatgttttccccctcaaggagctattatgccaactttggggtgcctgtaaaaacagcagaatacacaagtattacagactgtattgacacaaggtgtgtcaatgcccctcaagcaattgcggacagagctgccttccctggaggtcttggagacaaagtggaggacttaacttgctgccatccagagcgagaagcagaactgagtcaccccagctctgacagtgaggagaatgaggccaaaggccgcagagccaccattgcaatatcctcccaggagggtgataactcagagagaaccctgtccaacaacatcactgttcccaagatagagcgcgccaacagctactcggcagaggagccaagtgcgccatatgcacacaccaggaagagcttctccatcagtgacaaactcgacaggcagcggaacacagcaagcctgcgaaatcccttccagagaagcaagtcctccaagccggagggccgaggggacagcctgtccatgaggagactgtccagaacatcggctttccaaagctttgaaagcaagcacaactaa

SEQ ID NO: 192790 - DNA, 3484 bp, Homo sapiens
  Payload ID: 18055
  Gene Name: transient receptor potential cation channel, subfamily M, member 3
  ENST ID: ENST00000396283
  CDS Start-End: 321-1148
ggggactgcttttgccagtacccagaatcagtgctcaggctcagaaatcctggatagaaagagcattttataaaagagaatgtgtccacatcatacccagcaccaaagacccccataggtgttgctgtgggcgtctgataggccagcatgttggcctcacccccagtatctccgtgcttcagaatgagaaaaatgaaagtcgcctctcccgaaatgacatccagtctgaaaagtggtccatcagcaaacacactcaactcagccctacggatgcttttgggaccattgagttccaaggaggtggccattccaacaaagccatgtatgtgcgagtatcttttgatacaaaacctgatctcctcttacacctgatgaccaaggaatggcagttggagcttcccaagcttctcatctctgtccatgggggcctgcagaactttgaactccagccaaaactcaagcaagtctttgggaaagggctcatcaaagcagcaatgacaactggagcgtggatattcactggaggggttaacacaggtgttattcgtcatgttggcgatgccttgaaggatcatgcctctaagtctcgaggaaagatatgcaccataggtattgccccctggggaattgtggaaaaccaggaggacctcattggaagagatgttgtccggccataccagaccatgtccaatcccatgagcaagctcactgttctcaacagcatgcattcccacttcattctggctgacaacgggaccactggaaaatatggagcagaggtgaaacttcgaagacaactggaaaagcatatttcactccagaagataaacacaagatgcctgccgtttttctctcttgactcccgcttgttttattcattttggggtagttgccagttagactcagttggaatcggtcaaggtgttcctgtggtggcactcatagtggaaggaggacccaatgtgatctcgattgttttggagtaccttcgagacacccctcccgtgccagtggttgtctgtgatgggagtggacgggcatcggacatcctggcctttgggcataaatactcagaagaaggcggctcaaaatatataaccaatctaaaaagagaaagaaaaaaggaagaggaaagcaaaggtatttagaagtgaaatggtgctagttgatggcgaatgacggtcctctcagctgagaggcagggttccaggggccagcattggaagctcagcatctgcagtgtcctaccccagcttccttcgactttacagttggaatgaacagcctttaaagagtcctaacctcccacttgtcttgattgatttttacttttttaaagtccttgaattcttcctcaagtgaaatctcaggtagaggtgcaatatgtaatacagacaaggtgcgggtttactctgtcaaagctgggataggaggcctagaccatgattctcaaattttattctgcatcagaatcacccagagggcttgtgaaaataaatggctatacaggaggaacgagttgaggagatgtatcgtacatcatggggactatagtcaataacaatatattgtatacttgaaaattgctgagaatagatttcaagttttctcaccataataaaatgaaagtatgtgagttaatgcatatgttaattagcttgatctagccattccacagtgtatacacatatcaaaacataccataaataccataaatacatacaatttttgtcaattagatatgcattttttaaaataagaggaaaaaactacaaaaaaaaaaatctcacaattgctggctccacccccagattttctaattcaataaatctggttgaggtcaggtaatttgcatttcaaaggaatacttaggcgatgctatgcttttggtccagagacgatactttcagaactattttcctagggcctcctttctgcctggctctcacctacaaaggcagctctgaggcagctgtggagctcctcctcaaaattccgggggcttctttgtgaaactccattgaagacccctgacctacaggtcaagatcacattcctttgcttggactcaagatccactgtatcctggccccagcttttctctagagccagctctcactcaacaaaccttccattcaccctacaacccaatggagctgtcctccccactgttctccaagcacttcctgctgtcacaaggcttctctgccttaccatgagatgcacaaatgcatttctttacccatttaatttctagtaaatttttctctgaagtttcacaaactagcctctctcacaaaaagatgtagtaagggctttaaaacccacaaatttatctgagtgaggtgcaaataataaaatgtactggtgtttcattcctttcctttagaggaaatagattctgaatcaacctggctgacattaggatctacagctgctagggatacagtggattaatgccttacctagtggtattattaataataaataatgtttgggatgtttttaatggattttctccagattcctcatgcaattctcagatgttggtcacggaccacaggatttatgaaaactatatagagcagtgaacacatgctataaaagcttcttcagtcagagaaacactaaaaatgcattaaagtaggatttcaagattaactcaagtctgcactactgttgtctagaaaagtctccattcagtttcaataacatctttttgcactatcctaattgttggacaactctcttagagtcgatgtacatatttattatgttttcttgggatattccatgcaaagcaagtgtccattcatgagcataaacctctaaaagtcttgagtaagcagtaaataatccattcctctaaatccatagaaccatgattcagtgtcttggagacaaacttaaaatttggagttgtttaagcctatcatctccttggtttttgccatttgatagtaaatttgagattttattatctctaatgcattgatgacaaatacagttgacccttgaatgacatgaggttagagttgccaaccccccatgtggtcaaaaatccatgtataacttttgacttcccaaaaacgtaactactaatagttcatcattggccaaaagccttactagtaacatatcaacatacattttgtatgttacatgtataatatatttttacaataaagtaagctagagaaaagaaaatattgagaaaaccataaggaagagaaaatatatttactattcattaagtggaagagatcatcataaaggtcttcatcattgtcgttttcatattgaataggctgaagaggaggaggaagaagaggaggggttggtcttgctatctcaggggtggcagaggaagaaaaaaaattagagtgtaagtgaacccgcacagttcaaacccctgttgttcaagggtaaactgtagtttaaatctgagtgtcaactccaataaattggtagaggcttcctggaa

SEQ ID NO: 192791 - DNA, 4701 bp, Homo sapiens
  Payload ID: 18055
  Gene Name: transient receptor potential cation channel, subfamily M, member 3
  ENST ID: ENST00000396285
  CDS Start-End: 1-4701
atgtatgtgcgagtatcttttgatacaaaacctgatctcctcttacacctgatgaccaaggaatggcagttggagcttcccaagcttctcatctctgtccatgggggcctgcagaactttgaactccagccaaaactcaagcaagtctttgggaaagggctcatcaaagcagcaatgacaactggagcgtggatattcactggaggggttaacacaggtgttattcgtcatgttggcgatgccttgaaggatcatgcctctaagtctcgaggaaagatatgcaccataggtattgccccctggggaattgtggaaaaccaggaggacctcattggaagagatgttgtccggccataccagaccatgtccaatcccatgagcaagctcactgttctcaacagcatgcattcccacttcattctggctgacaacgggaccactggaaaatatggagcagaggtgaaacttcgaagacaactggaaaagcatatttcactccagaagataaacacaagaatcggtcaaggtgttcctgtggtggcactcatagtggaaggaggacccaatgtgatctcgattgttttggagtaccttcgagacacccctcccgtgccagtggttgtctgtgatgggagtggacgggcatcggacatcctggcctttgggcataaatactcagaagaaggcggactgataaatgaatctttgagggaccagctgttggtgactatacagaagactttcacatacactcgaacccaagctcagcatctgttcatcatcctcatggagtgcatgaagaagaaggaattgattacggtatttcggatgggatcagaaggacaccaggacattgatttggctatcctgacagctttactcaaaggagccaatgcctcggccccagaccaactgagcttagctttagcctggaacagagtcgacatcgctcgcagccagatctttatttacgggcaacagtggccggtgggatctctggagcaagccatgttggatgccttagttctggacagagtggattttgtgaaattactcatagagaatggagtaagcatgcaccgttttctcaccatctccagactagaggaattgtacaatacgagacatgggccctcaaatacattgtaccacttggtcagggatgtcaaaaaggggaacctgcccccagactacagaatcagcctgattgacatcggcctggtgatcgagtacctgatgggcggggcttatcgctgcaactacacgcgcaagcgcttccggaccctctaccacaacctcttcggccccaagaggcccaaagccttgaaactgctgggaatggaggatgatattcccttgaggcgaggaagaaagacaaccaagaaacgtgaagaagaggtggacattgacttggatgatcctgagatcaaccacttccccttccctttccatgagctcatggtgtgggctgttctcatgaagcggcagaagatggccctgttcttctggcagcacggtgaggaggccatggccaaggccctggtggcctgcaagctctgcaaagccatggctcatgaggcctctgagaacgacatggttgacgacatttcccaggagctgaatcacaattccagagactttggccagctggctgtggagctcctggaccagtcctacaagcaggacgaacagctggccatgaaactgctgacgtatgagctgaagaactggagcaacgccacgtgcctgcagcttgccgtggctgccaaacaccgcgacttcatcgcgcacacgtgcagccagatgctgctcaccgacatgtggatgggccggctccgcatgcgcaagaactcaggcctcaaggtaattctgggaattctacttcctccttcaattctcagcttggagttcaagaacaaagacgacatgccctatatgtctcaggcccaggaaatccacctccaagagaaggaggcagaagaaccagagaagcccacaaaggaaaaagaggaagaggacatggagctcacagcaatgttgggacgaaacaacggggagtcctccaggaagaaggatgaagaggaagttcagagcaagcaccggttaatccccctcggcagaaaaatctatgaattctacaatgcacccatcgtgaagttctggttctacacactggcgtatatcggatacctgatgctcttcaactatatcgtgttagtgaagatggaacgctggccgtccacccaggaatggatcgtaatctcctatattttcaccctgggaatagaaaagatgagagagattctgatgtcagagccagggaagttgctacagaaagtgaaggtatggctgcaggagtactggaatgtcacggacctcatcgccatccttctgttttctgtcggaatgatccttcgtctccaagaccagcccttcaggagtgacgggagggtcatctactgcgtgaacatcatttactggtatatccgtctcctagacatcttcggcgtgaacaagtatttgggcccgtatgtaatgatgattggaaaaatgatgatagacatgatgtactttgtcatcattatgctggtggttctgatgagctttggggtcgccaggcaagccatcctttttcccaatgaggagccatcatggaaactggccaagaacatcttctacatgccctattggatgatttatggggaagtgtttgcggaccagatagaccgtaagcaagtttatgattctcatacaccaaagtcagctccctgtggacagaatgagacccgagaggatggtaaaataatccagctgcctccctgcaagacaggagcttggatcgtgccggccatcatggcctgctacctcttagtggcaaacatcttgctggtcaacctcctcattgctgtctttaacaatacattttttgaagtaaaatcgatatccaaccaagtctggaagtttcagaggtatcagctcatcatgactttccatgaaaggccagttctgcccccaccactgatcatcttcagccacatgaccatgatattccagcacctgtgctgccgatggaggaaacacgagagcgacccggatgaaagggactacggcctgaaactcttcataaccgatgatgagctcaagaaagtacatgactttgaagagcaatgcatagaagaatacttcagagaaaaggatgatcggttcaactcatctaatgatgagaggatacgggtgacttcagaaagggtggagaacatgtctatgcggctggaggaagtcaacgagagagagcactccatgaaggcttcactccagaccgtggacatccggctggcgcagctggaagaccttatcgggcgcatggccacggccctggagcgcctgacaggtctggagcgggccgagtccaacaaaatccgctcgaggacctcgtcagactgcacggacgccgcctacattgtccgtcagagcagcttcaacagccaggaagggaacaccttcaagctccaagagagtatagaccctgcaggtgaggagaccatgtccccaacttctccaaccttaatgccccgtatgcgaagccattctttctattcggtcaatatgaaagacaaaggtggtatagaaaagttggaaagtatttttaaagaaaggtccctgagcctacaccgggctactagttcccactctgtagcaaaagaacccaaagctcctgcagcccctgccaacaccttggccattgttcctgattccagaagaccatcatcgtgtatagacatctatgtctctgctatggatgagctccactgtgatatagaccctctggacaattccgtgaacatccttgggctgggcgagccaagcttttcaactccagtaccttccacagccccttcaagtagtgcctatgcaacacttgcacccacagacagacctccaagccggagcattgattttgaggacatcacctccatggacactagatctttttcttcagactacacccacctcccagaatgccaaaacccctgggactcagagcctccgatgtaccacaccattgagcgttccaaaagtagccgctacctagccaccacaccctttcttctagaagaggctcccattgtgaaatctcatagctttatgttttccccctcaaggagctattatgccaactttggggtgcctgtaaaaacagcagaatacacaagtattacagactgtattgacacaaggtgtgtcaatgcccctcaagcaattgcggacagagctgccttccctggaggtcttggagacaaagtggaggacttaacttgctgccatccagagcgagaagcagaactgagtcaccccagctctgacagtgaggagaatgaggccaaaggccgcagagccaccattgcaatatcctcccaggagggtgataactcagagagaaccctgtccaacaacatcactgttcccaagatagagcgcgccaacagctactcggcagaggagccaagtgcgccatatgcacacaccaggaagagcttctccatcagtgacaaactcgacaggcagcggaacacagcaagcctgcgaaatcccttccagagaagcaagtcctccaagccggagggccgaggggacagcctgtccatgaggagactgtccagaacatcggctttccaaagctttgaaagcaagcacaactaa

SEQ ID NO: 192792 - DNA, 4740 bp, Homo sapiens
  Payload ID: 18055
  Gene Name: transient receptor potential cation channel, subfamily M, member 3
  ENST ID: ENST00000396292
  CDS Start-End: 1-4740
atgtatgtgcgagtatcttttgatacaaaacctgatctcctcttacacctgatgaccaaggaatggcagttggagcttcccaagcttctcatctctgtccatgggggcctgcagaactttgaactccagccaaaactcaagcaagtctttgggaaagggctcatcaaagcagcaatgacaactggagcgtggatattcactggaggggttaacacaggtgttattcgtcatgttggcgatgccttgaaggatcatgcctctaagtctcgaggaaagatatgcaccataggtattgccccctggggaattgtggaaaaccaggaggacctcattggaagagatgttgtccggccataccagaccatgtccaatcccatgagcaagctcactgttctcaacagcatgcattcccacttcattctggctgacaacgggaccactggaaaatatggagcagaggtgaaacttcgaagacaactggaaaagcatatttcactccagaagataaacacaagatgcctgccgtttttctctcttgactcccgcttgttttattcattttggggtagttgccagttagactcagttggaatcggtcaaggtgttcctgtggtggcactcatagtggaaggaggacccaatgtgatctcgattgttttggagtaccttcgagacacccctcccgtgccagtggttgtctgtgatgggagtggacgggcatcggacatcctggcctttgggcataaatactcagaagaaggcggactgataaatgaatctttgagggaccagctgttggtgactatacagaagactttcacatacactcgaacccaagctcagcatctgttcatcatcctcatggagtgcatgaagaagaaggaattgattacggtatttcggatgggatcagaaggacaccaggacattgatttggctatcctgacagctttactcaaaggagccaatgcctcggccccagaccaactgagcttagctttagcctggaacagagtcgacatcgctcgcagccagatctttatttacgggcaacagtggccggtgggatctctggagcaagccatgttggatgccttagttctggacagagtggattttgtgaaattactcatagagaatggagtaagcatgcaccgttttctcaccatctccagactagaggaattgtacaatacgagacatgggccctcaaatacattgtaccacttggtcagggatgtcaaaaaggggaacctgcccccagactacagaatcagcctgattgacatcggcctggtgatcgagtacctgatgggcggggcttatcgctgcaactacacgcgcaagcgcttccggaccctctaccacaacctcttcggccccaagaggcccaaagccttgaaactgctgggaatggaggatgatattcccttgaggcgaggaagaaagacaaccaagaaacgtgaagaagaggtggacattgacttggatgatcctgagatcaaccacttccccttccctttccatgagctcatggtgtgggctgttctcatgaagcggcagaagatggccctgttcttctggcagcacggtgaggaggccatggccaaggccctggtggcctgcaagctctgcaaagccatggctcatgaggcctctgagaacgacatggttgacgacatttcccaggagctgaatcacaattccagagactttggccagctggctgtggagctcctggaccagtcctacaagcaggacgaacagctggccatgaaactgctgacgtatgagctgaagaactggagcaacgccacgtgcctgcagcttgccgtggctgccaaacaccgcgacttcatcgcgcacacgtgcagccagatgctgctcaccgacatgtggatgggccggctccgcatgcgcaagaactcaggcctcaaggtaattctgggaattctacttcctccttcaattctcagcttggagttcaagaacaaagacgacatgccctatatgtctcaggcccaggaaatccacctccaagagaaggaggcagaagaaccagagaagcccacaaaggaaaaagaggaagaggacatggagctcacagcaatgttgggacgaaacaacggggagtcctccaggaagaaggatgaagaggaagttcagagcaagcaccggttaatccccctcggcagaaaaatctatgaattctacaatgcacccatcgtgaagttctggttctacacactggcgtatatcggatacctgatgctcttcaactatatcgtgttagtgaagatggaacgctggccgtccacccaggaatggatcgtaatctcctatattttcaccctgggaatagaaaagatgagagagattctgatgtcagagccagggaagttgctacagaaagtgaaggtatggctgcaggagtactggaatgtcacggacctcatcgccatccttctgttttctgtcggaatgatccttcgtctccaagaccagcccttcaggagtgacgggagggtcatctactgcgtgaacatcatttactggtatatccgtctcctagacatcttcggcgtgaacaagtatttgggcccgtatgtaatgatgattggaaaaatgatgatagacatgatgtactttgtcatcattatgctggtggttctgatgagctttggggtcgccaggcaagccatcctttttcccaatgaggagccatcatggaaactggccaagaacatcttctacatgccctattggatgatttatggggaagtgtttgcggaccagatagaccctccctgtggacagaatgagacccgagaggatggtaaaataatccagctgcctccctgcaagacaggagcttggatcgtgccggccatcatggcctgctacctcttagtggcaaacatcttgctggtcaacctcctcattgctgtctttaacaatacattttttgaagtaaaatcgatatccaaccaagtctggaagtttcagaggtatcagctcatcatgactttccatgaaaggccagttctgcccccaccactgatcatcttcagccacatgaccatgatattccagcacctgtgctgccgatggaggaaacacgagagcgacccggatgaaagggactacggcctgaaactcttcataaccgatgatgagctcaagaaagtacatgactttgaagagcaatgcatagaagaatacttcagagaaaaggatgatcggttcaactcatctaatgatgagaggatacgggtgacttcagaaagggtggagaacatgtctatgcggctggaggaagtcaacgagagagagcactccatgaaggcttcactccagaccgtggacatccggctggcgcagctggaagaccttatcgggcgcatggccacggccctggagcgcctgacaggtctggagcgggccgagtccaacaaaatccgctcgaggacctcgtcagactgcacggacgccgcctacattgtccgtcagagcagcttcaacagccaggaagggaacaccttcaagctccaagagagtatagaccctgcaggtgaggagaccatgtccccaacttctccaaccttaatgccccgtatgcgaagccattctttctattcggtcaatatgaaagacaaaggtggtatagaaaagttggaaagtatttttaaagaaaggtccctgagcctacaccgggctactagttcccactctgtagcaaaagaacccaaagctcctgcagcccctgccaacaccttggccattgttcctgattccagaagaccatcatcgtgtatagacatctatgtctctgctatggatgagctccactgtgatatagaccctctggacaattccgtgaacatccttgggctgggcgagccaagcttttcaactccagtaccttccacagccccttcaagtagtgcctatgcaacacttgcacccacagacagacctccaagccggagcattgattttgaggacatcacctccatggacactagatctttttcttcagactacacccacctcccagaatgccaaaacccctgggactcagagcctccgatgtaccacaccattgagcgttccaaaagtagccgctacctagccaccacaccctttcttctagaagaggctcccattgtgaaatctcatagctttatgttttccccctcaaggagctattatgccaactttggggtgcctgtaaaaacagcagaatacacaagtattacagactgtattgacacaaggtgtgtcaatgcccctcaagcaattgcggacagagctgccttccctggaggtcttggagacaaagtggaggacttaacttgctgccatccagagcgagaagcagaactgagtcaccccagctctgacagtgaggagaatgaggccaaaggccgcagagccaccattgcaatatcctcccaggagggtgataactcagagagaaccctgtccaacaacatcactgttcccaagatagagcgcgccaacagctactcggcagaggagccaagtgcgccatatgcacacaccaggaagagcttctccatcagtgacaaactcgacaggcagcggaacacagcaagcctgcgaaatcccttccagagaagcaagtcctccaagccggagggccgaggggacagcctgtccatgaggagactgtccagaacatcggctttccaaagctttgaaagcaagcacaactaa

SEQ ID NO: 192793 - DNA, 4701 bp, Homo sapiens
  Payload ID: 18055
  Gene Name: transient receptor potential cation channel, subfamily M, member 3
  ENST ID: ENST00000408909
  CDS Start-End: 1-4701
atgtatgtgcgagtatcttttgatacaaaacctgatctcctcttacacctgatgaccaaggaatggcagttggagcttcccaagcttctcatctctgtccatgggggcctgcagaactttgaactccagccaaaactcaagcaagtctttgggaaagggctcatcaaagcagcaatgacaactggagcgtggatattcactggaggggttaacacaggtgttattcgtcatgttggcgatgccttgaaggatcatgcctctaagtctcgaggaaagatatgcaccataggtattgccccctggggaattgtggaaaaccaggaggacctcattggaagagatgttgtccggccataccagaccatgtccaatcccatgagcaagctcactgttctcaacagcatgcattcccacttcattctggctgacaacgggaccactggaaaatatggagcagaggtgaaacttcgaagacaactggaaaagcatatttcactccagaagataaacacaagaatcggtcaaggtgttcctgtggtggcactcatagtggaaggaggacccaatgtgatctcgattgttttggagtaccttcgagacacccctcccgtgccagtggttgtctgtgatgggagtggacgggcatcggacatcctggcctttgggcataaatactcagaagaaggcggactgataaatgaatctttgagggaccagctgttggtgactatacagaagactttcacatacactcgaacccaagctcagcatctgttcatcatcctcatggagtgcatgaagaagaaggaattgattacggtatttcggatgggatcagaaggacaccaggacattgatttggctatcctgacagctttactcaaaggagccaatgcctcggccccagaccaactgagcttagctttagcctggaacagagtcgacatcgctcgcagccagatctttatttacgggcaacagtggccggtgggatctctggagcaagccatgttggatgccttagttctggacagagtggattttgtgaaattactcatagagaatggagtaagcatgcaccgttttctcaccatctccagactagaggaattgtacaatacgagacatgggccctcaaatacattgtaccacttggtcagggatgtcaaaaagcgagagtatccaggtttcggttggatctattttaaggggaacctgcccccagactacagaatcagcctgattgacatcggcctggtgatcgagtacctgatgggcggggcttatcgctgcaactacacgcgcaagcgcttccggaccctctaccacaacctcttcggccccaagaggcccaaagccttgaaactgctgggaatggaggatgatattcccttgaggcgaggaagaaagacaaccaagaaacgtgaagaagaggtggacattgacttggatgatcctgagatcaaccacttccccttccctttccatgagctcatggtgtgggctgttctcatgaagcggcagaagatggccctgttcttctggcagcacggtgaggaggccatggccaaggccctggtggcctgcaagctctgcaaagccatggctcatgaggcctctgagaacgacatggttgacgacatttcccaggagctgaatcacaattccagagactttggccagctggctgtggagctcctggaccagtcctacaagcaggacgaacagctggccatgaaactgctgacgtatgagctgaagaactggagcaacgccacgtgcctgcagcttgccgtggctgccaaacaccgcgacttcatcgcgcacacgtgcagccagatgctgctcaccgacatgtggatgggccggctccgcatgcgcaagaactcaggcctcaaggtaattctgggaattctacttcctccttcaattctcagcttggagttcaagaacaaagacgacatgccctatatgtctcaggcccaggaaatccacctccaagagaaggaggcagaagaaccagagaagcccacaaaggaaaaagaggaagaggacatggagctcacagcaatgttgggacgaaacaacggggagtcctccaggaagaaggatgaagaggaagttcagagcaagcaccggttaatccccctcggcagaaaaatctatgaattctacaatgcacccatcgtgaagttctggttctacacactggcgtatatcggatacctgatgctcttcaactatatcgtgttagtgaagatggaacgctggccgtccacccaggaatggatcgtaatctcctatattttcaccctgggaatagaaaagatgagagagattctgatgtcagagccagggaagttgctacagaaagtgaaggtatggctgcaggagtactggaatgtcacggacctcatcgccatccttctgttttctgtcggaatgatccttcgtctccaagaccagcccttcaggagtgacgggagggtcatctactgcgtgaacatcatttactggtatatccgtctcctagacatcttcggcgtgaacaagtatttgggcccgtatgtaatgatgattggaaaaatgatgatagacatgatgtactttgtcatcattatgctggtggttctgatgagctttggggtcgccaggcaagccatcctttttcccaatgaggagccatcatggaaactggccaagaacatcttctacatgccctattggatgatttatggggaagtgtttgcggaccagatagaccctccctgtggacagaatgagacccgagaggatggtaaaataatccagctgcctccctgcaagacaggagcttggatcgtgccggccatcatggcctgctacctcttagtggcaaacatcttgctggtcaacctcctcattgctgtctttaacaatacattttttgaagtaaaatcgatatccaaccaagtctggaagtttcagaggtatcagctcatcatgactttccatgaaaggccagttctgcccccaccactgatcatcttcagccacatgaccatgatattccagcacctgtgctgccgatggaggaaacacgagagcgacccggatgaaagggactacggcctgaaactcttcataaccgatgatgagctcaagaaagtacatgactttgaagagcaatgcatagaagaatacttcagagaaaaggatgatcggttcaactcatctaatgatgagaggatacgggtgacttcagaaagggtggagaacatgtctatgcggctggaggaagtcaacgagagagagcactccatgaaggcttcactccagaccgtggacatccggctggcgcagctggaagaccttatcgggcgcatggccacggccctggagcgcctgacaggtctggagcgggccgagtccaacaaaatccgctcgaggacctcgtcagactgcacggacgccgcctacattgtccgtcagagcagcttcaacagccaggaagggaacaccttcaagctccaagagagtatagaccctgcaggtgaggagaccatgtccccaacttctccaaccttaatgccccgtatgcgaagccattctttctattcggtcaatatgaaagacaaaggtggtatagaaaagttggaaagtatttttaaagaaaggtccctgagcctacaccgggctactagttcccactctgtagcaaaagaacccaaagctcctgcagcccctgccaacaccttggccattgttcctgattccagaagaccatcatcgtgtatagacatctatgtctctgctatggatgagctccactgtgatatagaccctctggacaattccgtgaacatccttgggctgggcgagccaagcttttcaactccagtaccttccacagccccttcaagtagtgcctatgcaacacttgcacccacagacagacctccaagccggagcattgattttgaggacatcacctccatggacactagatctttttcttcagactacacccacctcccagaatgccaaaacccctgggactcagagcctccgatgtaccacaccattgagcgttccaaaagtagccgctacctagccaccacaccctttcttctagaagaggctcccattgtgaaatctcatagctttatgttttccccctcaaggagctattatgccaactttggggtgcctgtaaaaacagcagaatacacaagtattacagactgtattgacacaaggtgtgtcaatgcccctcaagcaattgcggacagagctgccttccctggaggtcttggagacaaagtggaggacttaacttgctgccatccagagcgagaagcagaactgagtcaccccagctctgacagtgaggagaatgaggccaaaggccgcagagccaccattgcaatatcctcccaggagggtgataactcagagagaaccctgtccaacaacatcactgttcccaagatagagcgcgccaacagctactcggcagaggagccaagtgcgccatatgcacacaccaggaagagcttctccatcagtgacaaactcgacaggcagcggaacacagcaagcctgcgaaatcccttccagagaagcaagtcctccaagccggagggccgaggggacagcctgtccatgaggagactgtccagaacatcggctttccaaagctttgaaagcaagcacaactaa

SEQ ID NO: 192794 - DNA, 4109 bp, Homo sapiens
  Payload ID: 18056
  Gene Name: transient receptor potential cation channel, subfamily M, member 4
  Uniprot ID: Q8TD43
  ENST ID: ENST00000252826
  CDS Start-End: 127-3771
ctcgccccgccccaggctaggctggaaagtggaggatccggtttgctctgggcgggtctggaagcagagccggcggagggagcgccggggccctgggctgcaggaggttgcggcggccgcggcagcatggtggtgccggagaaggagcagagctggatccccaagatcttcaagaagaagacctgcacgacgttcatagttgactccacagatccgggagggaccttgtgccagtgtgggcgcccccggaccgcccaccccgcagtggccatggaggatgccttcggggcagccgtggtgaccgtgtgggacagcgatgcacacaccacggagaagcccaccgatgcctacggagagctggacttcacgggggccggccgcaagcacagcaatttcctccggctctctgaccgaacggatccagctgcagtttatagtctggtcacacgcacatggggcttccgtgccccgaacctggtggtgtcagtgctggggggatcggggggccccgtcctccagacctggctgcaggacctgctgcgtcgtgggctggtgcgggctgcccagagcacaggagcctggattgtcactgggggtctgcacacgggcatcggccggcatgttggtgtggctgtacgggaccatcagatggccagcactgggggcaccaaggtggtggccatgggtgtggccccctggggtgtggtccggaatagagacaccctcatcaaccccaagggctcgttccctgcgaggtaccggtggcgcggtgacccggaggacggggtccagtttcccctggactacaactactcggccttcttcctggtggacgacggcacacacggctgcctggggggcgagaaccgcttccgcttgcgcctggagtcctacatctcacagcagaagacgggcgtgggagggactggaattgacatccctgtcctgctcctcctgattgatggtgatgagaagatgttgacgcgaatagagaacgccacccaggctcagctcccatgtctcctcgtggctggctcagggggagctgcggactgcctggcggagaccctggaagacactctggccccagggagtgggggagccaggcaaggcgaagcccgagatcgaatcaggcgtttctttcccaaaggggaccttgaggtcctgcaggcccaggtggagaggattatgacccggaaggagctcctgacagtctattcttctgaggatgggtctgaggaattcgagaccatagttttgaaggcccttgtgaaggcctgtgggagctcggaggcctcagcctacctggatgagctgcgtttggctgtggcttggaaccgcgtggacattgcccagagtgaactctttcggggggacatccaatggcggtccttccatctcgaagcttccctcatggacgccctgctgaatgaccggcctgagttcgtgcgcttgctcatttcccacggcctcagcctgggccacttcctgaccccgatgcgcctggcccaactctacagcgcggcgccctccaactcgctcatccgcaaccttttggaccaggcgtcccacagcgcaggcaccaaagccccagccctaaaagggggagctgcggagctccggccccctgacgtggggcatgtgctgaggatgctgctggggaagatgtgcgcgccgaggtacccctccgggggcgcctgggaccctcacccaggccagggcttcggggagagcatgtatctgctctcggacaaggccacctcgccgctctcgctggatgctggcctcgggcaggccccctggagcgacctgcttctttgggcactgttgctgaacagggcacagatggccatgtacttctgggagatgggttccaatgcagtttcctcagctcttggggcctgtttgctgctccgggtgatggcacgcctggagcctgacgctgaggaggcagcacggaggaaagacctggcgttcaagtttgaggggatgggcgttgacctctttggcgagtgctatcgcagcagtgaggtgagggctgcccgcctcctcctccgtcgctgcccgctctggggggatgccacttgcctccagctggccatgcaagctgacgcccgtgccttctttgcccaggatggggtacagtctctgctgacacagaagtggtggggagatatggccagcactacacccatctgggccctggttctcgccttcttttgccctccactcatctacacccgcctcatcaccttcaggaaatcagaagaggagcccacacgggaggagctagagtttgacatggatagtgtcattaatggggaagggcctgtcgggacggcggacccagccgagaagacgccgctgggggtcccgcgccagtcgggccgtccgggttgctgcgggggccgctgcggggggcgccggtgcctacgccgctggttccacttctggggcgcgccggtgaccatcttcatgggcaacgtggtcagctacctgctgttcctgctgcttttctcgcgggtgctgctcgtggatttccagccggcgccgcccggctccctggagctgctgctctatttctgggctttcacgctgctgtgcgaggaactgcgccagggcctgagcggaggcgggggcagcctcgccagcgggggccccgggcctggccatgcctcactgagccagcgcctgcgcctctacctcgccgacagctggaaccagtgcgacctagtggctctcacctgcttcctcctgggcgtgggctgccggctgaccccgggtttgtaccacctgggccgcactgtcctctgcatcgacttcatggttttcacggtgcggctgcttcacatcttcacggtcaacaaacagctggggcccaagatcgtcatcgtgagcaagatgatgaaggacgtgttcttcttcctcttcttcctcggcgtgtggctggtagcctatggcgtggccacggaggggctcctgaggccacgggacagtgacttcccaagtatcctgcgccgcgtcttctaccgtccctacctgcagatcttcgggcagattccccaggaggacatggacgtggccctcatggagcacagcaactgctcgtcggagcccggcttctgggcacaccctcctggggcccaggcgggcacctgcgtctcccagtatgccaactggctggtggtgctgctcctcgtcatcttcctgctcgtggccaacatcctgctggtcaacttgctcattgccatgttcagttacacattcggcaaagtacagggcaacagcgatctctactggaaggcgcagcgttaccgcctcatccgggaattccactctcggcccgcgctggccccgccctttatcgtcatctcccacttgcgcctcctgctcaggcaattgtgcaggcgaccccggagcccccagccgtcctccccggccctcgagcatttccgggtttacctttctaaggaagccgagcggaagctgctaacgtgggaatcggtgcataaggagaactttctgctggcacgcgctagggacaagcgggagagcgactccgagcgtctgaagcgcacgtcccagaaggtggacttggcactgaaacagctgggacacatccgcgagtacgaacagcgcctgaaagtgctggagcgggaggtccagcagtgtagccgcgtcctggggtgggtggccgaggccctgagccgctctgccttgctgcccccaggtgggccgccaccccctgacctgcctgggtccaaagactgagccctgctggcggacttcaaggagaagcccccacaggggattttgctcctagagtaaggctcatctgggcctcggcccccgcacctggtggccttgtccttgaggtgagccccatgtccatctgggccactgtcaggaccacctttgggagtgtcatccttacaaaccacagcatgcccggctcctcccagaaccagtcccagcctgggaggatcaaggcctggatcccgggccgttatccatctggaggctgcagggtccttggggtaacagggaccacagacccctcaccactcacagattcctcacactggggaaataaagccatttcagaggaa

SEQ ID NO: 192795 - DNA, 3444 bp, Homo sapiens
  Payload ID: 18056
  Gene Name: transient receptor potential cation channel, subfamily M, member 4
  Uniprot ID: Q8TD43
  ENST ID: ENST00000427978
  CDS Start-End: 53-3262
ggagggagcgccggggccctgggctgcaggaggttgcggcggccgcggcagcatggtggtgccggagaaggagcagagctggatccccaagatcttcaagaagaagacctgcacgacgttcatagttgactccacagatccgggagggaccttgtgccagtgtgggcgcccccggaccgcccaccccgcagtggccatggaggatgccttcggggcagccgtggtgaccgtgtgggacagcgatgcacacaccacggagaagcccaccgatgcctacggagagctggacttcacgggggccggccgcaagcacagcaatttcctccggctctctgaccgaacggatccagctgcagtttatagtctggtcacacgcacatggggcttccgtgccccgaacctggtggtgtcagtgctggggggatcggggggccccgtcctccagacctggctgcaggacctgctgcgtcgtgggctggtgcgggctgcccagagcacaggagcctggattgtcactgggggtctgcacacgggcatcggccggcatgttggtgtggctgtacgggaccatcagatggccagcactgggggcaccaaggtggtggccatgggtgtggccccctggggtgtggtccggaatagagacaccctcatcaaccccaagggctcgttccctgcgaggtaccggtggcgcggtgacccggaggacggggtccagtttcccctggactacaactactcggccttcttcctggtggacgacggcacacacggctgcctggggggcgagaaccgcttccgcttgcgcctggagtcctacatctcacagcagaagacgggcgtgggagggactggaattgacatccctgtcctgctcctcctgattgatggtgatgagaagatgttgacgcgaatagagaacgccacccaggctcagctcccatgtctcctcgtggctggctcagggggagctgcggactgcctggcggagaccctggaagacactctggccccagggagtgggggagccaggcaaggcgaagcccgagatcgaatcaggcgtttctttcccaaaggggaccttgaggtcctgcaggcccaggtggagaggattatgacccggaaggagctcctgacagtctattcttctgaggatgggtctgaggaattcgagaccatagttttgaaggcccttgtgaaggcctgtgggagctcggaggcctcagcctacctggatgagctgcgtttggctgtggcttggaaccgcgtggacattgcccagagtgaactctttcggggggacatccaatggcggtccttccatctcgaagcttccctcatggacgccctgctgaatgaccggcctgagttcgtgcgcttgctcatttcccacggcctcagcctgggccacttcctgaccccgatgcgcctggcccaactctacagcgcggcgccctccaactcgctcatccgcaaccttttggaccaggcgtcccacagcgcaggcaccaaagccccagccctaaaagggggagctgcggagctccggccccctgacgtggggcatgtgctgaggatgctgctggggaagatgtgcgcgccgaggtacccctccgggggcgcctgggaccctcacccaggccagggcttcggggagagcatgtatctgctctcggacaaggccacctcgccgctctcgctggatgctggcctcgggcaggccccctggagcgacctgcttctttgggcactgttgctgaacagggcacagatggccatgtacttctgggagatgggttccaatgcagtttcctcagctcttggggcctgtttgctgctccgggtgatggcacgcctggagcctgacgctgaggaggcagcacggaggaaagacctggcgttcaagtttgaggggatgggcgttgacctctttggcgagtgctatcgcagcagtgaggtgagggctgcccgcctcctcctccgtcgctgcccgctctggggggatgccacttgcctccagctggccatgcaagctgacgcccgtgccttctttgcccaggatggggtacagtctctgctgacacagaagtggtggggagatatggccagcactacacccatctgggccctggttctcgccttcttttgccctccactcatctacacccgcctcatcaccttcaggaaatcagaagaggagcccacacgggaggagctagagtttgacatggatagtgtcattaatggggaagggcctgtcgggctgaccccgggtttgtaccacctgggccgcactgtcctctgcatcgacttcatggttttcacggtgcggctgcttcacatcttcacggtcaacaaacagctggggcccaagatcgtcatcgtgagcaagatgatgaaggacgtgttcttcttcctcttcttcctcggcgtgtggctggtagcctatggcgtggccacggaggggctcctgaggccacgggacagtgacttcccaagtatcctgcgccgcgtcttctaccgtccctacctgcagatcttcgggcagattccccaggaggacatggacgtggccctcatggagcacagcaactgctcgtcggagcccggcttctgggcacaccctcctggggcccaggcgggcacctgcgtctcccagtatgccaactggctggtggtgctgctcctcgtcatcttcctgctcgtggccaacatcctgctggtcaacttgctcattgccatgttcagttacacattcggcaaagtacagggcaacagcgatctctactggaaggcgcagcgttaccgcctcatccgggaattccactctcggcccgcgctggccccgccctttatcgtcatctcccacttgcgcctcctgctcaggcaattgtgcaggcgaccccggagcccccagccgtcctccccggccctcgagcatttccgggtttacctttctaaggaagccgagcggaagctgctaacgtgggaatcggtgcataaggagaactttctgctggcacgcgctagggacaagcgggagagcgactccgagcgtctgaagcgcacgtcccagaaggtggacttggcactgaaacagctgggacacatccgcgagtacgaacagcgcctgaaagtgctggagcgggaggtccagcagtgtagccgcgtcctggggtgggtggccgaggccctgagccgctctgccttgctgcccccaggtgggccgccaccccctgacctgcctgggtccaaagactgagccctgctggcggacttcaaggagaagcccccacaggggattttgctcctagagtaaggctcatctgggcctcggcccccgcacctggtggccttgtccttgaggtgagccccatgtccatctgggccactgtcaggaccacctttgggagtgtcatccttacaaaccacagcatgcccggc

SEQ ID NO: 192796 - DNA, 3349 bp, Homo sapiens
  Payload ID: 18056
  Gene Name: transient receptor potential cation channel, subfamily M, member 4
  ENST ID: ENST00000598697
  CDS Start-End: 102-413
aaagtggaggatccggtttgctctgggcgggtctggaagcagagccggcggagggagcgccggggccctgggctgcaggaggttgcggcggccgcggcagcatggtggtgccggagaaggagcagagctggatccccaagatcttcaagaagaagacctgcacgacgttcatagttgactccacagatccgggggctcgttccctgcgaggtaccggtggcgcggtgacccggaggacggggtccagtttcccctggactacaactactcggccttcttcctggtggacgacggcacacacggctgcctggggggcgagaaccgcttccgcttgcgcctggagtcctacatctcacagcagaagacgggcgtgggagggactggaattgacatccctgtcctgctcctcctgattgatggtgatgagaagatgttgacgcgaatagagaacgccacccaggctcagctcccatgtctcctcgtggctggctcagggggagctgcggactgcctggcggagaccctggaagacactctggccccagggagtgggggagccaggcaaggcgaagcccgagatcgaatcaggcgtttctttcccaaaggggaccttgaggtcctgcaggcccagtccttccatctcgaagcttccctcatggacgccctgctgaatgaccggcctgagttcgtgcgcttgctcatttcccacggcctcagcctgggccacttcctgaccccgatgcgcctggcccaactctacagcgcggcgccctccaactcgctcatccgcaaccttttggaccaggcgtcccacagcgcaggcaccaaagccccagccctaaaagggggagctgcggagctccggccccctgacgtggggcatgtgctgaggatgctgctggggaagatgtgcgcgccgaggtacccctccgggggcgcctgggaccctcacccaggccagggcttcggggagagcatgtatctgctctcggacaaggccacctcgccgctctcgctggatgctggcctcgggcaggccccctggagcgacctgcttctttgggcactgttgctgaacagggcacagatggccatgtacttctgggagatgggttccaatgcagtttcctcagctcttggggcctgtttgctgctccgggtgatggcacgcctggagcctgacgctgaggaggcagcacggaggaaagacctggcgttcaagtttgaggggatgggcgttgacctctttggcgagtgctatcgcagcagtgaggtgagggctgcccgcctcctcctccgtcgctgcccgctctggggggatgccacttgcctccagctggccatgcaagctgacgcccgtgccttctttgcccaggatggggtacagtctctgctgacacagaagtggtggggagatatggccagcactacacccatctgggccctggttctcgccttcttttgccctccactcatctacacccgcctcatcaccttcaggaaatcagaagaggagcccacacgggaggagctagagtttgacatggatagtgtcattaatggggaagggcctgtcgggacggcggacccagccgagaagacgccgctgggggtcccgcgccagtcgggccgtccgggttgctgcgggggccgctgcggggggcgccggtgcctacgccgctggttccacttctggggcgcgccggtgaccatcttcatgggcaacgtggtcagctacctgctgttcctgctgcttttctcgcgggtgctgctcgtggatttccagccggcgccgcccggctccctggagctgctgctctatttctgggctttcacgctgctgtgcgaggaactgcgccagggcctgagcggaggcgggggcagcctcgccagcgggggccccgggcctggccatgcctcactgagccagcgcctgcgcctctacctcgccgacagctggaaccagtgcgacctagtggctctcacctgcttcctcctgggcgtgggctgccggctgaccccgggtttgtaccacctgggccgcactgtcctctgcatcgacttcatggttttcacggtgcggctgcttcacatcttcacggtcaacaaacagctggggcccaagatcgtcatcgtgagcaagatgatgaaggacgtgttcttcttcctcttcttcctcggcgtgtggctggtagcctatggcgtggccacggaggggctcctgaggccacgggacagtgacttcccaagtatcctgcgccgcgtcttctaccgtccctacctgcagatcttcgggcagattccccaggaggacatggacgtggccctcatggagcacagcaactgctcgtcggagcccggcttctgggcacaccctcctggggcccaggcgggcacctgcgtctcccagtatgccaactggctggtggtgctgctcctcgtcatcttcctgctcgtggccaacatcctgctggtcaacttgctcattgccatgttcagttacacattcggcaaagtacagggcaacagcgatctctactggaaggcgcagcgttaccgcctcatccgggaattccactctcggcccgcgctggccccgccctttatcgtcatctcccacttgcgcctcctgctcaggcaattgtgcaggcgaccccggagcccccagccgtcctccccggccctcgagcatttccgggtttacctttctaaggaagccgagcggaagctgctaacgtgggaatcggtgcataaggagaactttctgctggcacgcgctagggacaagcgggagagcgactccgagcgtctgaagcgcacgtcccagaaggtggacttggcactgaaacagctgggacacatccgcgagtacgaacagcgcctgaaagtgctggagcgggaggtccagcagtgtagccgcgtcctggggtgggtggccgaggccctgagccgctctgccttgctgcccccaggtgggccgccaccccctgacctgcctgggtccaaagactgagccctgctggcggacttcaaggagaagcccccacaggggattttgctcctagagtaaggctcatctgggcctcggcccccgcacctggtggccttgtccttgaggtgagccccatgtccatctgggccactgtcaggaccacctttgggagtgtcatccttacaaaccacagcatgcccggctcctcccagaaccagtcccagcctgggaggatcaaggcctggatcccgggccgttatccatctggaggctgcagggtccttggggtaacagggaccacagacccctcaccactcacagattcctcacactggggaaataaagccatttcagagg

SEQ ID NO: 192797 - DNA, 3702 bp, Homo sapiens
  Payload ID: 18056
  Gene Name: transient receptor potential cation channel, subfamily M, member 4
  ENST ID: ENST00000595519
  CDS Start-End: 76-309
gcgggtctggaagcagagccggcggagggagcgccggggccctgggctgcaggaggttgcggcggccgcggcagcatggtggtgccggagaaggagcagagctggatccccaagatcttcaagaagaagacctgcacgacgttcatagttgactccacagatccggggagcctggattgtcactgggggtctgcacacgggcatcggccggcatgttggtgtggctgtacgggaccatcagatggccagcactgggggcaccaaggtggtggccatgggtgtggccccctggggtgtggtccggaatagagacaccctcatcaaccccaagggctcgttccctgcgaggtaccggtggcgcggtgacccggaggacggggtccagtttcccctggactacaactactcggccttcttcctggtggacgacggcacacacggctgcctggggggcgagaaccgcttccgcttgcgcctggagtcctacatctcacagcagaagacgggcgtgggagggactggaattgacatccctgtcctgctcctcctgattgatggtgatgagaagatgttgacgcgaatagagaacgccacccaggctcagctcccatgtctcctcgtggctggctcagggggagctgcggactgcctggcggagaccctggaagacactctggccccagggagtgggggagccaggcaaggcgaagcccgagatcgaatcaggcgtttctttcccaaaggggaccttgaggtcctgcaggcccaggtggagaggattatgacccggaaggagctcctgacagtctattcttctgaggatgggtctgaggaattcgagaccatagttttgaaggcccttgtgaaggcctgtgggagctcggaggcctcagcctacctggatgagctgcgtttggctgtggcttggaaccgcgtggacattgcccagagtgaactctttcggggggacatccaatggcggtccttccatctcgaagcttccctcatggacgccctgctgaatgaccggcctgagttcgtgcgcttgctcatttcccacggcctcagcctgggccacttcctgaccccgatgcgcctggcccaactctacagcgcggcgccctccaactcgctcatccgcaaccttttggaccaggcgtcccacagcgcaggcaccaaagccccagccctaaaagggggagctgcggagctccggccccctgacgtggggcatgtgctgaggatgctgctggggaagatgtgcgcgccgaggtacccctccgggggcgcctgggaccctcacccaggccagggcttcggggagagcatgtatctgctctcggacaaggccacctcgccgctctcgctggatgctggcctcgggcaggccccctggagcgacctgcttctttgggcactgttgctgaacagggcacagatggccatgtacttctgggagatgggttccaatgcagtttcctcagctcttggggcctgtttgctgctccgggtgatggcacgcctggagcctgacgctgaggaggcagcacggaggaaagacctggcgttcaagtttgaggggatgggcgttgacctctttggcgagtgctatcgcagcagtgaggtgagggctgcccgcctcctcctccgtcgctgcccgctctggggggatgccacttgcctccagctggccatgcaagctgacgcccgtgccttctttgcccaggatggggtacagtctctgctgacacagaagtggtggggagatatggccagcactacacccatctgggccctggttctcgccttcttttgccctccactcatctacacccgcctcatcaccttcaggaaatcagaagaggagcccacacgggaggagctagagtttgacatggatagtgtcattaatggggaagggcctgtcgggacggcggacccagccgagaagacgccgctgggggtcccgcgccagtcgggccgtccgggttgctgcgggggccgctgcggggggcgccggtgcctacgccgctggttccacttctggggcgcgccggtgaccatcttcatgggcaacgtggtcagctacctgctgttcctgctgcttttctcgcgggtgctgctcgtggatttccagccggcgccgcccggctccctggagctgctgctctatttctgggctttcacgctgctgtgcgaggaactgcgccagggcctgagcggaggcgggggcagcctcgccagcgggggccccgggcctggccatgcctcactgagccagcgcctgcgcctctacctcgccgacagctggaaccagtgcgacctagtggctctcacctgcttcctcctgggcgtgggctgccggctgaccccgggtttgtaccacctgggccgcactgtcctctgcatcgacttcatggttttcacggtgcggctgcttcacatcttcacggtcaacaaacagctggggcccaagatcgtcatcgtgagcaagatgatgaaggacgtgttcttcttcctcttcttcctcggcgtgtggctggtagcctatggcgtggccacggaggggctcctgaggccacgggacagtgacttcccaagtatcctgcgccgcgtcttctaccgtccctacctgcagatcttcgggcagattccccaggaggacatggacgtggccctcatggagcacagcaactgctcgtcggagcccggcttctgggcacaccctcctggggcccaggcgggcacctgcgtctcccagtatgccaactggctggtggtgctgctcctcgtcatcttcctgctcgtggccaacatcctgctggtcaacttgctcattgccatgttcagttacacattcggcaaagtacagggcaacagcgatctctactggaaggcgcagcgttaccgcctcatccgggaattccactctcggcccgcgctggccccgccctttatcgtcatctcccacttgcgcctcctgctcaggcaattgtgcaggcgaccccggagcccccagccgtcctccccggccctcgagcatttccgggtttacctttctaaggaagccgagcggaagctgctaacgtgggaatcggtgcataaggagaactttctgctggcacgcgctagggacaagcgggagagcgactccgagcgtctgaagcgcacgtcccagaaggtggacttggcactgaaacagctgggacacatccgcgagtacgaacagcgcctgaaagtgctggagcgggaggtccagcagtgtagccgcgtcctggggtgggtggccgaggccctgagccgctctgccttgctgcccccaggtgggccgccaccccctgacctgcctgggtccaaagactgagccctgctggcggacttcaaggagaagcccccacaggggattttgctcctagagtaaggctcatctgggcctcggcccccgcacctggtggccttgtccttgaggtgagccccatgtccatctgggccactgtcaggaccacctttgggagtgtcatccttacaaaccacagcatgcccggctcctcccagaaccagtcccagcctgggaggatcaaggcctggatcccgggccgttatccatctggaggctgcagggtccttggggtaacagggaccacagacccctcaccactcacagattcctcacactggggaaataaagccatttcagaggaa

SEQ ID NO: 192798 - DNA, 3695 bp, Homo sapiens
  Payload ID: 18056
  Gene Name: transient receptor potential cation channel, subfamily M, member 4
  ENST ID: ENST00000598502
  CDS Start-End: 36-686
cctgggctgcaggaggttgcggcggccgcggcagcatggtggtgccggagaaggagcagagctggatccccaagatcttcaagaagaagacctgcacgacgttcatagttgactccacagatccgggagggaccttgtgccagtgtgggcgcccccggaccgcccaccccgcagtggccatggaggatgccttcggggcagccgtggtgaccgtgtgggacagcgatgcacacaccacggagaagcccaccgatgcctacggagagctggacttcacgggggccggccgcaagcacagcaatgagcctggattgtcactgggggtctgcacacgggcatcggccggcatgttggtgtggctgtacgggaccatcagatggccagcactgggggcaccaaggtggtggccatgggtgtggccccctggggtgtggtccggaatagagacaccctcatcaaccccaagggctcgttccctgcgaggtaccggtggcgcggtgacccggaggacggggtccagtttcccctggactacaactactcggccttcttcctggtggacgacggcacacacggctgcctggggggcgagaaccgcttccgcttgcgcctggagtcctacatctcacagcagaagacgggcgtgggagggactggaattgacatccctgtcctgctcctcctgattgatggtgatgagaagatgttgacgcgaatagagaacgccacccaggctcagctcccatgtctcctcgtggctggctcagggggagctgcggactgcctggcggagaccctggaagacactctggccccagggagtgggggagccaggcaaggcgaagcccgagatcgaatcaggcgtttctttcccaaaggggaccttgaggtcctgcaggcccaggtggagaggattatgacccggaaggagctcctgacagtctattcttctgaggatgggtctgaggaattcgagaccatagttttgaaggcccttgtgaaggcctgtgggagctcggaggcctcagcctacctggatgagctgcgtttggctgtggcttggaaccgcgtggacattgcccagagtgaactctttcggggggacatccaatggcggtccttccatctcgaagcttccctcatggacgccctgctgaatgaccggcctgagttcgtgcgcttgctcatttcccacggcctcagcctgggccacttcctgaccccgatgcgcctggcccaactctacagcgcggcgccctccaactcgctcatccgcaaccttttggaccaggcgtcccacagcgcaggcaccaaagccccagccctaaaagggggagctgcggagctccggccccctgacgtggggcatgtgctgaggatgctgctggggaagatgtgcgcgccgagatgtatctgctctcggacaaggccacctcgccgctctcgctggatgctggcctcgggcaggccccctggagcgacctgcttctttgggcactgttgctgaacagggcacagatggccatgtacttctgggagatgggttccaatgcagtttcctcagctcttggggcctgtttgctgctccgggtgatggcacgcctggagcctgacgctgaggaggcagcacggaggaaagacctggcgttcaagtttgaggggatgggcgttgacctctttggcgagtgctatcgcagcagtgaggtgagggctgcccgcctcctcctccgtcgctgcccgctctggggggatgccacttgcctccagctggccatgcaagctgacgcccgtgccttctttgcccaggatggggtacagtctctgctgacacagaagtggtggggagatatggccagcactacacccatctgggccctggttctcgccttcttttgccctccactcatctacacccgcctcatcaccttcaggaaatcagaagaggagcccacacgggaggagctagagtttgacatggatagtgtcattaatggggaagggcctgtcgggacggcggacccagccgagaagacgccgctgggggtcccgcgccagtcgggccgtccgggttgctgcgggggccgctgcggggggcgccggtgcctacgccgctggttccacttctggggcgcgccggtgaccatcttcatgggcaacgtggtcagctacctgctgttcctgctgcttttctcgcgggtgctgctcgtggatttccagccggcgccgcccggctccctggagctgctgctctatttctgggctttcacgctgctgtgcgaggaactgcgccagggcctgagcggaggcgggggcagcctcgccagcgggggccccgggcctggccatgcctcactgagccagcgcctgcgcctctacctcgccgacagctggaaccagtgcgacctagtggctctcacctgcttcctcctgggcgtgggctgccggctgaccccgggtttgtaccacctgggccgcactgtcctctgcatcgacttcatggttttcacggtgcggctgcttcacatcttcacggtcaacaaacagctggggcccaagatcgtcatcgtgagcaagatgatgaaggacgtgttcttcttcctcttcttcctcggcgtgtggctggtagcctatggcgtggccacggaggggctcctgaggccacgggacagtgacttcccaagtatcctgcgccgcgtcttctaccgtccctacctgcagatcttcgggcagattccccaggaggacatggacgtggccctcatggagcacagcaactgctcgtcggagcccggcttctgggcacaccctcctggggcccaggcgggcacctgcgtctcccagtatgccaactggctggtggtgctgctcctcgtcatcttcctgctcgtggccaacatcctgctggtcaacttgctcattgccatgttcagttacacattcggcaaagtacagggcaacagcgatctctactggaaggcgcagcgttaccgcctcatccgggaattccactctcggcccgcgctggccccgccctttatcgtcatctcccacttgcgcctcctgctcaggcaattgtgcaggcgaccccggagcccccagccgtcctccccggccctcgagcatttccgggtttacctttctaaggaagccgagcggaagctgctaacgtgggaatcggtgcataaggagaactttctgctggcacgcgctagggacaagcgggagagcgactccgagcgtctgaagcgcacgtcccagaaggtggacttggcactgaaacagctgggacacatccgcgagtacgaacagcgcctgaaagtgctggagcgggaggtccagcagtgtagccgcgtcctggggtgggtggccgaggccctgagccgctctgccttgctgcccccaggtgggccgccaccccctgacctgcctgggtccaaagactgagccctgctggcggacttcaaggagaagcccccacaggggattttgctcctagagtaaggctcatctgggcctcggcccccgcacctggtggccttgtccttgaggtgagccccatgtccatctgggccactgtcaggaccacctttgggagtgtcatccttacaaaccacagcatgcccggctcctcccagaaccagtcccagcctgggaggatcaaggcctggatcccgggccgttatccatctggaggc

SEQ ID NO: 192799 - DNA, 780 bp, Homo sapiens
  Payload ID: 18056
  Gene Name: transient receptor potential cation channel, subfamily M, member 4
  ENST ID: ENST00000597316
  CDS Start-End: 1-155
agcggaagctgctaacgtgggaatcggtgcataaggagaactttctgctggcacgcgctagggacaagcgggagagcgactccgagcgtctgaagcgcacgtcccagaagtccagcagtgtagccgcgtcctggggtgggtggccgaggccctgagccgctctgccttgctgcccccaggtgggccgccaccccctgacctgcctgggtccaaaggtcagtgtgtagcatcagcctgtgcatctccagcctctgttcctgtatttttgcgtgtttttctctctcggcacctttccagtgtccctgggtcactctcttggtctcctttgagccttttgtactctcgccttcgtctttcttcttttttgccagtctcccagtttttctgtctctccccttccctgccaatcacctgctctctcttttctctcttcccccagactgagccctgctggcggacttcaaggagaagcccccacaggggattttgctcctagagtaaggctcatctgggcctcggcccccgcacctggtggccttgtccttgaggtgagccccatgtccatctgggccactgtcaggaccacctttgggagtgtcatccttacaaaccacagcatgcccggctcctcccagaaccagtcccagcctgggaggatcaaggcctggatcccgggccgttatccatctggaggctgcagggtccttggggtaacagggaccacagacccctcaccactcacagattcctcacactggggaaataaagccatttcagagg

SEQ ID NO: 192800 - DNA, 594 bp, Homo sapiens
  Payload ID: 18056
  Gene Name: transient receptor potential cation channel, subfamily M, member 4
  ENST ID: ENST00000598691
  CDS Start-End: 127-594
ctcgccccgccccaggctaggctggaaagtggaggatccggtttgctctgggcgggtctggaagcagagccggcggagggagcgccggggccctgggctgcaggaggttgcggcggccgcggcagcatggtggtgccggagaaggagcagagctggatccccaagatcttcaagaagaagacctgcacgacgttcatagttgactccacagatccgggagggaccttgtgccagtgtgggcgcccccggaccgcccaccccgcagtggccatggaggatgccttcggggcagccgtggtgaccgtgtgggacagcgatgcacacaccacggagaagcccaccgatgcctacggagagctggacttcacgggggccggccgcaagcacagcaatggctcgttccctgcgaggtaccggtggcgcggtgacccggaggacggggtccagtttcccctggactacaactactcggccttcttcctggtggacgacggcacacacggctgcctggggggcgagaaccgcttccgcttgcgcctggagtcctacatctcacagcagaagacgggcgtgggagggactggaattgacatc

SEQ ID NO: 192801 - DNA, 1829 bp, Homo sapiens
  Payload ID: 18056
  Gene Name: transient receptor potential cation channel, subfamily M, member 4
  ENST ID: ENST00000599628
  CDS Start-End: 76-171
gcgggtctggaagcagagccggcggagggagcgccggggccctgggctgcaggaggttgcggcggccgcggcagcatggtggtgccggagaaggagcagagctggatccccaagatcttcaagaagaagacctgcacgacgttcatagttgactccacagatccggggtgaggagttcgcccctggactgaccccagagggtccgcggcccgctgaccccgcccgcggatggtcacgccccagccctgctccttccccattcctggactcggggaccttcccaagggcgttccttgccgacgctctccctctaggagcgtttgggtctgtgtagacacccctcattccccattcgccattctcccgctcagggtcagtgtagacgctccagggctcggttctgcttctttcctccccgatgtctcttctatgtgcttctgtctcttcgtgtcactttctgtgtctctgtctttcccttttgggtatttctgtttcattcattcattcattcattcattcattcattcatccatccatgcaagaaaccctcactcagcgctcccaaggtccctttagcctaattcaacggccctgccagggttccaatttcccctgggacacgtgctgtgtggcttcgggcaaatcatttcacctctctgggtcccgtttctcatctgggcatcaaaagaggcttgatctcctggggttattatgagaattaaacaagttaatgcttgtgatattcctggcacagcgcccagcacaggacgctgggaaatatctgcagctcccactgggaggtggcaattattaccgcgggcgggccctgtcttggtggccggggacaccaattgagctagatagggtgtgtgcgtccgcgaggagctcccgcccttcagtgacggcctctcaagcggatccaggctttctagtttttttttttttttttttttttttgagacggtgtctcgctctgtcccccaggctggagtgcagtggcgcgatctcggctcactgcaagctccgcctcccgggttcacgccgttttcctgcctcagcctcccgagtagctgggactacaggcgcccgccaccacgcccggctaattttttgtattttagtagagacggggtttcaccgtgttggccaggatgatctcgatctcctgaccttgtgatccgcccgcctcagcccctcaaagtactgggattacaggcgtgagccatcgcgctgggccaattttttgtattttttttttagtagagacggggttgcaccgtgttagccagatggtctcgatctcctgacctcatgatccgccggcctcggcctcccaaagcgctaggattacaggtgtgagccaccgcacctggcccaggctttctagttttttgttttttgtttttttgagacagagtctggctctgtcgcccaggctggagtgcagtgttgcgatatcagctcactgcaacatccacctcctgggttcaagcagttctcatgcctcagcctccctagtagctgggattacaggtgcctaccaccatgcccagctaattttttgtattttagtagagacgggatttcaccctgttgcccaggttggtcttgaactcttgatctcaggcaatgcacctgccttggctttccaaagtactgggattacaggtgtgagccaccgcgcccagccctctagttgtttttcaagacagtttttggggtgcgggaagtatccacattcctacttcagtgtgtattttgttatgactatatattagtgcagtatggcttgtaaatgatggataaataaacagatatgcgcttgttgg

SEQ ID NO: 192802 - DNA, 3929 bp, Homo sapiens
  Payload ID: 18057
  Gene Name: transient receptor potential cation channel, subfamily M, member 5
  Uniprot ID: Q9NZQ8
  ENST ID: ENST00000155858
  CDS Start-End: 10-3507
gaggccaccatgcaggatgtccaaggcccccgtcccggaagccccggggatgctgaagaccggcgggagctgggcttgcacaggggcgaggtcaactttggagggtctgggaagaagcgaggcaagtttgtacgggtgccgagcggagtggccccgtctgtgctctttgacctgctgcttgctgagtggcacctgccggcccccaacctggtggtgtccctggtgggtgaggagcagcctttcgccatgaagtcctggctgcgggatgtgctgcgcaaggggctggtgaaggcggctcagagcacaggagcctggatcctgaccagtgccctccgcgtgggcctggccaggcatgtcgggcaggccgtgcgcgaccactcgctggccagcacgtccaccaaggtccgtgtggttgctgtcggcatggcctcgctgggccgcgtcctgcaccgccgcattctggaggaggcccaggaggattttcctgtccactaccctgaggatgacggcggcagccagggccccctctgttcactggacagcaacctctcccacttcatcctggtggagccaggccccccggggaagggcgatgggctgacggagctgcggctgaggctggagaagcacatctcggagcagagggcgggctacgggggcactggcagcatcgagatccctgtcctctgcttgctggtcaatggtgatcccaacaccttggagaggatctccagggccgtggagcaggctgccccgtggctgatcctggtaggctcggggggcatcgccgatgtgcttgctgccctagtgaaccagccccacctcctggtgcccaaggtggccgagaagcagtttaaggagaagttccccagcaagcatttctcttgggaggacatcgtgcgctggaccaagctgctgcagaacatcacctcacaccagcacctgctcaccgtgtatgacttcgagcaggagggctccgaggagctggacacggtcatcctgaaggcgctggtgaaagcctgcaagagccacagccaggagcctcaggactatctggatgagctcaagctggccgtggcctgggaccgcgtggacatcgccaagagtgagatcttcaatggggacgtggagtggaagtcctgtgacctggaggaggtgatggtggacgccctggtcagcaacaagcccgagtttgtgcgcctctttgtggacaacggcgcagacgtggccgacttcctgacgtatgggcggctgcaggagctctaccgctccgtgtcacgcaagagcctgctcttcgacctgctgcagcggaagcaggaggaggcccggctgacgctggccggcctgggcacccagcaggcccgggagccacccgcggggccaccggccttctccctgcacgaggtctcccgcgtactcaaggacttcctgcaggacgcctgccgaggcttctaccaggacggccggccaggggaccgcaggagggcggagaagggcccggccaagcggcccacgggccagaagtggctgctggacctgaaccagaagagcgagaacccctggcgggacctgttcctgtgggccgtgctgcagaaccgccacgagatggccacctacttctgggccatgggccaggaaggtgtggcagccgcactggccgcctgcaaaatcctcaaagagatgtcgcacctggagacggaggccgaggcggcccgagccacgcgcgaggcgaaatacgagcggctggcccttgacctcttctccgagtgctacagcaacagtgaggcccgcgccttcgccctgctggtgcgccggaaccgctgctggagcaagaccacctgcctgcacctggccaccgaggctgacgccaaggccttctttgcccacgacggcgttcaggccttcctgaccaggatctggtggggggacatggccgcaggcacgcccatcctgcggctgctaggagccttcctctgccccgccctcgtctataccaacctcatcaccttcagtgaggaagctcccctgaggacaggcctggaggacctgcaggacctggacagcctggacacggagaagagcccgctgtatggcctgcagagccgggtggaggagctggtggaggcgccgagggctcagggtgaccgaggcccacgtgctgtcttcctgctcacacgctggcggaaattctggggcgctcccgtgactgtgttcctggggaacgtggtcatgtacttcgccttcctcttcctgttcacctacgtcctgctggtggacttcaggccgcccccccagggcccctcagggcccgaggtcaccctctacttctgggtctttacgctggtgctggaggaaatccggcagggcttcttcacagacgaggacacacacctggtgaagaagttcacactgtatgtgggggacaactggaacaagtgtgacatggtggccatcttcctgttcatcgtgggtgtcacctgcaggatgctgccgtcggcgtttgaggctggccgcacagtcctcgccatggacttcatggtgttcacgctgcggctgatccatatctttgccatacacaagcagctgggccccaagatcatcgtggtagagcgcatgatgaaggacgtcttcttcttcctcttctttctgagcgtgtggctcgtggcctacggtgtcaccacccaggcgctgctgcacccccatgacggccgcctggagtggatcttccgccgggtgctctaccggccctacctgcagatcttcggccagatcccactggacgagattgatgaagcccgtgtgaactgctccacccacccactgctgctggaggactcaccatcctgccccagcctctatgccaactggctggtcatcctcctgctggtcaccttcctgttggtcaccaatgtgctgctcatgaacctgctcatcgccatgttcagctacacgttccaggtggtgcagggcaacgcagacatgttctggaagttccagcgctacaacctgattgtggagtaccacgagcgccccgccctggccccgcccttcatcctgctcagccacctgagcctgacgctccgccgggtcttcaagaaggaggctgagcacaagcgggagcacctggagagagacctgccagaccccctggaccagaaggtcgtcacctgggagacagtccagaaggagaacttcctgagcaagatggagaagcggaggagggacagcgagggggaggtgctgcggaaaaccgcccacagagtggacttcattgccaagtacctcgggggtctgagagagcaagaaaagcgcatcaagtgtctggagtcacagatcaactactgctcggtgctcgtgtcctccgtggctgacgtgctggcccagggtggcggcccccggagctctcagcactgtggcgagggaagccagctggtggctgctgaccacagaggtggtttagatggctgggaacaacccggggctggccagcctccctcggacacctgagctgcttggcctgccacgtgtggggccacctctcctcagctggccaccctgcacgttgtgcactgacctttgccgacctccagcggaaccccccagggggcaccagccccccagcagacaatggccctcctggtgcctcaccacagaccctcacccaaaggaaccgctccttgtccctcctggcctccccggaggcacagcagtgtcatggggctgtctcccctgacaggcacaactccccgggcagaaaacgtgccccaccgcatccctacctggaaactgaccagcctgcactgtggaaaagctggccctgtggcgtgacgggggagcacccccatccagactgcgaagctgctctggggtctgcacccacccctgccctgacttgtgttgcctgacaagagactcatctttttttgaaa

SEQ ID NO: 192803 - DNA, 3562 bp, Homo sapiens
  Payload ID: 18057
  Gene Name: transient receptor potential cation channel, subfamily M, member 5
  ENST ID: ENST00000533060
  CDS Start-End: 7-3528
gccaccatgcaggatgtccaaggcccccgtcccggaagccccggggatgctgaagaccggcgggagctgggcttgcacaggggcgaggtcaactttggagggtctgggaagaagcgaggcaagtttgtacgggtgccgagcggagtggccccgtctgtgctctttgacctgctgcttgctgagtggcacctgccggcccccaacctggtggtgtccctggtgggtgaggagcagcctttcgccatgaagtcctggctgcgggatgtgctgcgcaaggggctggtgaaggcggctcagagcacaggagcctggatcctgaccagtgccctccgcgtgggcctggccaggcatgtcgggcaggccgtgcgcgaccactcgctggccagcacgtccaccaaggtccgtgtggttgctgtcggcatggcctcgctgggccgcgtcctgcaccgccgcattctggaggaggcccaggaggattttcctgtccactaccctgaggatgacggcggcagccagggccccctctgttcactggacagcaacctctcccacttcatcctggtggagccaggccccccggggaagggcgatgggctgacggagctgcggctgaggctggagaagcacatctcggagcagagggcgggctacgggggcactggcagcatcgagatccctgtcctctgcttgctggtcaatggtgatcccaacaccttggagaggatctccagggccgtggagcaggctgccccgtggctgatcctggtaggctcggggggcatcgccgatgtgcttgctgccctagtgaaccagccccacctcctggtgcccaaggtggccgagaagcagtttaaggagaagttccccagcaagcatttctcttgggaggacatcgtgcgctggaccaagctgctgcagaacatcacctcacaccagcacctgctcaccgtgtatgacttcgagcaggagggctccgaggagctggacacggtcatcctgaaggcgctggtgaaagcctgcaagagccacagccaggagcctcaggactatctggatgagctcaagctggccgtggcctgggaccgcgtggacatcgccaagagtgagatcttcaatggggacgtggagtggaagtcctgtgacctggaggaggtgatggtggacgccctggtcagcaacaagcccgagtttgtgcgcctctttgtggacaacggcgcagacgtggccgacttcctgacgtatgggcggctgcaggagctctaccgctccgtgtcacgcaagagcctgctcttcgacctgctgcagcggaagcaggaggaggcccggctgacgctggccggcctgggcacccagcaggcccgggagccacccgcggggccaccggccttctccctgcacgaggtctcccgcgtactcaaggacttcctgcaggacgcctgccgaggcttctaccaggacggccggccaggggaccgcaggagggcggagaagggcccggccaagcggcccacgggccagaagtggctgctggacctgaaccagaagagcgagaacccctggcgggacctgttcctgtgggccgtgctgcagaaccgccacgagatggccacctacttctgggccatgggccaggaaggtgtggcagccgcactggccgcctgcaaaatcctcaaagagatgtcgcacctggagacggaggccgaggcggcccgagccacgcgcgaggcgaaatacgagcggctggcccttgacctcttctccgagtgctacagcaacagtgaggcccgcgccttcgccctgctggtgcgccggaaccgctgctggagcaagaccacctgcctgcacctggccaccgaggctgacgccaaggccttctttgcccacgacggcgttcaggccttcctgaccaggatctggtggggggacatggccgcaggcacgcccatcctgcggctgctaggagccttcctctgccccgccctcgtctataccaacctcatcaccttcagtgaggaagctcccctgaggacaggcctggaggacctgcaggacctggacagcctggacacggagaagagcccgctgtatggcctgcagagccgggtggaggagctggtggaggcgccgagggctcagggtgaccgaggcccacgtgctgtcttcctgctcacacgctggcggaaattctggggcgctcccgtgactgtgttcctggggaacgtggtcatgtacttcgccttcctcttcctgttcacctacgtcctgctggtggacttcaggccgcccccccagggcccctcagggcccgaggtcaccctctacttctgggtctttacgctggtgctggaggaaatccggcagggcttcttcacagacgaggacacacacctggtgaagaagttcacactgtatgtgggggacaactggaacaagtgtgacatggtggccatcttcctgttcatcgtgggtgtcacctgcaggatgctgccgtcggcgtttgaggctggccgcacagtcctcgccatggacttcatggtgttcacgctgcggctgatccatatctttgccatacacaagcagctgggccccaagatcatcgtggtagagcgcatgatgaaggacgtcttcttcttcctcttctttctgagcgtgtggctcgtggcctacggtgtcaccacccaggcgctgctgcacccccatgacggccgcctggagtggatcttccgccgggtgctctaccggccctacctgcagatcttcggccagatcccactggacgagattgatgaagcccgtgtgaactgctccacccacccactgctgctggaggactcaccatcctgccccagcctctatgccaactggctggtcatcctcctgctggtcaccttcctgttggtcaccaatgtgctgctcatgaacctgctcatcgccatgttcagctacacgttccaggtggtgcagggcaacgcagacatgttctggaagttccagcgctacaacctgattgtggagtaccacgagcgccccgccctggccccgcccttcatcctgctcagccacctgagcctgacgctccgccgggtcttcaagaaggaggctgagcacaagcgggagcacctggagagagacctgccagaccccctggaccagaaggtcgtcacctgggagacagtccagaaggagaacttcctgagcaagatggagaagcggaggagggacagcgagggggaggtgctgcggaaaaccgcccacagcctgaccacctgctcctgccgcagagtggacttcattgccaagtacctcgggggtctgagagagcaagaaaagcgcatcaagtgtctggagtcacagatcaactactgctcggtgctcgtgtcctccgtggctgacgtgctggcccagggtggcggcccccggagctctcagcactgtggcgagggaagccagctggtggctgctgaccacagaggtggtttagatggctgggaacaacccggggctggccagcctccctcggacacctgagctgcttggcctgccacgtgtggggccacctctc

SEQ ID NO: 192804 - DNA, 3902 bp, Homo sapiens
  Payload ID: 18057
  Gene Name: transient receptor potential cation channel, subfamily M, member 5
  ENST ID: ENST00000533881
  CDS Start-End: 1-3480
cccggaagccccggggatgctgaagaccggcgggagctgggcttgcacaggggcgaggtcaactttggagggtctgggaagaagcgaggcaagtttgtacgggtgccgagcggagtggccccgtctgtgctctttgacctgctgcttgctgagtggcacctgccggcccccaacctggtggtgtccctggtgggtgaggagcagcctttcgccatgaagtcctggctgcgggatgtgctgcgcaaggggctggtgaaggcggctcagagcacaggagcctggatcctgaccagtgccctccgcgtgggcctggccaggcatgtcgggcaggccgtgcgcgaccactcgctggccagcacgtccaccaaggtccgtgtggttgctgtcggcatggcctcgctgggccgcgtcctgcaccgccgcattctggaggaggcccaggtgcacgaggattttcctgtccactaccctgaggatgacggcggcagccagggccccctctgttcactggacagcaacctctcccacttcatcctggtggagccaggccccccggggaagggcgatgggctgacggagctgcggctgaggctggagaagcacatctcggagcagagggcgggctacgggggcactggcagcatcgagatccctgtcctctgcttgctggtcaatggtgatcccaacaccttggagaggatctccagggccgtggagcaggctgccccgtggctgatcctggtaggctcggggggcatcgccgatgtgcttgctgccctagtgaaccagccccacctcctggtgcccaaggtggccgagaagcagtttaaggagaagttccccagcaagcatttctcttgggaggacatcgtgcgctggaccaagctgctgcagaacatcacctcacaccagcacctgctcaccgtgtatgacttcgagcaggagggctccgaggagctggacacggtcatcctgaaggcgctggtgaaagcctgcaagagccacagccaggagcctcaggactatctggatgagctcaagctggccgtggcctgggaccgcgtggacatcgccaagagtgagatcttcaatggggacgtggagtggaagtcctgtgacctggaggaggtgatggtggacgccctggtcagcaacaagcccgagtttgtgcgcctctttgtggacaacggcgcagacgtggccgacttcctgacgtatgggcggctgcaggagctctaccgctccgtgtcacgcaagagcctgctcttcgacctgctgcagcggaagcaggaggaggcccggctgacgctggccggcctgggcacccagcaggcccgggagccacccgcggggccaccggccttctccctgcacgaggtctcccgcgtactcaaggacttcctgcaggacgcctgccgaggcttctaccaggacggccggccaggggaccgcaggagggcggagaagggcccggccaagcggcccacgggccagaagtggctgctggacctgaaccagaagagcgagaacccctggcgggacctgttcctgtgggccgtgctgcagaaccgccacgagatggccacctacttctgggccatgggccaggaaggtgtggcagccgcactggccgcctgcaaaatcctcaaagagatgtcgcacctggagacggaggccgaggcggcccgagccacgcgcgaggcgaaatacgagcggctggcccttgacctcttctccgagtgctacagcaacagtgaggcccgcgccttcgccctgctggtgcgccggaaccgctgctggagcaagaccacctgcctgcacctggccaccgaggctgacgccaaggccttctttgcccacgacggcgttcaggccttcctgaccaggatctggtggggggacatggccgcaggcacgcccatcctgcggctgctaggagccttcctctgccccgccctcgtctataccaacctcatcaccttcagtgaggaagctcccctgaggacaggcctggaggacctgcaggacctggacagcctggacacggagaagagcccgctgtatggcctgcagagccgggtggaggagctggtggaggcgccgagggctcagggtgaccgaggcccacgtgctgtcttcctgctcacacgctggcggaaattctggggcgctcccgtgactgtgttcctggggaacgtggtcatgtacttcgccttcctcttcctgttcacctacgtcctgctggtggacttcaggccgcccccccagggcccctcagggcccgaggtcaccctctacttctgggtctttacgctggtgctggaggaaatccggcagggcttcttcacagacgaggacacacacctggtgaagaagttcacactgtatgtgggggacaactggaacaagtgtgacatggtggccatcttcctgttcatcgtgggtgtcacctgcaggatgctgccgtcggcgtttgaggctggccgcacagtcctcgccatggacttcatggtgttcacgctgcggctgatccatatctttgccatacacaagcagctgggccccaagatcatcgtggtagagcgcatgatgaaggacgtcttcttcttcctcttctttctgagcgtgtggctcgtggcctacggtgtcaccacccaggcgctgctgcacccccatgacggccgcctggagtggatcttccgccgggtgctctaccggccctacctgcagatcttcggccagatcccactggacgagattgatgaagcccgtgtgaactgctccacccacccactgctgctggaggactcaccatcctgccccagcctctatgccaactggctggtcatcctcctgctggtcaccttcctgttggtcaccaatgtgctgctcatgaacctgctcatcgccatgttcagctacacgttccaggtggtgcagggcaacgcagacatgttctggaagttccagcgctacaacctgattgtggagtaccacgagcgccccgccctggccccgcccttcatcctgctcagccacctgagcctgacgctccgccgggtcttcaagaaggaggctgagcacaagcgggagcacctggagagagacctgccagaccccctggaccagaaggtcgtcacctgggagacagtccagaaggagaacttcctgagcaagatggagaagcggaggagggacagcgagggggaggtgctgcggaaaaccgcccacagagtggacttcattgccaagtacctcgggggtctgagagagcaagaaaagcgcatcaagtgtctggagtcacagatcaactactgctcggtgctcgtgtcctccgtggctgacgtgctggcccagggtggcggcccccggagctctcagcactgtggcgagggaagccagctggtggctgctgaccacagaggtggtttagatggctgggaacaacccggggctggccagcctccctcggacacctgagctgcttggcctgccacgtgtggggccacctctcctcagctggccaccctgcacgttgtgcactgacctttgccgacctccagcggaaccccccagggggcaccagccccccagcagacaatggccctcctggtgcctcaccacagaccctcacccaaaggaaccgctccttgtccctcctggcctccccggaggcacagcagtgtcatggggctgtctcccctgacaggcacaactccccgggcagaaaacgtgccccaccgcatccctacctggaaactgaccagcctgcactgtggaaaagctggccctgtggcgtgacgggggagcacccccatccagactgcgaagctgctctggggtctgcacccacccctgccctgacttgtgttgcctgacaagagactcatctttttttgaaa

SEQ ID NO: 192805 - DNA, 3535 bp, Homo sapiens
  Payload ID: 18057
  Gene Name: transient receptor potential cation channel, subfamily M, member 5
  ENST ID: ENST00000528453
  CDS Start-End: 7-3507
gccaccatgcaggatgtccaaggcccccgtcccggaagccccggggatgctgaagaccggcgggagctgggcttgcacaggggcgaggtcaactttggagggtctgggaagaagcgaggcaagtttgtacgggtgccgagcggagtggccccgtctgtgctctttgacctgctgcttgctgagtggcacctgccggcccccaacctggtggtgtccctggtgggtgaggagcagcctttcgccatgaagtcctggctgcgggatgtgctgcgcaaggggctggtgaaggcggctcagagcacaggagcctggatcctgaccagtgccctccgcgtgggcctggccaggcatgtcgggcaggccgtgcgcgaccactcgctggccagcacgtccaccaaggtccgtgtggttgctgtcggcatggcctcgctgggccgcgtcctgcaccgccgcattctggaggaggcccaggaggattttcctgtccactaccctgaggatgacggcggcagccagggccccctctgttcactggacagcaacctctcccacttcatcctggtggagccaggccccccggggaagggcgatgggctgacggagctgcggctgaggctggagaagcacatctcggagcagagggcgggctacgggggcactggcagcatcgagatccctgtcctctgcttgctggtcaatggtgatcccaacaccttggagaggatctccagggccgtggagcaggctgccccgtggctgatcctggtaggctcggggggcatcgccgatgtgcttgctgccctagtgaaccagccccacctcctggtgcccaaggtggccgagaagcagtttaaggagaagttccccagcaagcatttctcttgggaggacatcgtgcgctggaccaagctgctgcagaacatcacctcacaccagcacctgctcaccgtgtatgacttcgagcaggagggctccgaggagctggacacggtcatcctgaaggcgctggtgaaagcctgcaagagccacagccaggagcctcaggactatctggatgagctcaagctggccgtggcctgggaccgcgtggacatcgccaagagtgagatcttcaatggggacgtggagtggaagtcctgtgacctggaggaggtgatggtggacgccctggtcagcaacaagcccgagtttgtgcgcctctttgtggacaacggcgcagacgtggccgacttcctgacgtatgggcggctgcaggagctctaccgctccgtgtcacgcaagagcctgctcttcgacctgctgcagcggaagcaggaggaggcccggctgacgctggccggcctgggcacccagcaggcccgggagccacccgcggggccaccggccttctccctgcacgaggtctcccgcgtactcaaggacttcctgcaggacgcctgccgaggcttctaccaggacggccggccaggggaccgcaggagggcggagaagggcccggccaagcggcccacgggccagaagtggctgctggacctgaaccagaagagcgagaacccctggcgggacctgttcctgtgggccgtgctgcagaaccgccacgagatggccacctacttctgggccatgggccaggaaggtgtggcagccgcactggccgcctgcaaaatcctcaaagagatgtcgcacctggagacggaggccgaggcggcccgagccacgcgcgaggcgaaatacgagcggctggcccttgacctcttctccgagtgctacagcaacagtgaggcccgcgccttcgccctgctggtgcgccggaaccgctgctggagcaagaccacctgcctgcacctggccaccgaggctgacgccaaggccttctttgcccacgacggcgttcaggccttcctgaccaggatctggtggggggacatggccgcaggcacgcccatcctgcggctgctaggagccttcctctgccccgccctcgtctataccaacctcatcaccttcagtgaggaagctcccctgaggacaggcctggaggacctgcaggacctggacagcctggacacggagaagagcccgctgtatggcctgcagagccgggtggaggagctggtggaggcgccgagggctcagggtgaccgaggcccacgtgctgtcttcctgctcacacgctggcggaaattctggggcgctcccgtgactgtgttcctggggaacgtggtcatgtacttcgccttcctcttcctgttcacctacgtcctgctggtggacttcaggccgcccccccagggcccctcagggcccgaggtcaccctctacttctgggtctttacgctggtgctggaggaaatccggcagggcttcttcacagacgaggacacacacctggtgaagaagttcacactgtatgtgggggacaactggaacaagtgtgacatggtggccatcttcctgttcatcgtgggtgtcacctgcaggatgctgccgtcggcgtttgaggctggccgcacagtcctcgccatggacttcatggtgttcacgctgcggctgatccatatctttgccatacacaagcagctgggccccaagatcatcgtggtagagcgcatgatgaaggacgtcttcttcttcctcttctttctgagcgtgtggctcgtggcctacggtgtcaccacccaggcgctgctgcacccccatgacggccgcctggagtggatcttccgccgggtgctctaccggccctacctgcagatcttcggccagatcccactggacgagattgatgaagcccgtgtgaactgctccacccacccactgctgctggaggactcaccatcctgccccagcctctatgccaactggctggtcatcctcctgctggtcaccttcctgttggtcaccaatgtgctgctcatgaacctgctcatcgccatgttcagctacacgttccaggtggtgcagggcaacgcagacatgttctggaagttccagcgctacaacctgattgtggagtaccacgagcgccccgccctggccccgcccttcatcctgctcagccacctgagcctgacgctccgccgggtcttcaagaaggaggctgagcacaagcgggagcacctggagagagacctgccagaccccctggaccagaaggtcgtcacctgggagacagtccagaaggagaacttcctgagcaagatggagaagcggaggagggacagcgagggggaggtgctgcggaaaaccgcccacagagtggacttcattgccaagtacctcgggggtctgagagagcaagaaaagcgcatcaagtgtctggagtcacagatcaactactgctcggtgctcgtgtcctccgtggctgacgtgctggcccagggtggcggcccccggacaggctctcagcactgtggcgagggaagccagctggtggctgctgaccacagaggtggtttagatggctgggaacaacccggggctggccagcctccctcggacacctgagctgcttggcctgccacgtgtggggcca

SEQ ID NO: 192806 - DNA, 1568 bp, Homo sapiens
  Payload ID: 18058
  Gene Name: transient receptor potential cation channel, subfamily M, member 6
  ENST ID: ENST00000359047
  CDS Start-End: 239-1150
actacaaaggatgtctgtgatgacagtggccatcccatttgatcctcgttattcttcttttatcgaaggaaactgagagtcaccttcttttctaggcagttaggtaactgaagccgaaaggtattgtgacagatccactgggctgtaaaaggcagcgtgtggaggtggagcccagagtttctgcctccacagttaaaagctcagacagggctttgggagcagggcctgcaaatcaaagatgaaagaacaacctgtcttggagcgcttgcagtcccagaaatcctggattaaaggagtatttgacaagagagaatgtagcacaatcatacccagctcaaaaaatcctcacagatgtactccagtatgccaagtctgccagaatttaatcaggtgttactgtggccgactgattggagaccatgctgggatagattattcctggaccatctcagctgccaagggtaaagaaagtgaacaatggtctgttgaaaagcacacaacgaaaagcccaacagatacttttggcacgattaatttccaagatggagagcacacccatcatgccaagtatattagaacttcttatgatacaaaactggatcatctgttacatttaatgttgaaagagtggaaaatggaactgcccaagcttgtgatctcagtccatgggggcatccagaactttactatgccctctaaatttaaagagattttcagccaaggtttggttaaagctgcagagacaacaggagcgtggataataactgaaggcatcaatacaggagtgtccaagcatgttggggatgccttgaaatcccattcctctcattccttgagaaaaatctggacagttggaatccctccttggggtgtcattgagaaccagagagaccttattggaaaagatgtggtgtgcctgtaccagactctggataaccccctcagcaagctcacaacactcaacagcatgcactcgcacttcatcctgtctgatgatgggaccgtgggcaagtatggaaatgaaatgaagctcagaaggaacctggagaagtacctctctctgcagaaaatacactgccgtgagtatcacaggggctcagtcacccagtctggttgcaggcctgctgaggtctttcatggtcttccctgaccatcagagctagcttgaggggactaggggtgtgagctttgatggtcagggaagatgacatttcatgtgttggtggggtggccctaggcagggaaggggttaagaccagacaggatttttagaaatagggaccttggggctgggtgtggtggctcacgcctgtaatcccagcactttgggaggctgaggcgggtggatcacctgaagtcaggagtcgagaccaacctggccaacatggtgaaaccctgtctctgctaaaaatacaaaaattagccaggtgtggtggtgcatgcctgtaatcccagctactcaggaggctgaggcaggagaatgacttgaacctggggtgtagaggttacagtgagctgagatcgccccactgcacttcagcccaggtgacagagcaagactctgtctc

SEQ ID NO: 192807 - DNA, 8425 bp, Homo sapiens
  Payload ID: 18058
  Gene Name: transient receptor potential cation channel, subfamily M, member 6
  Uniprot ID: Q9BX84
  ENST ID: ENST00000360774
  CDS Start-End: 239-6307
actacaaaggatgtctgtgatgacagtggccatcccatttgatcctcgttattcttcttttatcgaaggaaactgagagtcaccttcttttctaggcagttaggtaactgaagccgaaaggtattgtgacagatccactgggctgtaaaaggcagcgtgtggaggtggagcccagagtttctgcctccacagttaaaagctcagacagggctttgggagcagggcctgcaaatcaaagatgaaagaacaacctgtcttggagcgcttgcagtcccagaaatcctggattaaaggagtatttgacaagagagaatgtagcacaatcatacccagctcaaaaaatcctcacagatgtactccagtatgccaagtctgccagaatttaatcaggtgttactgtggccgactgattggagaccatgctgggatagattattcctggaccatctcagctgccaagggtaaagaaagtgaacaatggtctgttgaaaagcacacaacgaaaagcccaacagatacttttggcacgattaatttccaagatggagagcacacccatcatgccaagtatattagaacttcttatgatacaaaactggatcatctgttacatttaatgttgaaagagtggaaaatggaactgcccaagcttgtgatctcagtccatgggggcatccagaactttactatgccctctaaatttaaagagattttcagccaaggtttggttaaagctgcagagacaacaggagcgtggataataactgaaggcatcaatacaggagtgtccaagcatgttggggatgccttgaaatcccattcctctcattccttgagaaaaatctggacagttggaatccctccttggggtgtcattgagaaccagagagaccttattggaaaagatgtggtgtgcctgtaccagactctggataaccccctcagcaagctcacaacactcaacagcatgcactcgcacttcatcctgtctgatgatgggaccgtgggcaagtatggaaatgaaatgaagctcagaaggaacctggagaagtacctctctctgcagaaaatacactgccgctcaagacaaggcgtgccggtcgtggggctggtggtggaaggcggtcccaacgtcatcctgtcagtgtgggagactgtcaaggacaaggacccagtggtggtgtgtgagggcacaggtagggcggctgacctcctggccttcacacacaaacacctggcagatgaagggatgctgcgacctcaggtgaaagaggagatcatctgcatgattcagaacactttcaactttagtcttaaacagtccaagcaccttttccaaattctaatggagtgtatggttcacagggattgtattaccatatttgatgctgactctgaagagcagcaagacctggacttagcaatcctaacagctttgctgaagggcacaaatttatcagcgtcagagcaattaaatctggcaatggcttgggacagggtggacattgccaagaaacatatcctaatttatgaacaacactggaagcctgatgccctggaacaagcaatgtcagatgctttagtgatggatcgggtggattttgtgaagctcttaatagaatatggagtgaacctccatcgctttcttaccatccctcgactggaagagctctacaatacaaaacaaggacctactaatacactcttgcatcatctcgtccaagatgtgaaacagcatacccttctttcaggctaccgaataaccttgattgacattggattagtagtagaatacctcattggtagagcatatcgcagcaactacactagaaaacatttcagagccctctacaacaacctctacagaaaatacaagcaccagagacactcctcaggaaatagaaatgagtctgcagaaagtacgctgcactcccagttcattagaactgcacagccatacaaattcaaggaaaagtctatagtccttcataaatcaaggaagaagtcaaaagaacaaaatgtatcagatgaccctgagtctactggctttctttacccttacaatgacctgctggtttgggctgtgctgatgaaaaggcagaagatggctatgttcttctggcagcatggagaggaggccacggttaaagccgtgattgcgtgtatcctctaccgggcaatggcccatgaagctaaggagagtcacatggtggatgatgcctcagaagagttgaagaattactcaaaacagtttggccagctggctctggacttgttggagaaggcattcaagcagaatgagcgcatggccatgacgctgttgacgtatgaactcaggaactggagcaattcgacctgccttaaactggccgtgtcgggaggattacgaccctttgtttcacatacttgtacccagatgctactgacagacatgtggatggggaggctgaaaatgaggaaaaactcttggttaaagattattataagcattattttaccacccaccattttgacactggaatttaaaagcaaagctgagatgtcacatgttccccagtcccaggacttccaatttatgtggtattacagtgaccagaacgccagcagttccaaagaaagtgcttctgtgaaagagtatgatttggaaaggggccatgatgagaaactggatgaaaatcagcattttggtttggaaagtgggcaccaacaccttccgtggaccaggaaagtctatgagttctacagtgctccaattgtcaagttttggttttatacgatggcgtatttggcattcctcatgctgttcacttacaccgtgttggtggagatgcagccccagcccagcgtgcaggagtggcttgttagcatttacatcttcaccaatgctattgaggtggtcagggagatctgtatttcagaacctgggaagtttacccaaaaggtgaaggtatggattagtgagtactggaacttaacagaaactgtggccattggcctgttttcagctggcttcgtccttcgatggggtgaccctccttttcacacagcgggaagactgatctactgcatagacatcatattctggttctcacggctcctggacttctttgctgtgaatcaacatgcaggtccatatgtgaccatgattgcaaaaatgacagcaaacatgttctatattgtgatcatcatggccatagtcctgctgagctttggagtggcacgcaaggccatcctttcgccaaaagagccaccatcttggagtctagctcgagatattgtatttgagccatactggatgatatacggagaagtctatgctggagaaatagatgtttgttcaagccagccatcctgccctcctggttcttttcttactccattcttgcaagctgtctacctcttcgtgcaatatatcatcatggtgaacctgttgattgctttcttcaacaacgtttacttagatatggaatccatttcaaataacctgtggaaatacaaccgctatcgctacatcatgacctaccacgagaagccctggctgcccccacctctcatcctgctgagccacgtgggccttctcctccgccgcctgtgctgtcatcgagctcctcacgaccaagaagagggtgacgttggattaaaactctacctcagtaaggaggatctgaaaaaacttcatgattttgaggagcagtgcgtggaaaaatacttccatgagaagatggaagatgtgaattgtagttgtgaggaacgaatccgagtgacatcagaaagggttacagagatgtacttccagctgaaagaaatgaatgaaaaggtgtcttttataaaggactccttactgtctttggacagccaggtgggacacctgcaggatctctctgccctgactgtggataccctgaaagtcctttctgctgttgacactttgcaagaggatgaggctctcctggccaagagaaagcattctacttgcaaaaaacttccccacagctggagcaatgtcatctgtgcagaggttctaggcagcatggagatcgctggagagaagaaataccagtattatagcatgccctcttctttgctgaggagcctggctggaggccggcatcccccaagagtgcagaggggggcacttcttgagattacaaacagtaaaagagaggctacaaatgtaagaaatgaccaggaaaggcaagaaacacaaagtagtatagtggtttctggggtgtctcctaacaggcaagcacactcaaagtatggccagtttcttctggtcccctctaatctaaagcgagttcctttttcagcagaaactgtcttgcctctgtccagaccctctgtgccagatgtgctggcaactgaacaggacatccagactgaggttcttgttcatctgactgggcagaccccagttgtctctgactgggcatcagtggatgaacccaaggaaaagcacgagcctattgctcacttactggatggacaagacaaggcagagcaagtgctacccactttgagttgcacacctgaacccatgacaatgagctcccctctttcccaagccaagatcatgcaaactggaggtggatatgtaaactgggcattttcagaaggtgatgaaactggtgtgtttagcatcaagaaaaagtggcaaacctgcttgccctccacttgtgacagtgattcctctcggagtgaacagcaccagaagcaggcccaggacagctccctatctgataactcaacaagatcggcccagagtagtgaatgctcagaggtgggaccatggcttcagccaaacacatccttttggatcaatcctctccgcagatacaggcccttcgctaggagtcatagttttagattccataaggaggagaaattgatgaagatctgtaagattaaaaatctttcaggctcttcagaaatagggcagggagcatgggtcaaagcgaaaatgctaaccaaagacaggagactgtcaaagaaaaagaagaatactcaaggactccaggtgccaatcataacagtcaatgcctgctctcagagtgaccagttgaatccagagccaggagaaaacagcatctctgaagaggagtacagcaagaactggttcacagtgtccaaatttagtcacacaggtgtagaaccttacatacatcagaaaatgaaaactaaagaaattggacaatgtgctatacaaatcagtgattacctaaagcagtctcaagaggatctcagcaaaaactctttgtggaattccaggagcaccaacctcaataggaactccctgctgaaaagttcaattggagttgacaagatctcagcctccttaaaaagccctcaagagcctcaccatcattattcagccattgaaaggaataatttaatgaggctttctcagaccataccatttacaccagtccaactgtttgcaggagaagaaataactgtctacaggttggaggagagttcccctttaaaccttgataaaagcatgtcctcttggtctcagcgtgggagagcggcaatgatccaggtattgtcccgagaggagatggatgggggcctccgtaaagctatgagagtcgtcagcacttggtctgaggatgacattctcaagccgggacaagttttcattgtcaagtcctttcttcctgaggttgtgcggacatggcataaaatcttccaggagagcactgtgcttcatctttgcctcagggaaattcaacaacaaagagctgctcaaaaattgatctataccttcaaccaagtgaaaccacaaaccataccctacacaccaaggttcctggaagttttcttaatctactgccattcagccaaccagtggttgaccattgagaagtatatgacaggggagttccggaagtataacaacaacaatggtgatgaaatcacccccaccaacaccctggaggagctgatgttggctttctctcactggacctatgagtacactcggggagagctgctggttttagatttgcaaggtgttggagaaaatttgacagatccatctgttataaaacctgaagtcaaacaatcaagaggaatggtgtttggaccggccaatttgggggaagatgcaattagaaacttcattgcaaaacatcattgtaactcctgctgccggaagctcaaactcccggatttaaaaagaaatgactattcccctgaaaggataaattccacctttggacttgagataaaaatagaatcagctgaggagcctccagcaagggagacgggtagaaattccccagaagatgatatgcaactataaaaagggaggagcaagaagatcccagtgcttgccctgcctgccaggaactctgtgataacatagattgatcaacgtgatgttgattacatcagcgtctccttgggacacgccttctgagcctcacatctccttctgttcaaaggcctcattggtatatgatcaatgggttctcctagacactgacctctgtccagggcactttgcagctccatcctcaagttccacacgaagatgcttggatgagtcagctgggaatattgttcttgtgtacctcattgctttagctggtcacttggaactttggagcagaatcctgcacattaaaggatggggttgggggggatacatttattttattttctcactatgtatgcagactggaccccctactactatttgtcacctcacccacagattgtatttatgtctatatatatgttcataaaaagttatgtgatttcctcctctgtcttttccacaacataggactttgaatagcaatgataggaaaaacaatggaacaagggtgggtttgcacagattggagcacattcctgcacaaactaccaagtatactggtgaaatctcgatgggtttcagatattgtcagtgaatcatatgatgcctggatatttcaggtttctgtaaaagaaagggaaacctaaaacaaatacccttccatatataatatatatggaatatgtatattatatatatttttatatatataatatatatggaatatatatattatatatataaaatacatatggaatatatatattttatatatatatatatatatttttatttttgagatggagtttcactctttttacccaggctggagtgcaatgatgcgatctcactgcaacctctgcctcccgggcttgagcgattcttgtgtctcagtcttccgggtagctgggactacaggtgtgcaccactatgcctggctaattttgtatttttagtagagatggggtttcaccatgttggccaggctggtctcaaactcctgacctcagatgatccacctgccttggcttcccaaagtgctgggattacaggcgtgagccactgcgcctggcctttttttttttttttttaaacgagaacaagaatatgaagaactggaaatcattaagaaagggtttcccttccttaaagctcaggggtactattagttaggagttgactaactcaacctgtaaaacaccactcctccttccaaagttgtatatataatattgcaggttaaattactttatgtcaggtcctatgaagaaagatacggtttcagactgaaaacatgtttcacaggtgtttgcttccttccagagcagagttccctattcccctggcataaagaatgtatatatattttgaaatatggctgagaacatgtcattggtttgtgaggcctaaggtgaagcactcctggcagccacactgtgtagtgtatttgagggatcagtcatccctcttgtatgctgggcctggttgccctacctcgaacaagcaccagcttttcacacaaggagagatgtggggctgggagtcctctccccatcctattgcatctcctttcttattataagctgttccagttcacaggcagcaaacctcctgggtttgaaaaattccaacttatttttatctttaatcctgacattagctgacttgctagtgagcttgctttaaaaatctacactcttgcattcttaggcatacaggggaaatgttgaaaaggaaggtggaaaaccaagaatttagtttgccaatgattgcctctgattcttgtaagtttgagttccacaagggctaatttattccccttttacttgggttttggggtggtggaaagcgggaaatttgggtgatttgttgattggcaatgaggataaaatgttaatacttttttggggacttaacaactttatcctattctacaagtcagtaaaggaacaattggtactcacctcagtgctgcactcaactatggaaagaggcagagtttgcttgcccaattgccaaactaaagacatcagttcattggtcaaatatttgttacctggaatggaacttgaaagcaaatacatttggatttcaaatttc

SEQ ID NO: 192808 - DNA, 8271 bp, Homo sapiens
  Payload ID: 18058
  Gene Name: transient receptor potential cation channel, subfamily M, member 6
  Uniprot ID: Q9BX84
  ENST ID: ENST00000361255
  CDS Start-End: 100-6153
gctttccgaggcggctggagaagtgcccagacggccgtccctccgcgcccctgcgcgtccccgtgcgcccagtgttccccgtgcaggagtcccggagcgatgacagcgccggttacgtcccagaaatcctggattaaaggagtatttgacaagagagaatgtagcacaatcatacccagctcaaaaaatcctcacagatgtactccagtatgccaagtctgccagaatttaatcaggtgttactgtggccgactgattggagaccatgctgggatagattattcctggaccatctcagctgccaagggtaaagaaagtgaacaatggtctgttgaaaagcacacaacgaaaagcccaacagatacttttggcacgattaatttccaagatggagagcacacccatcatgccaagtatattagaacttcttatgatacaaaactggatcatctgttacatttaatgttgaaagagtggaaaatggaactgcccaagcttgtgatctcagtccatgggggcatccagaactttactatgccctctaaatttaaagagattttcagccaaggtttggttaaagctgcagagacaacaggagcgtggataataactgaaggcatcaatacaggagtgtccaagcatgttggggatgccttgaaatcccattcctctcattccttgagaaaaatctggacagttggaatccctccttggggtgtcattgagaaccagagagaccttattggaaaagatgtggtgtgcctgtaccagactctggataaccccctcagcaagctcacaacactcaacagcatgcactcgcacttcatcctgtctgatgatgggaccgtgggcaagtatggaaatgaaatgaagctcagaaggaacctggagaagtacctctctctgcagaaaatacactgccgctcaagacaaggcgtgccggtcgtggggctggtggtggaaggcggtcccaacgtcatcctgtcagtgtgggagactgtcaaggacaaggacccagtggtggtgtgtgagggcacaggtagggcggctgacctcctggccttcacacacaaacacctggcagatgaagggatgctgcgacctcaggtgaaagaggagatcatctgcatgattcagaacactttcaactttagtcttaaacagtccaagcaccttttccaaattctaatggagtgtatggttcacagggattgtattaccatatttgatgctgactctgaagagcagcaagacctggacttagcaatcctaacagctttgctgaagggcacaaatttatcagcgtcagagcaattaaatctggcaatggcttgggacagggtggacattgccaagaaacatatcctaatttatgaacaacactggaagcctgatgccctggaacaagcaatgtcagatgctttagtgatggatcgggtggattttgtgaagctcttaatagaatatggagtgaacctccatcgctttcttaccatccctcgactggaagagctctacaatacaaaacaaggacctactaatacactcttgcatcatctcgtccaagatgtgaaacagcatacccttctttcaggctaccgaataaccttgattgacattggattagtagtagaatacctcattggtagagcatatcgcagcaactacactagaaaacatttcagagccctctacaacaacctctacagaaaatacaagcaccagagacactcctcaggaaatagaaatgagtctgcagaaagtacgctgcactcccagttcattagaactgcacagccatacaaattcaaggaaaagtctatagtccttcataaatcaaggaagaagtcaaaagaacaaaatgtatcagatgaccctgagtctactggctttctttacccttacaatgacctgctggtttgggctgtgctgatgaaaaggcagaagatggctatgttcttctggcagcatggagaggaggccacggttaaagccgtgattgcgtgtatcctctaccgggcaatggcccatgaagctaaggagagtcacatggtggatgatgcctcagaagagttgaagaattactcaaaacagtttggccagctggctctggacttgttggagaaggcattcaagcagaatgagcgcatggccatgacgctgttgacgtatgaactcaggaactggagcaattcgacctgccttaaactggccgtgtcgggaggattacgaccctttgtttcacatacttgtacccagatgctactgacagacatgtggatggggaggctgaaaatgaggaaaaactcttggttaaagattattataagcattattttaccacccaccattttgacactggaatttaaaagcaaagctgagatgtcacatgttccccagtcccaggacttccaatttatgtggtattacagtgaccagaacgccagcagttccaaagaaagtgcttctgtgaaagagtatgatttggaaaggggccatgatgagaaactggatgaaaatcagcattttggtttggaaagtgggcaccaacaccttccgtggaccaggaaagtctatgagttctacagtgctccaattgtcaagttttggttttatacgatggcgtatttggcattcctcatgctgttcacttacaccgtgttggtggagatgcagccccagcccagcgtgcaggagtggcttgttagcatttacatcttcaccaatgctattgaggtggtcagggagatctgtatttcagaacctgggaagtttacccaaaaggtgaaggtatggattagtgagtactggaacttaacagaaactgtggccattggcctgttttcagctggcttcgtccttcgatggggtgaccctccttttcacacagcgggaagactgatctactgcatagacatcatattctggttctcacggctcctggacttctttgctgtgaatcaacatgcaggtccatatgtgaccatgattgcaaaaatgacagcaaacatgttctatattgtgatcatcatggccatagtcctgctgagctttggagtggcacgcaaggccatcctttcgccaaaagagccaccatcttggagtctagctcgagatattgtatttgagccatactggatgatatacggagaagtctatgctggagaaatagatgtttgttcaagccagccatcctgccctcctggttcttttcttactccattcttgcaagctgtctacctcttcgtgcaatatatcatcatggtgaacctgttgattgctttcttcaacaacgtttacttagatatggaatccatttcaaataacctgtggaaatacaaccgctatcgctacatcatgacctaccacgagaagccctggctgcccccacctctcatcctgctgagccacgtgggccttctcctccgccgcctgtgctgtcatcgagctcctcacgaccaagaagagggtgacgttggattaaaactctacctcagtaaggaggatctgaaaaaacttcatgattttgaggagcagtgcgtggaaaaatacttccatgagaagatggaagatgtgaattgtagttgtgaggaacgaatccgagtgacatcagaaagggttacagagatgtacttccagctgaaagaaatgaatgaaaaggtgtcttttataaaggactccttactgtctttggacagccaggtgggacacctgcaggatctctctgccctgactgtggataccctgaaagtcctttctgctgttgacactttgcaagaggatgaggctctcctggccaagagaaagcattctacttgcaaaaaacttccccacagctggagcaatgtcatctgtgcagaggttctaggcagcatggagatcgctggagagaagaaataccagtattatagcatgccctcttctttgctgaggagcctggctggaggccggcatcccccaagagtgcagaggggggcacttcttgagattacaaacagtaaaagagaggctacaaatgtaagaaatgaccaggaaaggcaagaaacacaaagtagtatagtggtttctggggtgtctcctaacaggcaagcacactcaaagtatggccagtttcttctggtcccctctaatctaaagcgagttcctttttcagcagaaactgtcttgcctctgtccagaccctctgtgccagatgtgctggcaactgaacaggacatccagactgaggttcttgttcatctgactgggcagaccccagttgtctctgactgggcatcagtggatgaacccaaggaaaagcacgagcctattgctcacttactggatggacaagacaaggcagagcaagtgctacccactttgagttgcacacctgaacccatgacaatgagctcccctctttcccaagccaagatcatgcaaactggaggtggatatgtaaactgggcattttcagaaggtgatgaaactggtgtgtttagcatcaagaaaaagtggcaaacctgcttgccctccacttgtgacagtgattcctctcggagtgaacagcaccagaagcaggcccaggacagctccctatctgataactcaacaagatcggcccagagtagtgaatgctcagaggtgggaccatggcttcagccaaacacatccttttggatcaatcctctccgcagatacaggcccttcgctaggagtcatagttttagattccataaggaggagaaattgatgaagatctgtaagattaaaaatctttcaggctcttcagaaatagggcagggagcatgggtcaaagcgaaaatgctaaccaaagacaggagactgtcaaagaaaaagaagaatactcaaggactccaggtgccaatcataacagtcaatgcctgctctcagagtgaccagttgaatccagagccaggagaaaacagcatctctgaagaggagtacagcaagaactggttcacagtgtccaaatttagtcacacaggtgtagaaccttacatacatcagaaaatgaaaactaaagaaattggacaatgtgctatacaaatcagtgattacctaaagcagtctcaagaggatctcagcaaaaactctttgtggaattccaggagcaccaacctcaataggaactccctgctgaaaagttcaattggagttgacaagatctcagcctccttaaaaagccctcaagagcctcaccatcattattcagccattgaaaggaataatttaatgaggctttctcagaccataccatttacaccagtccaactgtttgcaggagaagaaataactgtctacaggttggaggagagttcccctttaaaccttgataaaagcatgtcctcttggtctcagcgtgggagagcggcaatgatccaggtattgtcccgagaggagatggatgggggcctccgtaaagctatgagagtcgtcagcacttggtctgaggatgacattctcaagccgggacaagttttcattgtcaagtcctttcttcctgaggttgtgcggacatggcataaaatcttccaggagagcactgtgcttcatctttgcctcagggaaattcaacaacaaagagctgctcaaaaattgatctataccttcaaccaagtgaaaccacaaaccataccctacacaccaaggttcctggaagttttcttaatctactgccattcagccaaccagtggttgaccattgagaagtatatgacaggggagttccggaagtataacaacaacaatggtgatgaaatcacccccaccaacaccctggaggagctgatgttggctttctctcactggacctatgagtacactcggggagagctgctggttttagatttgcaaggtgttggagaaaatttgacagatccatctgttataaaacctgaagtcaaacaatcaagaggaatggtgtttggaccggccaatttgggggaagatgcaattagaaacttcattgcaaaacatcattgtaactcctgctgccggaagctcaaactcccggatttaaaaagaaatgactattcccctgaaaggataaattccacctttggacttgagataaaaatagaatcagctgaggagcctccagcaagggagacgggtagaaattccccagaagatgatatgcaactataaaaagggaggagcaagaagatcccagtgcttgccctgcctgccaggaactctgtgataacatagattgatcaacgtgatgttgattacatcagcgtctccttgggacacgccttctgagcctcacatctccttctgttcaaaggcctcattggtatatgatcaatgggttctcctagacactgacctctgtccagggcactttgcagctccatcctcaagttccacacgaagatgcttggatgagtcagctgggaatattgttcttgtgtacctcattgctttagctggtcacttggaactttggagcagaatcctgcacattaaaggatggggttgggggggatacatttattttattttctcactatgtatgcagactggaccccctactactatttgtcacctcacccacagattgtatttatgtctatatatatgttcataaaaagttatgtgatttcctcctctgtcttttccacaacataggactttgaatagcaatgataggaaaaacaatggaacaagggtgggtttgcacagattggagcacattcctgcacaaactaccaagtatactggtgaaatctcgatgggtttcagatattgtcagtgaatcatatgatgcctggatatttcaggtttctgtaaaagaaagggaaacctaaaacaaatacccttccatatataatatatatggaatatgtatattatatatatttttatatatataatatatatggaatatatatattatatatataaaatacatatggaatatatatattttatatatatatatatatatttttatttttgagatggagtttcactctttttacccaggctggagtgcaatgatgcgatctcactgcaacctctgcctcccgggcttgagcgattcttgtgtctcagtcttccgggtagctgggactacaggtgtgcaccactatgcctggctaattttgtatttttagtagagatggggtttcaccatgttggccaggctggtctcaaactcctgacctcagatgatccacctgccttggcttcccaaagtgctgggattacaggcgtgagccactgcgcctggcctttttttttttttttttaaacgagaacaagaatatgaagaactggaaatcattaagaaagggtttcccttccttaaagctcaggggtactattagttaggagttgactaactcaacctgtaaaacaccactcctccttccaaagttgtatatataatattgcaggttaaattactttatgtcaggtcctatgaagaaagatacggtttcagactgaaaacatgtttcacaggtgtttgcttccttccagagcagagttccctattcccctggcataaagaatgtatatatattttgaaatatggctgagaacatgtcattggtttgtgaggcctaaggtgaagcactcctggcagccacactgtgtagtgtatttgagggatcagtcatccctcttgtatgctgggcctggttgccctacctcgaacaagcaccagcttttcacacaaggagagatgtggggctgggagtcctctccccatcctattgcatctcctttcttattataagctgttccagttcacaggcagcaaacctcctgggtttgaaaaattccaacttatttttatctttaatcctgacattagctgacttgctagtgagcttgctttaaaaatctacactcttgcattcttaggcatacaggggaaatgttgaaaaggaaggtggaaaaccaagaatttagtttgccaatgattgcctctgattcttgtaagtttgagttccacaagggctaatttattccccttttacttgggttttggggtggtggaaagcgggaaatttgggtgatttgttgattggcaatgaggataaaatgttaatacttttttggggacttaacaactttatcctattctacaagtcagtaaaggaacaattggtactcacctcagtgctgcactcaactatggaaagaggcagagtttgcttgcccaattgccaaactaaagacatcagttcattggtcaaatatttgttacctggaatggaacttgaaagcaaatacatttggatttcaaatttc

SEQ ID NO: 192809 - DNA, 8244 bp, Homo sapiens
  Payload ID: 18058
  Gene Name: transient receptor potential cation channel, subfamily M, member 6
  Uniprot ID: Q9BX84
  ENST ID: ENST00000449912
  CDS Start-End: 73-6126
atctaacgaggatctagaatagctaggatttatgaaataccggctttcaagttctctggtctccacccaaagatgattatcctatctaagtcccagaaatcctggattaaaggagtatttgacaagagagaatgtagcacaatcatacccagctcaaaaaatcctcacagatgtactccagtatgccaagtctgccagaatttaatcaggtgttactgtggccgactgattggagaccatgctgggatagattattcctggaccatctcagctgccaagggtaaagaaagtgaacaatggtctgttgaaaagcacacaacgaaaagcccaacagatacttttggcacgattaatttccaagatggagagcacacccatcatgccaagtatattagaacttcttatgatacaaaactggatcatctgttacatttaatgttgaaagagtggaaaatggaactgcccaagcttgtgatctcagtccatgggggcatccagaactttactatgccctctaaatttaaagagattttcagccaaggtttggttaaagctgcagagacaacaggagcgtggataataactgaaggcatcaatacaggagtgtccaagcatgttggggatgccttgaaatcccattcctctcattccttgagaaaaatctggacagttggaatccctccttggggtgtcattgagaaccagagagaccttattggaaaagatgtggtgtgcctgtaccagactctggataaccccctcagcaagctcacaacactcaacagcatgcactcgcacttcatcctgtctgatgatgggaccgtgggcaagtatggaaatgaaatgaagctcagaaggaacctggagaagtacctctctctgcagaaaatacactgccgctcaagacaaggcgtgccggtcgtggggctggtggtggaaggcggtcccaacgtcatcctgtcagtgtgggagactgtcaaggacaaggacccagtggtggtgtgtgagggcacaggtagggcggctgacctcctggccttcacacacaaacacctggcagatgaagggatgctgcgacctcaggtgaaagaggagatcatctgcatgattcagaacactttcaactttagtcttaaacagtccaagcaccttttccaaattctaatggagtgtatggttcacagggattgtattaccatatttgatgctgactctgaagagcagcaagacctggacttagcaatcctaacagctttgctgaagggcacaaatttatcagcgtcagagcaattaaatctggcaatggcttgggacagggtggacattgccaagaaacatatcctaatttatgaacaacactggaagcctgatgccctggaacaagcaatgtcagatgctttagtgatggatcgggtggattttgtgaagctcttaatagaatatggagtgaacctccatcgctttcttaccatccctcgactggaagagctctacaatacaaaacaaggacctactaatacactcttgcatcatctcgtccaagatgtgaaacagcatacccttctttcaggctaccgaataaccttgattgacattggattagtagtagaatacctcattggtagagcatatcgcagcaactacactagaaaacatttcagagccctctacaacaacctctacagaaaatacaagcaccagagacactcctcaggaaatagaaatgagtctgcagaaagtacgctgcactcccagttcattagaactgcacagccatacaaattcaaggaaaagtctatagtccttcataaatcaaggaagaagtcaaaagaacaaaatgtatcagatgaccctgagtctactggctttctttacccttacaatgacctgctggtttgggctgtgctgatgaaaaggcagaagatggctatgttcttctggcagcatggagaggaggccacggttaaagccgtgattgcgtgtatcctctaccgggcaatggcccatgaagctaaggagagtcacatggtggatgatgcctcagaagagttgaagaattactcaaaacagtttggccagctggctctggacttgttggagaaggcattcaagcagaatgagcgcatggccatgacgctgttgacgtatgaactcaggaactggagcaattcgacctgccttaaactggccgtgtcgggaggattacgaccctttgtttcacatacttgtacccagatgctactgacagacatgtggatggggaggctgaaaatgaggaaaaactcttggttaaagattattataagcattattttaccacccaccattttgacactggaatttaaaagcaaagctgagatgtcacatgttccccagtcccaggacttccaatttatgtggtattacagtgaccagaacgccagcagttccaaagaaagtgcttctgtgaaagagtatgatttggaaaggggccatgatgagaaactggatgaaaatcagcattttggtttggaaagtgggcaccaacaccttccgtggaccaggaaagtctatgagttctacagtgctccaattgtcaagttttggttttatacgatggcgtatttggcattcctcatgctgttcacttacaccgtgttggtggagatgcagccccagcccagcgtgcaggagtggcttgttagcatttacatcttcaccaatgctattgaggtggtcagggagatctgtatttcagaacctgggaagtttacccaaaaggtgaaggtatggattagtgagtactggaacttaacagaaactgtggccattggcctgttttcagctggcttcgtccttcgatggggtgaccctccttttcacacagcgggaagactgatctactgcatagacatcatattctggttctcacggctcctggacttctttgctgtgaatcaacatgcaggtccatatgtgaccatgattgcaaaaatgacagcaaacatgttctatattgtgatcatcatggccatagtcctgctgagctttggagtggcacgcaaggccatcctttcgccaaaagagccaccatcttggagtctagctcgagatattgtatttgagccatactggatgatatacggagaagtctatgctggagaaatagatgtttgttcaagccagccatcctgccctcctggttcttttcttactccattcttgcaagctgtctacctcttcgtgcaatatatcatcatggtgaacctgttgattgctttcttcaacaacgtttacttagatatggaatccatttcaaataacctgtggaaatacaaccgctatcgctacatcatgacctaccacgagaagccctggctgcccccacctctcatcctgctgagccacgtgggccttctcctccgccgcctgtgctgtcatcgagctcctcacgaccaagaagagggtgacgttggattaaaactctacctcagtaaggaggatctgaaaaaacttcatgattttgaggagcagtgcgtggaaaaatacttccatgagaagatggaagatgtgaattgtagttgtgaggaacgaatccgagtgacatcagaaagggttacagagatgtacttccagctgaaagaaatgaatgaaaaggtgtcttttataaaggactccttactgtctttggacagccaggtgggacacctgcaggatctctctgccctgactgtggataccctgaaagtcctttctgctgttgacactttgcaagaggatgaggctctcctggccaagagaaagcattctacttgcaaaaaacttccccacagctggagcaatgtcatctgtgcagaggttctaggcagcatggagatcgctggagagaagaaataccagtattatagcatgccctcttctttgctgaggagcctggctggaggccggcatcccccaagagtgcagaggggggcacttcttgagattacaaacagtaaaagagaggctacaaatgtaagaaatgaccaggaaaggcaagaaacacaaagtagtatagtggtttctggggtgtctcctaacaggcaagcacactcaaagtatggccagtttcttctggtcccctctaatctaaagcgagttcctttttcagcagaaactgtcttgcctctgtccagaccctctgtgccagatgtgctggcaactgaacaggacatccagactgaggttcttgttcatctgactgggcagaccccagttgtctctgactgggcatcagtggatgaacccaaggaaaagcacgagcctattgctcacttactggatggacaagacaaggcagagcaagtgctacccactttgagttgcacacctgaacccatgacaatgagctcccctctttcccaagccaagatcatgcaaactggaggtggatatgtaaactgggcattttcagaaggtgatgaaactggtgtgtttagcatcaagaaaaagtggcaaacctgcttgccctccacttgtgacagtgattcctctcggagtgaacagcaccagaagcaggcccaggacagctccctatctgataactcaacaagatcggcccagagtagtgaatgctcagaggtgggaccatggcttcagccaaacacatccttttggatcaatcctctccgcagatacaggcccttcgctaggagtcatagttttagattccataaggaggagaaattgatgaagatctgtaagattaaaaatctttcaggctcttcagaaatagggcagggagcatgggtcaaagcgaaaatgctaaccaaagacaggagactgtcaaagaaaaagaagaatactcaaggactccaggtgccaatcataacagtcaatgcctgctctcagagtgaccagttgaatccagagccaggagaaaacagcatctctgaagaggagtacagcaagaactggttcacagtgtccaaatttagtcacacaggtgtagaaccttacatacatcagaaaatgaaaactaaagaaattggacaatgtgctatacaaatcagtgattacctaaagcagtctcaagaggatctcagcaaaaactctttgtggaattccaggagcaccaacctcaataggaactccctgctgaaaagttcaattggagttgacaagatctcagcctccttaaaaagccctcaagagcctcaccatcattattcagccattgaaaggaataatttaatgaggctttctcagaccataccatttacaccagtccaactgtttgcaggagaagaaataactgtctacaggttggaggagagttcccctttaaaccttgataaaagcatgtcctcttggtctcagcgtgggagagcggcaatgatccaggtattgtcccgagaggagatggatgggggcctccgtaaagctatgagagtcgtcagcacttggtctgaggatgacattctcaagccgggacaagttttcattgtcaagtcctttcttcctgaggttgtgcggacatggcataaaatcttccaggagagcactgtgcttcatctttgcctcagggaaattcaacaacaaagagctgctcaaaaattgatctataccttcaaccaagtgaaaccacaaaccataccctacacaccaaggttcctggaagttttcttaatctactgccattcagccaaccagtggttgaccattgagaagtatatgacaggggagttccggaagtataacaacaacaatggtgatgaaatcacccccaccaacaccctggaggagctgatgttggctttctctcactggacctatgagtacactcggggagagctgctggttttagatttgcaaggtgttggagaaaatttgacagatccatctgttataaaacctgaagtcaaacaatcaagaggaatggtgtttggaccggccaatttgggggaagatgcaattagaaacttcattgcaaaacatcattgtaactcctgctgccggaagctcaaactcccggatttaaaaagaaatgactattcccctgaaaggataaattccacctttggacttgagataaaaatagaatcagctgaggagcctccagcaagggagacgggtagaaattccccagaagatgatatgcaactataaaaagggaggagcaagaagatcccagtgcttgccctgcctgccaggaactctgtgataacatagattgatcaacgtgatgttgattacatcagcgtctccttgggacacgccttctgagcctcacatctccttctgttcaaaggcctcattggtatatgatcaatgggttctcctagacactgacctctgtccagggcactttgcagctccatcctcaagttccacacgaagatgcttggatgagtcagctgggaatattgttcttgtgtacctcattgctttagctggtcacttggaactttggagcagaatcctgcacattaaaggatggggttgggggggatacatttattttattttctcactatgtatgcagactggaccccctactactatttgtcacctcacccacagattgtatttatgtctatatatatgttcataaaaagttatgtgatttcctcctctgtcttttccacaacataggactttgaatagcaatgataggaaaaacaatggaacaagggtgggtttgcacagattggagcacattcctgcacaaactaccaagtatactggtgaaatctcgatgggtttcagatattgtcagtgaatcatatgatgcctggatatttcaggtttctgtaaaagaaagggaaacctaaaacaaatacccttccatatataatatatatggaatatgtatattatatatatttttatatatataatatatatggaatatatatattatatatataaaatacatatggaatatatatattttatatatatatatatatatttttatttttgagatggagtttcactctttttacccaggctggagtgcaatgatgcgatctcactgcaacctctgcctcccgggcttgagcgattcttgtgtctcagtcttccgggtagctgggactacaggtgtgcaccactatgcctggctaattttgtatttttagtagagatggggtttcaccatgttggccaggctggtctcaaactcctgacctcagatgatccacctgccttggcttcccaaagtgctgggattacaggcgtgagccactgcgcctggcctttttttttttttttttaaacgagaacaagaatatgaagaactggaaatcattaagaaagggtttcccttccttaaagctcaggggtactattagttaggagttgactaactcaacctgtaaaacaccactcctccttccaaagttgtatatataatattgcaggttaaattactttatgtcaggtcctatgaagaaagatacggtttcagactgaaaacatgtttcacaggtgtttgcttccttccagagcagagttccctattcccctggcataaagaatgtatatatattttgaaatatggctgagaacatgtcattggtttgtgaggcctaaggtgaagcactcctggcagccacactgtgtagtgtatttgagggatcagtcatccctcttgtatgctgggcctggttgccctacctcgaacaagcaccagcttttcacacaaggagagatgtggggctgggagtcctctccccatcctattgcatctcctttcttattataagctgttccagttcacaggcagcaaacctcctgggtttgaaaaattccaacttatttttatctttaatcctgacattagctgacttgctagtgagcttgctttaaaaatctacactcttgcattcttaggcatacaggggaaatgttgaaaaggaaggtggaaaaccaagaatttagtttgccaatgattgcctctgattcttgtaagtttgagttccacaagggctaatttattccccttttacttgggttttggggtggtggaaagcgggaaatttgggtgatttgttgattggcaatgaggataaaatgttaatacttttttggggacttaacaactttatcctattctacaagtcagtaaaggaacaattggtactcacctcagtgctgcactcaactatggaaagaggcagagtttgcttgcccaattgccaaactaaagacatcagttcattggtcaaatatttgttacctggaatggaacttgaaagcaaatacatttggatttcaaatttc

SEQ ID NO: 192810 - DNA, 10400 bp, Homo sapiens
  Payload ID: 18059
  Gene Name: transient receptor potential cation channel, subfamily M, member 7
  Uniprot ID: Q96QT4
  ENST ID: ENST00000313478
  CDS Start-End: 283-5880
gcgccgctcacgtggtccgtccccagccccgtcgccggcggaggcgggcgcgggcgcgtccctgtggccagtcacccggaggagttggtcgcacaattatgaaagactcggcttctgctgctagcgccggagctgagttagttctgagaaggtttccctgggcgttccttgtccggcggcctctgctgccgcctccggagacgcttcccgatagatggctacaggccgcggaggaggaggaggtggagttgctgcccttccggagtccgccccgtgaggagaatgtcccagaaatcctggatagaaagcactttgaccaagagggaatgtgtatatattataccaagttccaaggaccctcacagatgccttccaggatgtcaaatttgtcagcaactcgtcaggtgtttttgtggtcgcttggtcaagcaacatgcttgttttactgcaagtcttgccatgaaatactcagatgtgaaattgggtgaccattttaatcaggcaatagaagaatggtctgtggaaaagcatacagaacagagcccaacggatgcttatggagtcataaattttcaagggggttctcattcctacagagctaagtatgtgaggctatcatatgacaccaaacctgaagtcattctgcaacttctgcttaaagaatggcaaatggagttacccaaacttgttatctctgtacatgggggcatgcagaaatttgagcttcacccacgaatcaagcagttgcttggaaaaggtcttattaaagctgcagttacaactggagcctggattttaactggaggagtaaacacaggtgtggcaaaacatgttggagatgccctcaaagaacatgcttccagatcatctcgaaagatttgcactatcggaatagctccatggggagtgattgaaaacagaaatgatcttgttgggagagatgtggttgctccttatcaaaccttattgaaccccctgagcaaattgaatgttttgaataatctgcattcccatttcatattggtggatgatggcactgttggaaagtatggggcggaagtcagactgagaagagaacttgaaaaaactattaatcagcaaagaattcatgctaggattggccagggtgtccctgtggtggcacttatatttgagggtgggccaaatgttatcctcacagttcttgaataccttcaggaaagcccccctgttccagtagttgtgtgtgaaggaacaggcagagctgcagatctgctagcgtatattcataaacaaacagaagaaggagggaatcttcctgatgcagcagagcccgatattatttccactatcaaaaaaacatttaactttggccagaatgaagcacttcatttatttcaaacactgatggagtgcatgaaaagaaaggagcttatcactgttttccatattgggtcagatgaacatcaagatatagatgtagcaatacttactgcactgctaaaaggtactaatgcatctgcatttgaccagcttatccttacattggcatgggatagagttgacattgccaaaaatcatgtatttgtttatggacagcagtggctggttggatccttggaacaagctatgcttgatgctcttgtaatggatagagttgcatttgtaaaacttcttattgaaaatggagtaagcatgcataaattccttaccattccgagactggaagaactttacaacactaaacaaggtccaactaatccaatgctgtttcatcttgttcgagacgtcaaacagggaaatcttcctccaggatataagatcactctgattgatataggacttgttattgaatatctcatgggaggaacctacagatgcacctatactaggaaacgttttcgattaatatataatagtcttggtggaaataatcggaggtctggccgaaatacctccagcagcactcctcagttgcgaaagagtcatgaatcttttggcaatagggcagataaaaaggaaaaaatgaggcataaccatttcattaagacagcacagccctaccgaccaaagattgatacagttatggaagaaggaaagaagaaaagaaccaaagatgaaattgtagacattgatgatccagaaaccaagcgctttccttatccacttaatgaacttttaatttgggcttgccttatgaagaggcaggtcatggcccgttttttatggcaacatggtgaagaatcaatggctaaagcattagttgcctgtaagatctatcgttcaatggcatatgaagcaaagcagagtgacctggtagatgatacttcagaagaactaaaacagtattccaatgattttggtcagttggccgttgaattattagaacagtccttcagacaagatgaaaccatggctatgaaattgctcacttatgaactgaagaactggagtaattcaacctgccttaagttagcagtttcttcaagacttagaccttttgtagctcacacctgtacacaaatgttgttatctgatatgtggatgggaaggctgaatatgaggaaaaattcctggtacaaggtcatactaagcattttagttccacctgccatattgctgttagagtataaaactaaggctgaaatgtcccatatcccacaatctcaagatgctcatcagatgacaatggatgacagcgaaaacaactttcagaacataacagaagagatccccatggaagtgtttaaagaagtacggattttggatagtaatgaaggaaagaatgagatggagatacaaatgaaatcaaaaaagcttccaattacgcgaaagttttatgccttttatcatgcaccaattgtaaaattctggtttaacacgttggcatatttaggatttctgatgctttatacatttgtggttcttgtacaaatggaacagttaccttcagttcaagaatggattgttattgcttatatttttacttatgccattgagaaagtccgtgagatctttatgtctgaagctgggaaagtaaaccagaagattaaagtatggtttagtgattacttcaacatcagtgatacaattgccataatttctttcttcattggatttggactaagatttggagcaaaatggaactttgcaaatgcatatgataatcatgtttttgtggctggaagattaatttactgtcttaacataatattttggtatgtgcgtttgctagattttctagctgtaaatcaacaggcaggaccttatgtaatgatgattggaaaaatggtggccaatatgttctacattgtagtgattatggctcttgtattacttagttttggtgttcccagaaaggcaatactttatcctcatgaagcaccatcttggactcttgctaaagatatagtttttcacccatactggatgatttttggtgaagtttatgcatacgaaattgatgtgtgtgcaaatgattctgttatccctcaaatctgtggtcctgggacgtggttgactccatttcttcaagcagtctacctctttgtacagtatatcattatggttaatcttcttattgcatttttcaacaatgtgtatttacaagtgaaggcaatttccaatattgtatggaagtaccagcgttatcattttattatggcttatcatgagaaaccagttctgcctcctccacttatcattcttagccatatagtttctctgttttgctgcatatgtaagagaagaaagaaagataagacttccgatggaccaaaacttttcttaacagaagaagatcaaaagaaacttcatgattttgaagagcagtgtgttgaaatgtatttcaatgaaaaagatgacaaatttcattctgggagtgaagagagaattcgtgtcacttttgaaagagtggaacagatgtgcattcagattaaagaagttggagatcgtgtcaactacataaaaagatcattacaatcattagattctcaaattggccatttgcaagatctttcagccctgacggtagatacattaaaaacactcactgcccagaaagcgtcggaagctagcaaagttcataatgaaatcacacgagaactgagcatttccaaacacttggctcaaaaccttattgatgatggtcctgtaagaccttctgtatggaaaaagcatggtgttgtaaatacacttagctcctctcttcctcaaggtgatcttgaaagtaataatccttttcattgtaatattttaatgaaagatgacaaagatccccagtgtaatatatttggtcaagacttacctgcagtaccccagagaaaagaatttaattttccagaggctggttcctcttctggtgccttattcccaagtgctgtttcccctccagaactgcgacagagactacatggggtagaactcttaaaaatatttaataaaaatcaaaaattaggcagttcatctactagcataccacatctgtcatccccaccaaccaaattttttgttagtacaccatctcagccaagttgcaaaagccacttggaaactggaaccaaagatcaagaaactgtttgctctaaagctacagaaggagataatacagaatttggagcatttgtaggacacagagatagcatggatttacagaggtttaaagaaacatcaaacaagataaaaatactatccaataacaatacttctgaaaacactttgaaacgagtgagttctcttgctggatttactgactgtcacagaacttccattcctgttcattcaaaacaagcagaaaaaatcagtagaaggccatctaccgaagacactcatgaagtagattccaaagcagctttaataccggattggttacaagatagaccatcaaacagagaaatgccatctgaagaaggaacattaaatggtctcacttctccatttaagccagctatggatacaaattactattattcagctgtggaaagaaataacttgatgaggttatcacagagcattccatttacacctgtgcctccaagaggggagcctgtcacagtgtatcgtttggaagagagttcacccaacatactaaataacagcatgtcttcttggtcacaactaggcctctgtgccaaaatagagtttttaagcaaagaggagatgggaggaggtttacgaagagctgtcaaagtacagtgtacctggtcagaacatgatatcctcaaatcagggcatctttatattatcaaatcttttcttccagaggtggttaatacatggtcaagtatttacaaagaagatacagttctgcatctctgtctgagagaaattcaacaacagagagcagcacaaaagcttacgtttgcctttaatcaaatgaaacccaaatccataccatattctccaaggttccttgaagttttcctgctgtattgccattcagcaggacagtggtttgctgtggaagaatgtatgactggagaatttagaaaatacaacaataataatggagatgagattattccaactaatactctggaagagatcatgctagcctttagccactggacttacgaatatacaagaggggagttactggtacttgatttgcaaggtgttggtgaaaatttgactgacccatctgtgataaaagcagaagaaaagagatcctgtgatatggtttttggcccagcaaatctaggagaagatgcaattaaaaacttcagagcaaaacatcactgtaattcttgctgtagaaagcttaaacttccagatctgaagaggaatgattatacgcctgataaaattatatttcctcaggatgagccttcagatttgaatcttcagcctggaaattccaccaaagaatcagaatcaactaattctgttcgtctgatgttataatattaatattactgaatcattggttttgcctgcacctcacagaaatgttactgtgtcacttttccctcgggaggaaattgtttggtaatatagaaaggtgtatgcaagttgaatttgctgactccagcacagttaaaaggtcaatattcttttgacctgattaatcagtcagaaagtccctataggatagagctggcagctgagaaattttaaaggtaattgataattagtatttataactttttaaagggctctttgtatagcagaggatctcatttgactttgttttgatgagggtgatgctctctcttatgtggtacaataccattaaccaaaggtaggtgtccatgcagattttattggcagctgttttattgccattcaactagggaaatgaagaaatcacgcagccttttggttaaatggcagtcaaaattttcctcagtgtatttagtgtgttcagtgatgatatcactggttcccaactagatgcttgttggccacgggaagggaaatgacttgttctaattctaggttcacagaggtatgagaagcctgaactgaagaccattttcaagagggacggtatttatgaatcagggttaggctccatatttaaagatagagccagtttttttttttaaatagaacccaaattgtgtaaaaatgttaattgggttttttaaacattgttttatcaagtcactgttaagtagaagaaagccatggtaaactgatacataacctaaattataaaagcagaaacctaactcactcgtcaagggaagttaccttttgaggaaagttaaagtacttttttccctatctgtatctatagcaacaacccagaacttacaaacttctccaaagattttattgattgttatatcaaatcagaatgtaaacatgaactcttgcatatatttaaaattgtgttggaacatttgaacatgaatgctgtttgtggtacttaagaaattaattcagttggattatcattatgtgatactggcagattgcagtgcaaccttatgccaataaaatgtaatttaacagccccagatattgttgaatattcaacaataacaagaaaagcttttcatctaagttttatgctttaattttttttctttttttttctttttcttttgtttccttggtactaattttaatttttatttggaagggagcagtataaagcttatttgtatttagtagtgtatctcatagatacagacaaggcaagagatgataagctgtttaaatagtgtttaatattgattgggggtggggagaaagaaaaagtgtattacttaaagatactatatacgttttgtatatcattaaatctttaaaagaaatgaaataaatttattgtttacagatgtttagtgagtttaatcattctgaaaaattatctgacattttcagggtgtcaatttgagtatcagtttttttaaatgaaccatttgtatacctgtgcttttgatctcctgtcctgtacaatgtttaaattaatactgatttcttactgtcttcttagaaatctgttttttgttaggccaaaaaagggcaatatgggctgtctgttgatttttaattttatattgattattttcacaggattataatagtagctatacttttttttttttttttttttttgagacggagtctcgctctgttgcttgggctggagtgcagtggtgcgatctcagctcaccacaaccgccgccttccgggtttaagtgattctcctgcctcagcctcccgagtagctgggactacaggcacacgccaccatgcccagctaatttttatatttttagtagagacagggtttcactatgttggccagtgtggtcacaaactcctgaccttgtgagccaccgcacctggctgctaacacttatttagtgcctactgtgtaccagacattactctaagtatttcacatatattaacctacttaatccttataacaatgttataaagaaataggtgttattatcctgttttgcagatttgaaagtcaaggtgctagagaggtaaagtaacgtccataagattcttacgtttatttaataataagtagcaacggtaggatttgaacccaggctggctgcctttcatctatactgtttttgttttgttttgttttgttttgttttgttttgtttgtcttggtggggcatggtggctcatgcctgtaatcccagcacttcgggaggccaaggcaggtggatcacttgggctcaggagtttgagaccagcctgggcaacatggcaaaatcctatctctgctaaaaaaaaaaatacaaaaattaggccaggtgcagtggctcatgcctgtaatcccagcactttgggaggccaaggtgggcggatcacaaggtcaggagttcgagaccagcctgaccaacatagtgaaaccccgtctctactaaaaatacaaaaaattagctgggcatggcggtgagtgcctgtaatcccagctactcaggagtctgaggcaggagaattgcttgaacctgggaggtggaggttgcagtgagctgagatcgtgccattgcgctccagcctgggcaacagtgcgagactccgtcaaaaaaaaaaaaataactggatgtgatggtgtgcacctgtagttccagctacttgggagactgaggtgggaggatcacttgagcctgggagactgaggcagcagtgagctgagatcatgccactgctttccaacctgggcaacagagtgagatcctgtctcagaaagaaaaaaaaaaaaaagacaacctcttgctctgttgcccaggctggagtgtagtagcgtgatcatagctcactgcagccgtaaactcctgggctcaagcaatcctcctgccactgcctcttgattaggtggaaccacaggcatgcaccaccacacgtacctaattttatatatatatttttttatttttcatttttatttatttttgtttttttgagttgaagtctcactctgttgcccaggccggagtacagtggcacaatcttggctcactgcaacctctgcctcccaagatcaagcaattctcgtgcttcagcctccaaagtagctgagattacaggtacccaccataatgcctggctgatttttgtatttttcgtagagacaaggtttcaccttgttggccaggctgatctcaaactcctgacctcaagtgatccacctcccccggctacccaaagtactgggattataggtgtgagccaccatgcctgggtaacacccaactaattttaaatatatattttgtagagatggggtctagccttgttgcccacgctggtctcaaattcctgggctcaagtgatcctctcgcctgagcttcccaaagtggtagaattgcaggcatgaattgctgcacccagcctcatctgtgctgtgaattatgtgctgtattgactctcaagcatgatgaccattggtggtttctgtaccatttcctgttactttactgaaacacacctactccattaacttcttgggttaagtctagaaagtaacagtttacttgtaaaccacatttcttatccccaataagtatttttttaagattattaaagttcattattactaccctatgatgtgaaagtgtcatttgcttaatctttttaattttttattctcaacctcatcttactgaagagaataaaactcttttaccatattcttaaaatgtggaattctcggccaggtgcagtggctcacgcctgtaattccatcactttgggaggccaaggtgggtggatcatctgaggtcaggagttcaagaccagcctggccaacatggtgaaaccccgtctctactaaaaatacaaaaattatctgggtgtggtggcgcgtgcctgtaggcccagctactcaggaggctgaggcaggagaattgcttgaacccaagaggtggaggttgcagtgagcctagattgctgccactgcactccagcctgggtgacagcagaactctgtctcaaaaaaaagatgtggaattcttttctgcaaatgttctctaatagtataccttcttcagtctgtcgatatatgtatgctattattttacaagtaatacatgttgattgtattggaaattatagaaaagattatattggattgtttagaaaatatttttaaatgtgaagaaaaatataaaaattactcccttgttccactttccccactctcaagtcagactatgttgttttcatagttagtagctagcagtctaccccactagattatatgcttcacagagggaagggaccctcaagacttcactggattgagtagcacccaataccttgcttgctgcctggtttgtgatgggcatactgtaagaaaaaaaaatctgaatgacaaaatgtttttccataataccagacttcctcttgaagagatgggtcgtaatgttgtagtcttacatgcttacgtagacaatcaaagcaagaatactcaataaatggctatttaccacttgaaa

SEQ ID NO: 192811 - DNA, 2518 bp, Homo sapiens
  Payload ID: 18059
  Gene Name: transient receptor potential cation channel, subfamily M, member 7
  ENST ID: ENST00000560638
  CDS Start-End: 1-1608
agcatgcataaattccttaccattccgagactggaagaactttacaacactaaacaaggtccaactaatccaatgctgtttcatcttgttcgagacgtcaaacagggaaatcttcctccaggatataagatcactctgattgatataggacttgttattgaatatctcatgggaggaacctacagatgcacctatactaggaaacgttttcgattaatatataatagtcttggtggaaataatcggaggtctggccgaaatacctccagcagcactcctcagttgcgaaagagtcatgaatcttttggcaatagggcagataaaaaggaaaaaatgaggcataaccatttcattaagacagcacagccctaccgaccaaagattgatacagttatggaagaaggaaagaagaaaagaaccaaagatgaaattgtagacattgatgatccagaaaccaagcgctttccttatccacttaatgaacttttaatttgggcttgccttatgaagaggcaggtcatggcccgttttttatggcaacatggtgaagaatcaatggctaaagcattagttgcctgtaagatctatcgttcaatggcatatgaagcaaagcagagtgacctggtagatgatacttcagaagaactaaaacagtattccaatgattttggtcagttggccgttgaattattagaacagtccttcagacaagatgaaaccatggctatgaaattgctcacttatgaactgaagaactggagtaattcaacctgccttaagttagcagtttcttcaagacttagaccttttgtagctcacacctgtacacaaatgttgttatctgatatgtggatgggaaggctgaatatgaggaaaaattcctggtacaaggtcatactaagcattttagttccacctgccatattgctgttagagtataaaactaaggctgaaatgtcccatatcccacaatctcaagatgctcatcagatgacaatggatgacagcgaaaacaactttcagaacataacagaagagatccccatggaagtgtttaaagaagtacggattttggatagtaatgaaggaaagaatgagatggagatacaaatgaaatcaaaaaagcttccaattacgcgaaagttttatgccttttatcatgcaccaattgtaaaattctggtttaacacgttggcatatttaggatttctgatgctttatacatttgtggttcttgtacaaatggaacagttaccttcagttcaagaatggattgttattgcttatatttttacttatgccattgagaaagtccgtgagatctttatgtctgaagctgggaaagtaaaccagaagattaaagtatggtttagtgattacttcaacatcagtgatacaattgccataatttctttcttcattggatttggactaagatttggagcaaaatggaactttgcaaatgcatatgataatcatgtttttgtggctggaagattaatttactgtcttaacataatattttggtatgtgcgtttgctagattttctagctgtaaatcaacaggcaggaccttatgtaatgatgattggaaaaatggtaagttgacagatgtttgataatactcgtgggtttattgattttttaaaaaatcacaaaaatgttattaacatagttttatttgagccagtgaatgtcttttattttgtgtttgtttgcctcatacttcacatctgccattccttaagagtttctcatgctcaatcccaatcccctatacccatttagtgctttgcaagataatgttagctataccatctatggtttatgtctgtaggtaactcctttttcctgtcttcactgatccaggctttttttttttttttttctttttgagacagagtttcgctctgtcacccaggctggagtgcaatggcactatcttggctcactgcaacctctgcctctcaggttcagcgattctcctgcctcagccacccgaggagctgggattacaggcatgtgccaccatgcccagctaattttgtatttttagtagagacagggtttcaccatgttggtcaggctggtcccaaactcctgacctcagatgatctgcccaccttggcctcccaaagtgctgggattacaggcgtgagccaccacaccctgcttgatccaggctattttttaaaagttaaacccaaaatacctaatcttttcctaatacagtatgcccagtattttgctcttttccttagtcttatctgagtggcaggttttattttttaaaatctagatgtcaagttgaatgtgtaatttttttatacactgaatctgaaatatattgggtctactccttgccgtaattccttttagttttcagtggtgaaaaaggcaaaatttgtaatatagctattgctattccttattctgaaattcctgttcatcctaggaaatttcagcaaatgcagacaaatcactattcagagacattcactattaacagtttaacgta

SEQ ID NO: 192812 - DNA, 7218 bp, Homo sapiens
  Payload ID: 18059
  Gene Name: transient receptor potential cation channel, subfamily M, member 7
  ENST ID: ENST00000560955
  CDS Start-End: 239-5833
cgggcgcgggcgcgtccctgtggccagtcacccggaggagttggtcgcacaattatgaaagactcggcttctgctgctagcgccggagctgagttagttctgagaaggtttccctgggcgttccttgtccggcggcctctgctgccgcctccggagacgcttcccgatagatggctacaggccgcggaggaggaggaggtggagttgctgcccttccggagtccgccccgtgaggagaatgtcccagaaatcctggatagaaagcactttgaccaagagggaatgtgtatatattataccaagttccaaggaccctcacagatgccttccaggatgtcaaatttgtcagcaactcgtcaggtgtttttgtggtcgcttggtcaagcaacatgcttgttttactgcaagtcttgccatgaaatactcagatgtgaaattgggtgaccattttaatcaggcaatagaagaatggtctgtggaaaagcatacagaacagagcccaacggatgcttatggagtcataaattttcaagggggttctcattcctacagagctaagtatgtgaggctatcatatgacaccaaacctgaagtcattctgcaacttctgcttaaagaatggcaaatggagttacccaaacttgttatctctgtacatgggggcatgcagaaatttgagcttcacccacgaatcaagcagttgcttggaaaaggtcttattaaagctgcagttacaactggagcctggattttaactggaggagtaaacacaggtgtggcaaaacatgttggagatgccctcaaagaacatgcttccagatcatctcgaaagatttgcactatcggaatagctccatggggagtgattgaaaacagaaatgatcttgttgggagagatgtggttgctccttatcaaaccttattgaaccccctgagcaaattgaatgttttgaataatctgcattcccatttcatattggtggatgatggcactgttggaaagtatggggcggaagtcagactgagaagagaacttgaaaaaactattaatcagcaaagaattcatgctaggattggccagggtgtccctgtggtggcacttatatttgagggtgggccaaatgttatcctcacagttcttgaataccttcaggaaagcccccctgttccagtagttgtgtgtgaaggaacaggcagagctgcagatctgctagcgtatattcataaacaaacagaagaaggagggaatcttcctgatgcagcagagcccgatattatttccactatcaaaaaaacatttaactttggccagaatgaagcacttcatttatttcaaacactgatggagtgcatgaaaagaaaggagcttatcactgttttccatattgggtcagatgaacatcaagatatagatgtagcaatacttactgcactgctaaaaggtactaatgcatctgcatttgaccagcttatccttacattggcatgggatagagttgacattgccaaaaatcatgtatttgtttatggacagcagtggctggttggatccttggaacaagctatgcttgatgctcttgtaatggatagagttgcatttgtaaaacttcttattgaaaatggagtaagcatgcataaattccttaccattccgagactggaagaactttacaacactaaacaaggtccaactaatccaatgctgtttcatcttgttcgagacgtcaaacagggaaatcttcctccaggatataagatcactctgattgatataggacttgttattgaatatctcatgggaggaacctacagatgcacctatactaggaaacgttttcgattaatatataatagtcttggtggaaataatcggaggtctggccgaaatacctccagcagcactcctcagttgcgaaagagtcatgaatcttttggcaatagggcagataaaaaggaaaaaatgaggcataaccatttcattaagacagcacagccctaccgaccaaagattgatacagttatggaagaaggaaagaagaaaagaaccaaagatgaaattgtagacattgatgatccagaaaccaagcgctttccttatccacttaatgaacttttaatttgggcttgccttatgaagaggcaggtcatggcccgttttttatggcaacatggtgaagaatcaatggctaaagcattagttgcctgtaagatctatcgttcaatggcatatgaagcaaagcagagtgacctggtagatgatacttcagaagaactaaaacagtattccaatgattttggtcagttggccgttgaattattagaacagtccttcagacaagatgaaaccatggctatgaaattgctcacttatgaactgaagaactggagtaattcaacctgccttaagttagcagtttcttcaagacttagaccttttgtagctcacacctgtacacaaatgttgttatctgatatgtggatgggaaggctgaatatgaggaaaaattcctggtacaaggtcatactaagcattttagttccacctgccatattgctgttagagtataaaactaaggctgaaatgtcccatatcccacaatctcaagatgctcatcagatgacaatggatgacagcgaaaacaactttcagaacataacagaagagatccccatggaagtgtttaaagaagtacggattttggatagtaatgaaggaaagaatgagatggagatacaaatgaaatcaaaaaagcttccaattacgcgaaagttttatgccttttatcatgcaccaattgtaaaattctggtttaacacgttggcatatttaggatttctgatgctttatacatttgtggttcttgtacaaatggaacagttaccttcagttcaagaatggattgttattgcttatatttttacttatgccattgagaaagtccgtgagatctttatgtctgaagctgggaaagtaaaccagaagattaaagtatggtttagtgattacttcaacatcagtgatacaattgccataatttctttcttcattggatttggactaagatttggagcaaaatggaactttgcaaatgcatatgataatcatgtttttgtggctggaagattaatttactgtcttaacataatattttggtatgtgcgtttgctagattttctagctgtaaatcaacaggcaggaccttatgtaatgatgattggaaaaatggtggccaatatgttctacattgtagtgattatggctcttgtattacttagttttggtgttcccagaaaggcaatactttatcctcatgaagcaccatcttggactcttgctaaagatatagtttttcacccatactggatgatttttggtgaagtttatgcatacgaaattgatgtgtgtgcaaatgattctgttatccctcaaatctgtggtcctgggacgtggttgactccatttcttcaagcagtctacctctttgtacagtatatcattatggttaatcttcttattgcatttttcaacaatgtgtatttacaagtgaaggcaatttccaatattgtatggaagtaccagcgttatcattttattatggcttatcatgagaaaccagttctgcctcctccacttatcattcttagccatatagtttctctgttttgctgcatatgtaagagaagaaagaaagataagacttccgatggaccaaaacttttcttaacagaagaagatcaaaagaaacttcatgattttgaagagcagtgtgttgaaatgtatttcaatgaaaaagatgacaaatttcattctgggagtgaagagagaattcgtgtcacttttgaaagagtggaacagatgtgcattcagattaaagaagttggagatcgtgtcaactacataaaaagatcattacaatcattagattctcaaattggccatttgcaagatctttcagccctgacggtagatacattaaaaacactcactgcccagaaagcgtcggaagctagcaaagttcataatgaaatcacacgagaactgagcatttccaaacacttggctcaaaaccttattgatgatggtcctgtaagaccttctgtatggaaaaagcatggtgttgtaaatacacttagctcctctcttcctcaaggtgatcttgaaagtaataatccttttcattgtaatattttaatgaaagatgacaaagatccccagtgtaatatatttggtcaagacttacctgcagtaccccagagaaaagaatttaattttccagaggctggttcctcttctggtgccttattcccaagtgctgtttcccctccagaactgcgacagagactacatggggtagaactcttaaaaatatttaataaaaatcaaaaattaggcagttcatctactagcataccacatctgtcatccccaccaaccaaattttttgttagtacaccatctcagccaagttgcaaaagccacttggaaactggaaccaaagatcaagaaactgtttgctctaaagctacagaaggagataatacagaatttggagcatttgtaggacacagagatagcatggatttacagaggtttaaagaaacatcaaacaagataaaaatactatccaataacaatacttctgaaaacactttgaaacgagtgagttctcttgctggatttactgactgtcacagaacttccattcctgttcattcaaaacaagaaaaaatcagtagaaggccatctaccgaagacactcatgaagtagattccaaagcagctttaataccggattggttacaagatagaccatcaaacagagaaatgccatctgaagaaggaacattaaatggtctcacttctccatttaagccagctatggatacaaattactattattcagctgtggaaagaaataacttgatgaggttatcacagagcattccatttacacctgtgcctccaagaggggagcctgtcacagtgtatcgtttggaagagagttcacccaacatactaaataacagcatgtcttcttggtcacaactaggcctctgtgccaaaatagagtttttaagcaaagaggagatgggaggaggtttacgaagagctgtcaaagtacagtgtacctggtcagaacatgatatcctcaaatcagggcatctttatattatcaaatcttttcttccagaggtggttaatacatggtcaagtatttacaaagaagatacagttctgcatctctgtctgagagaaattcaacaacagagagcagcacaaaagcttacgtttgcctttaatcaaatgaaacccaaatccataccatattctccaaggttccttgaagttttcctgctgtattgccattcagcaggacagtggtttgctgtggaagaatgtatgactggagaatttagaaaatacaacaataataatggagatgagattattccaactaatactctggaagagatcatgctagcctttagccactggacttacgaatatacaagaggggagttactggtacttgatttgcaaggtgttggtgaaaatttgactgacccatctgtgataaaagcagaagaaaagagatcctgtgatatggtttttggcccagcaaatctaggagaagatgcaattaaaaacttcagagcaaaacatcactgtaattcttgctgtagaaagcttaaacttccagatctgaagaggaatgattatacgcctgataaaattatatttcctcaggatgagccttcagatttgaatcttcagcctggaaattccaccaaagaatcagaatcaactaattctgttcgtctgatgttataatattaatattactgaatcattggttttgcctgcacctcacagaaatgttactgtgtcacttttccctcgggaggaaattgtttggtaatatagaaaggtgtatgcaagttgaatttgctgactccagcacagttaaaaggtcaatattcttttgacctgattaatcagtcagaaagtccctataggatagagctggcagctgagaaattttaaaggtaattgataattagtatttataactttttaaagggctctttgtatagcagaggatctcatttgactttgttttgatgagggtgatgctctctcttatgtggtacaataccattaaccaaaggtaggtgtccatgcagattttattggcagctgttttattgccattcaactagggaaatgaagaaatcacgcagccttttggttaaatggcagtcaaaattttcctcagtgtatttagtgtgttcagtgatgatatcactggttcccaactagatgcttgttggccacgggaagggaaatgacttgttctaattctaggttcacagaggtatgagaagcctgaactgaagaccattttcaagagggacggtatttatgaatcagggttaggctccatatttaaagatagagccagtttttttttttaaatagaacccaaattgtgtaaaaatgttaattgggttttttaaacattgttttatcaagtcactgttaagtagaagaaagccatggtaaactgatacataacctaaattataaaagcagaaacctaactcactcgtcaagggaagttaccttttgaggaaagttaaagtacttttttccctatctgtatctatagcaacaacccagaacttacaaacttctccaaagattttattgattgttatatcaaatcagaatgtaaacatgaactcttgcatatatttaaaattgtgttggaacatttgaacatgaatgctgtttgtggtacttaagaaattaattcagttggattatcattatgtgatactggcagattgcagtgcaaccttatgccaataaaatgtaatttaacagccccagatattgttgaatattcaacaataacaagaaaagcttttcatctaagttttatgctttaattttttttctttttttttctttttcttttgtttccttggtactaattttaatttttatttggaagggagcagtataaagcttatttgtatttagtagtgtatctcatagatacagacaaggcaagagatgataagctgtttaaatagtgtttaatattgattgggggtggggagaaagaaaaagtgtattacttaaagatactatatacgttttgtatatcattaaatctttaaaagaaatgaaataaatttattgtttacaga

SEQ ID NO: 192813 - DNA, 830 bp, Homo sapiens
  Payload ID: 18059
  Gene Name: transient receptor potential cation channel, subfamily M, member 7
  ENST ID: ENST00000561267
  CDS Start-End: 1-703
aggtttacgaagagctgtcaaagtacagtgtacctggtcagaacatgatatcctcaaatcagggcatctttatattatcaaatcttttcttccagaggtggttaatacatggtcaagtatttacaaagaagatacagttctgcatctctgtctgagagaaattcaacaacagagagcagcacaaaagcttacgtttgcctttaatcaaatgaaacccaaatccataccatattctccaaggttccttgaagttttcctgctgtattgccattcagcaggacagtggtttgctgtggaagaatgtatgactggagaatttagaaaatacaacaataataatggagatgagattattccaactaatactctggaagagatcatgctagcctttagccactggacttacgaatatacaagaggggagttactggtacttgatttgcaaggtgttggtgaaaatttgactgacccatctgtgataaaagcagaagaaaagagatcctgtgatatggtttttggcccagcaaatctaggagaagatgcaattaaaaacttcagagcaaaacatcactgtaattcttgctgtagaaagcttaaacttccagagatgaggtctcactgtgttacccaggctggtcttgaactgacttcaagcaatcctcagtgcctcagcctcacaaagtgctgggattaccagtgctagccactgcatctggtcacaaatgttttttgaaaaatgtaaactagaatgagattttttaaaatattgaaagtgattcaggggaagatagtaaaagcacattaaaggtttcgtttctatttgggaaaaa

SEQ ID NO: 192814 - DNA, 5621 bp, Homo sapiens
  Payload ID: 18060
  Gene Name: transient receptor potential cation channel, subfamily M, member 8
  Uniprot ID: Q7Z2W7
  ENST ID: ENST00000324695
  CDS Start-End: 41-3355
aagaaaatcctgcttgacaaaaaccgtcacttaggaaaagatgtcctttcgggcagccaggctcagcatgaggaacagaaggaatgacactctggacagcacccggaccctgtactccagcgcgtctcggagcacagacttgtcttacagtgaaagcgacttggtgaattttattcaagcaaattttaagaaacgagaatgtgtcttctttaccaaagattccaaggccacggagaatgtgtgcaagtgtggctatgcccagagccagcacatggaaggcacccagatcaaccaaagtgagaaatggaactacaagaaacacaccaaggaatttcctaccgacgcctttggggatattcagtttgagacactggggaagaaagggaagtatatacgtctgtcctgcgacacggacgcggaaatcctttacgagctgctgacccagcactggcacctgaaaacacccaacctggtcatttctgtgaccgggggcgccaagaacttcgccctgaagccgcgcatgcgcaagatcttcagccggctcatctacatcgcgcagtccaaaggtgcttggattctcacgggaggcacccattatggcctgatgaagtacatcggggaggtggtgagagataacaccatcagcaggagttcagaggagaatattgtggccattggcatagcagcttggggcatggtctccaaccgggacaccctcatcaggaattgcgatgctgagggctattttttagcccagtaccttatggatgacttcacaagagatccactgtatatcctggacaacaaccacacacatttgctgctcgtggacaatggctgtcatggacatcccactgtcgaagcaaagctccggaatcagctagagaagtatatctctgagcgcactattcaagattccaactatggtggcaagatccccattgtgtgttttgcccaaggaggtggaaaagagactttgaaagccatcaatacctccatcaaaaataaaattccttgtgtggtggtggaaggctcgggccagatcgctgatgtgatcgctagcctggtggaggtggaggatgccctgacatcttctgccgtcaaggagaagctggtgcgctttttaccccgcacggtgtcccggctgcctgaggaggagactgagagttggatcaaatggctcaaagaaattctcgaatgttctcacctattaacagttattaaaatggaagaagctggggatgaaattgtgagcaatgccatctcctacgctctatacaaagccttcagcaccagtgagcaagacaaggataactggaatgggcagctgaagcttctgctggagtggaaccagctggacttagccaatgatgagattttcaccaatgaccgccgatgggagtctgctgaccttcaagaagtcatgtttacggctctcataaaggacagacccaagtttgtccgcctctttctggagaatggcttgaacctacggaagtttctcacccatgatgtcctcactgaactcttctccaaccacttcagcacgcttgtgtaccggaatctgcagatcgccaagaattcctataatgatgccctcctcacgtttgtctggaaactggttgcgaacttccgaagaggcttccggaaggaagacagaaatggccgggacgagatggacatagaactccacgacgtgtctcctattactcggcaccccctgcaagctctcttcatctgggccattcttcagaataagaaggaactctccaaagtcatttgggagcagaccaggggctgcactctggcagccctgggagccagcaagcttctgaagactctggccaaagtgaagaacgacatcaatgctgctggggagtccgaggagctggctaatgagtacgagacccgggctgttgagctgttcactgagtgttacagcagcgatgaagacttggcagaacagctgctggtctattcctgtgaagcttggggtggaagcaactgtctggagctggcggtggaggccacagaccagcatttcatcgcccagcctggggtccagaattttctttctaagcaatggtatggagagatttcccgagacaccaagaactggaagattatcctgtgtctgtttattatacccttggtgggctgtggctttgtatcatttaggaagaaacctgtcgacaagcacaagaagctgctttggtactatgtggcgttcttcacctcccccttcgtggtcttctcctggaatgtggtcttctacatcgccttcctcctgctgtttgcctacgtgctgctcatggatttccattcggtgccacacccccccgagctggtcctgtactcgctggtctttgtcctcttctgtgatgaagtgagacagtggtacgtaaatggggtgaattattttactgacctgtggaatgtgatggacacgctggggcttttttacttcatagcaggaattgtatttcggctccactcttctaataaaagctctttgtattctggacgagtcattttctgtctggactacattattttcactctaagattgatccacatttttactgtaagcagaaacttaggacccaagattataatgctgcagaggatgctgatcgatgtgttcttcttcctgttcctctttgcggtgtggatggtggcctttggcgtggccaggcaagggatccttaggcagaatgagcagcgctggaggtggatattccgttcggtcatctacgagccctacctggccatgttcggccaggtgcccagtgacgtggatggtaccacgtatgactttgcccactgcaccttcactgggaatgagtccaagccactgtgtgtggagctggatgagcacaacctgccccggttccccgagtggatcaccatccccctggtgtgcatctacatgttatccaccaacatcctgctggtcaacctgctggtcgccatgtttggctacacggtgggcaccgtccaggagaacaatgaccaggtctggaagttccagaggtacttcctggtgcaggagtactgcagccgcctcaatatccccttccccttcatcgtcttcgcttacttctacatggtggtgaagaagtgcttcaagtgttgctgcaaggagaaaaacatggagtcttctgtctgctgtttcaaaaatgaagacaatgagactctggcatgggagggtgtcatgaaggaaaactaccttgtcaagatcaacacaaaagccaacgacacctcagaggaaatgaggcatcgatttagacaactggatacaaagcttaatgatctcaagggtcttctgaaagagattgctaataaaatcaaataaaactgtatgaactctaatggagaaaaatctaattatagcaagatcatattaaggaatgctgatgaacaattttgctatcgactactaaatgagagattttcagacccctgggtacatggtggatgattttaaatcaccctagtgtgctgagaccttgagaataaagtgtgtgattggtttcatacttgaagacggatataaaggaagaatatttcctttatgtgtttctccagaatggtgcctgtttctctctgtgtctcaatgcctgggactggaggttgatagtttaagtgtgttcttaccgcctcctttttcctttaatcttatttttgatgaacacatatataggagaacatctatcctatgaataagaacctggtcatgctttactcctgtattgttattttgttcatttccaattgattctctacttttcccttttttgtattatgtgactaattagttggcatattgttaaaagtctctcaaattaggccagattctaaaacatgctgcagcaagaggaccccgctctcttcaggaaaagtgttttcatttctcaggatgcttcttacctgtcagaggaggtgacaaggcagtctcttgctctcttggactcaccaggctcctattgaaggaaccacccccattcctaaatatgtgaaaagtcgcccaaaatgcaaccttgaaaggcactactgactttgttcttattggatactcctcttattatttttccattaaaaataatagctggctattatagaaaatttagaccatacagagatgtagaaagaacataaattgtccccattaccttaaggtaatcactgctaacaatttctggatggtttttcaagtctattttttttctatgtatgtctcaattctctttcaaaattttacagaatgttatcatactacatatatactttttatgtaagctttttcacttagtattttatcaaatatgtttttattatattcatagccttcttaaacattatatcaataattgcataataggcaacctctagcgattaccataattttgctcattgaaggctatctccagttgatcattgggatgagcatctttgtgcatgaatcctattgctgtatttgggaaaattttccaaggttagattccaataaatatctatttattattaaatattaaaatatctatttattattaaaaccatttataaggctttttcataaatgtatagcaaataggaattattaacttgagcataagatatgagatacatgaacctgaactattaaaataaaatattatatttaacccttagtttaagaagaagtcaatatgcttatttaaatattatggatggtgggcagatcacttgaggtcaggagttcgagaccagcctggccaacatggcaaaaccacatctctactaaaaataaaaaaattagctgggtgtggtggtgcactcctgtaatcccagctactcagaaggctgaggtacaagaattgctggaacctgggaggcggaggttgcagtgaaccaagattgcaccactgcactccagccggggtgacagagtgagactccgactgaaaataaataaataaataaataaataaataaataaatattatggatggtgaagggaatggtatagaattggagagattatcttactgaacacctgtagtcccagctttctctggaagtggtcgtatttgagcaggatgtgcacaaggcaattgaaatgcccataattagtttctcagctttgaatacactataaactcactggctgaaggaggaaattttagaaggaagctactaaaagatctaatttgaaaaactacaaaagcattaactaaaaaagtttattttccttttgtctgggcagtagtgaaaataactactcacaacattcactatgtttgcaaggaattaacacaaataaaagatgcctttttacttaaacaccaagacagaaaacttgcccaatactgagaagcaacttgcattagagagggaactgttaaatgttttcaacccagttcatctggtggatgtttttgcaggttactctgagaattttgcttatgaaaaatcattatttttagtgtagttcacaataatgtattgaacatacttctaatcaaaggtgctatgtccttgtgtatggtactaaatgtgtcctgtgtacttttgcacaactgagaatcctgcagcttggtttaatgagtgtgttcatgaaataaataatggaggaattgtca

SEQ ID NO: 192815 - DNA, 904 bp, Homo sapiens
  Payload ID: 18060
  Gene Name: transient receptor potential cation channel, subfamily M, member 8
  ENST ID: ENST00000355722
  CDS Start-End: 115-693
ctgcctttctccaccagagactcttcctcagggaggacttggtgaattttattcaagcaaattttaagaaacgagaatgtgtcttctttaccaaagattccaaggccacgctcaatgaaatccttccttcctgtccacaccatcgtgcttatcagggagaatgtgtgcaagtgtggctatgcccagagccagcacatggaaggcacccagatcaaccaaagtgagaaatggaactacaagaaacacaccaaggaatttcctaccgacgcctttggggatattcagtttgagacactggggaagaaagggaagtatatacgtctgtcctgcgacacggacgcggaaatcctttacgagctgctgacccagcactggcacctgaaaacacccaacctggtcatttctgtgaccgggggcgccaagaacttcgccctgaagccgcgcatgcgcaagatcttcagccggctcatctacatcgcgcagtccaaaggtgcttggattctcacgggaggcacccattatggcctgatgaagtacatcggggaggtggtgagagataacaccatcagcaggagttcagaggagaatattgtggccattggcatagcagcttggggcatggtctccaaccgggacaccctcatcaggaattgcgatgctgaggtaccggtgggacaggaggaggtctgctaggtcacatggaagaaagaccatggcatgggcctgtggcctgaaccctggggctctgtgatggagccagccagatcatggggaagtctgcctttcaaggagtgcctttgggaccttaaaggaattgaaaacaaggatgacgtacctaattaactgctgggaaagagttaacaatgaatgttttgttcattaaaatgtgttctcagcaatctca

SEQ ID NO: 192816 - DNA, 722 bp, Homo sapiens
  Payload ID: 18060
  Gene Name: transient receptor potential cation channel, subfamily M, member 8
  Uniprot ID: Q7Z2W7
  ENST ID: ENST00000409625
  CDS Start-End: 124-621
ctcagggaggacttggtgaattttattcaagcaaattttaagaaacgagaatgtgtcttctttaccaaagattccaaggccacggagaatgtgtgcaagtgtggctatgcccagagccagcacatggaaggcacccagatcaaccaaagtgagaaatggaactacaagaaacacaccaaggaatttcctaccgacgcctttggggatattcagtttgagacactggggaagaaagggaagtatatacgtctgtcctgcgacacggacgcggaaatcctttacgagctgctgacccagcactggcacctgaaaacacccaacctggtcatttctgtgaccgggggcgccaagaacttcgccctgaagccgcgcatgcgcaagatcttcagccggctcatctacatcgcgcagtccaaaggtgcttggattctcacgggaggcacccattatggcctgatgaagtacatcggggaggtggtgagagataacaccatcagcaggagttcagaggagaatattgtggccattggcatagcagcttggggcatggtctccaaccgggacaccctcatcaggaattgcgatgctgaggtaccggtgggacaggaggaggtctgctaggtcacatggaagaaagaccatggcatgggcctgtggcctgaaccctggggctctgtgatggagccagccagatcatggggaagtctgcctttcaaggagtg

SEQ ID NO: 192817 - DNA, 2143 bp, Homo sapiens
  Payload ID: 18060
  Gene Name: transient receptor potential cation channel, subfamily M, member 8
  ENST ID: ENST00000439148
  CDS Start-End: 1-420
ggacgagtcattttctgtctggactacattattttcactctaagattgatccacatttttactgtaagcagaaacttaggacccaagattataatgctgcagaggatgctgatcgatgtgttcttcttcctgttcctctttgcggtgtggatggtggcctttggcgtggccaggcaagggatccttaggcagaatgagcagcgctggaggtggatattccgttcggtcatctacgagccctacctggccatgttcggccaggtgcccagtgacgtggatggtaagcctgacttggctcagatggaaacagcttggaggaggcatttgctccctgaaccaacccccagggctgccccggagaccgcacttcagaagcacgcgcgtgaaacggagtccaacataacagagtaccacgtatgactttgcccactgcaccttcactgggaatgagtccaagccactgtgtgtggagctggatgagcacaacctgccccggttccccgagtggatcaccatccccctggtgtgcatctacatgttatccaccaacatcctgctggtcaacctgctggtcgccatgtttggctacacggtgggcaccgtccaggagaacaatgaccaggtctggaagttccagaggtacttcctggtgcaggagtactgcagccgcctcaatatccccttccccttcatcgtcttcgcttacttctacatggtggtgaagaagtgcttcaagtgttgctgcaaggagaaaaacatggagtcttctgtctgctgtttcaaaaatgaagacaatgagactctggcatgggagggtgtcatgaaggaaaactaccttgtcaagatcaacacaaaagccaacgacacctcagaggaaatgaggcatcgatttagacaactggatacaaagcttaatgatctcaagggtcttctgaaagagattgctaataaaatcaaataaaactgtatgaactctaatggagaaaaatctaattatagcaagatcatattaaggaatgctgatgaacaattttgctatcgactactaaatgagagattttcagacccctgggtacatggtggatgattttaaatcaccctagtgtgctgagaccttgagaataaagtgtgtgattggtttcatacttgaagacggatataaaggaagaatatttcctttatgtgtttctccagaatggtgcctgtttctctctgtgtctcaatgcctgggactggaggttgatagtttaagtgtgttcttaccgcctcctttttcctttaatcttatttttgatgaacacatatataggagaacatctatcctatgaataagaacctggtcatgctttactcctgtattgttattttgttcatttccaattgattctctacttttcccttttttgtattatgtgactaattagttggcatattgttaaaagtctctcaaattaggccagattctaaaacatgctgcagcaagaggaccccgctctcttcaggaaaagtgttttcatttctcaggatgcttcttacctgtcagaggaggtgacaaggcagtctcttgctctcttggactcaccaggctcctattgaaggaaccacccccattcctaaatatgtgaaaagtcgcccaaaatgcaaccttgaaaggcactactgactttgttcttattggatactcctcttattatttttccattaaaaataatagctggctattatagaaaatttagaccatacagagatgtagaaagaacataaattgtccccattaccttaaggtaatcactgctaacaatttctggatggtttttcaagtctattttttttctatgtatgtctcaattctctttcaaaattttacagaatgttatcatactacatatatactttttatgtaagctttttcacttagtattttatcaaatatgtttttattatattcatagccttcttaaacattatatcaataattgcataataggcaacctctagcgattaccataattttgctcattgaaggctatctccagttgatcattgggatgagcatctttgtgcatgaatcctattgctgtatttgggaaaattttccaaggttagattccaataaatatctatttattattaaatattaaaa

SEQ ID NO: 192818 - DNA, 3348 bp, Homo sapiens
  Payload ID: 18060
  Gene Name: transient receptor potential cation channel, subfamily M, member 8
  ENST ID: ENST00000444298
  CDS Start-End: 34-1011
tcctgcttgacaaaaaccgtcacttaggaaaagatgtcctttcgggcagccaggctcagcatgaggaacagaaggaatgacactctggacagcacccggaccctgtactccagcgcgtctcggagcacagacttgtcttacagtgaaagcgacttggtgaattttattcaagcaaattttaagaaacgagaatgtgtcttctttaccaaagattccaaggccacggagaatgtgtgcaagtgtggctatgcccagagccagcacatggaaggcacccagatcaaccaaagtgagaaatggaactacaagaaacacaccaaggaatttcctaccgacgcctttggggatattcagtttgagacactggggaagaaagggaagtatatacgtctgtcctgcgacacggacgcggaaatcctttacgagctgctgacccagcactggcacctgaaaacacccaacctggtcatttctgtgaccgggggcgccaagaacttcgccctgaagccgcgcatgcgcaagatcttcagccggctcatctacatcgcgcagtccaaaggtgcttggattctcacgggaggcacccattatggcctgatgaagtacatcggggaggtggtgagagataacaccatcagcaggagttcagaggagaatattgtggccattggcatagcagcttggggcatggtctccaaccgggacaccctcatcaggaattgcgatgctgagggctattttttagcccagtaccttatggatgacttcacaagagatccactgtatatcctggacaacaaccacacacatttgctgctcgtggacaatggctgtcatggacatcccactgtcgaagcaaagctccggaatcagctagagaagtatatctctgagcgcactattcaagattccaactatggtggcaagatccccattgtgtgttttgcccaaggaggtggaaaagagactttgaaatcaagaagatttgggaggagaatttcagtgacatgaataacctgtgtacttagtgttggccttgacagtcaacctgccaaagagaagagttgacattaattcgggagacttaaagattgtaaccggcatatatattagaaagctatggccaacctatctgcattgagatgagctgtgatcatacacacacagattgcccccaaaccagatgtttccagaccacctaaggcccatttatatgccacctggggatgcaggccatcaatacctccatcaaaaataaaattccttgtgtggtggtggaaggctcgggccagatcgctgatgtgatcgctagcctggtggaggtggaggatgccctgacatcttctgccgtcaaggagaagctggtgcgctttttaccccgcacggtgtcccggctgcctgaggaggagactgagagttggatcaaatggctcaaagaaattctcgaatgttctcacctattaacagttattaaaatggaagaagctggggatgaaattgtgagcaatgccatctcctacgctctatacaaagccttcagcaccagtgagcaagacaaggataactggaatgggcagctgaagcttctgctggagtggaaccagctggacttagccaatgatgagattttcaccaatgaccgccgatgggagtctgctgaccttcaagaagtcatgtttacggctctcataaaggacagacccaagtttgtccgcctctttctggagaatggcttgaacctacggaagtttctcacccatgatgtcctcactgaactcttctccaaccacttcagcacgcttgtgtaccggaatctgcagatcgccaagaattcctataatgatgccctcctcacgtttgtctggaaactggttgcgaacttccgaagaggcttccggaaggaagacagaaatggccgggacgagatggacatagaactccacgacgtgtctcctattactcggcaccccctgcaagctctcttcatctgggccattcttcagaataagaaggaactctccaaagtcatttgggagcagaccaggggctgcactctggcagccctgggagccagcaagcttctgaagactctggccaaagtgaagaacgacatcaatgctgctggggagtccgaggagctggctaatgagtacgagacccgggctgttgagctgttcactgagtgttacagcagcgatgaagacttggcagaacagctgctggtctattcctgtgaagcttggggtggaagcaactgtctggagctggcggtggaggccacagaccagcatttcatcgcccagcctggggtccagtggtacgtaaatggggtgaattattttactgacctgtggaatgtgatggacacgctggggcttttttacttcatagcaggaattgtatttcggctccactcttctaataaaagctctttgtattctggacgagtcattttctgtctggactacattattttcactctaagattgatccacatttttactgtaagcagaaacttaggacccaagattataatgctgcagaggatgctgatcgatgtgttcttcttcctgttcctctttgcggtgtggatggtggcctttggcgtggccaggcaagggatccttaggcagaatgagcagcgctggaggtggatattccgttcggtcatctacgagccctacctggccatgttcggccaggtgcccagtgacgtggatggtaccacgtatgactttgcccactgcaccttcactgggaatgagtccaagccactgtgtgtggagctggatgagcacaacctgccccggttccccgagtggatcaccatccccctggtgtgcatctacatgttatccaccaacatcctgctggtcaacctgctggtcgccatgtttggctacacggtgggcaccgtccaggagaacaatgaccaggtctggaagttccagaggtacttcctggtgcaggagtactgcagccgcctcaatatccccttccccttcatcgtcttcgcttacttctacatggtggtgaagaagtgcttcaagtgttgctgcaaggagaaaaacatggagtcttctgtctgctgtttcaaaaatgaagacaatgagactctggcatgggagggtgtcatgaaggaaaactaccttgtcaagatcaacacaaaagccaacgacacctcagaggaaatgaggcatcgatttagacaactggatacaaagcttaatgatctcaagggtcttctgaaagagattgctaataaaatcaaataaaactgtatgaactctaatggagaaaaatctaattatagcaagatcatattaaggaatgctgatgaacaatttt

SEQ ID NO: 192819 - DNA, 5291 bp, Homo sapiens
  Payload ID: 18060
  Gene Name: transient receptor potential cation channel, subfamily M, member 8
  ENST ID: ENST00000433712
  CDS Start-End: 764-3025
aagaaaatcctgcttgacaaaaaccgtcacttaggaaaagatgtcctttcgggcagccaggctcagcatgaggaacagaaggaatgacactctggacagcacccggaccctgtactccagcgcgtctcggagcacagacttgtcttacagtgaaagcgacttggtgaattttattcaagcaaattttaagaaacgagaatgtgtcttctttaccaaagattccaaggccacggagaatgtgtgcaagtgtggctatgcccagagccagcacatggaaggcacccagatcaaccaaagtgagaaatggaactacaagaaacacaccaaggaatttcctaccgacgcctttggggatattcagtttgagacactggggaagaaagggaagtatatacgtctgtcctgcgacacggacgcggaaatcctttacgagctgctgacccagcactggcacctgaaaacacccaacctggtcatttctgtgaccgggggcgccaagaacttcgccctgaagccgcgcatgcgcaagatcttcagccggctcatctacatcgcgcagtccaaaggtgcttggattctcacgggaggcacccattatggcctgatgaagtacatcggggaggtggtgagagataacaccatcagcaggagttcagaggagaatattgtggccattggcatagcagcttggggcatggtctccaaccgggacaccctcatcaggaattgcgatgctgagggctattttttagcccagtaccttatggatgacttcacaagagatccactgtatatcctggacaacaaccacacacatttgctgctcgtggacaatggctgtcatggacatcccactgtcgaagcaaagctccggaatcagctagagaagtatatctctgagcgcactattcaagattccaactatggtggcaagatccccattgtgtgttttgcccaaggaggtggaaaagagactttgaaagccatcaatacctccatcaaaaataaaattccttgtgtggtggtggaaggctcgggccagatcgctgatgtgatcgctagcctggtggaggtggaggatgccctgacatcttctgccgtcaaggagaagctggtgcgctttttaccccgcacggtgtcccggctgcctgaggaggagactgagagttggatcaaatggctcaaagaaattctcgaatgttctcacctattaacagttattaaaatggaagaagctggggatgaaattgtgagcaatgccatctcctacgctctatacaaagccttcagcaccagtgagcaagacaaggataactggaatgggcagctgaagcttctgctggagtggaaccagctggacttagccaatgatgagattttcaccaatgaccgccgatgggagtctgctgaccttcaagaagtcatgtttacggctctcataaaggacagacccaagtttgtccgcctctttctggagaatggcttgaacctacggaagtttctcacccatgatgtcctcactgaactcttctccaaccacttcagcacgcttgtgtaccggaatctgcagatcgccaagaattcctataatgatgccctcctcacgtttgtctggaaactggttgcgaacttccgaagaggcttccggaaggaagacagaaatggccgggacgagatggacatagaactccacgacgtgtctcctattactcggcaccccctgcaagctctcttcatctgggccattcttcagaataagaaggaactctccaaagtcatttgggagcagaccaggggctgcactctggcagccctgggagccagcaagcttctgaagactctggccaaagtgaagaacgacatcaatgctgctggggagtccgaggagctggctaatgagtacgagacccgggctgttgagctgttcactgagtgttacagcagcgatgaagacttggcagaacagctgctggtctattcctgtgaagcttggggtggaagcaactgtctggagctggcggtggaggccacagaccagcatttcatcgcccagcctggggtccagtggtacgtaaatggggtgaattattttactgacctgtggaatgtgatggacacgctggggcttttttacttcatagcaggaattgtatttcggctccactcttctaataaaagctctttgtattctggacgagtcattttctgtctggactacattattttcactctaagattgatccacatttttactgtaagcagaaacttaggacccaagattataatgctgcagaggatgctgatcgatgtgttcttcttcctgttcctctttgcggtgtggatggtggcctttggcgtggccaggcaagggatccttaggcagaatgagcagcgctggaggtggatattccgttcggtcatctacgagccctacctggccatgttcggccaggtgcccagtgacgtggatggtaccacgtatgactttgcccactgcaccttcactgggaatgagtccaagccactgtgtgtggagctggatgagcacaacctgccccggttccccgagtggatcaccatccccctggtgtgcatctacatgttatccaccaacatcctgctggtcaacctgctggtcgccatgtttggctacacggtgggcaccgtccaggagaacaatgaccaggtctggaagttccagaggtacttcctggtgcaggagtactgcagccgcctcaatatccccttccccttcatcgtcttcgcttacttctacatggtggtgaagaagtgcttcaagtgttgctgcaaggagaaaaacatggagtcttctgtctgctgtttcaaaaatgaagacaatgagactctggcatgggagggtgtcatgaaggaaaactaccttgtcaagatcaacacaaaagccaacgacacctcagaggaaatgaggcatcgatttagacaactggatacaaagcttaatgatctcaagggtcttctgaaagagattgctaataaaatcaaataaaactgtatgaactctaatggagaaaaatctaattatagcaagatcatattaaggaatgctgatgaacaattttgctatcgactactaaatgagagattttcagacccctgggtacatggtggatgattttaaatcaccctagtgtgctgagaccttgagaataaagtgtgtgattggtttcatacttgaagacggatataaaggaagaatatttcctttatgtgtttctccagaatggtgcctgtttctctctgtgtctcaatgcctgggactggaggttgatagtttaagtgtgttcttaccgcctcctttttcctttaatcttatttttgatgaacacatatataggagaacatctatcctatgaataagaacctggtcatgctttactcctgtattgttattttgttcatttccaattgattctctacttttcccttttttgtattatgtgactaattagttggcatattgttaaaagtctctcaaattaggccagattctaaaacatgctgcagcaagaggaccccgctctcttcaggaaaagtgttttcatttctcaggatgcttcttacctgtcagaggaggtgacaaggcagtctcttgctctcttggactcaccaggctcctattgaaggaaccacccccattcctaaatatgtgaaaagtcgcccaaaatgcaaccttgaaaggcactactgactttgttcttattggatactcctcttattatttttccattaaaaataatagctggctattatagaaaatttagaccatacagagatgtagaaagaacataaattgtccccattaccttaaggtaatcactgctaacaatttctggatggtttttcaagtctattttttttctatgtatgtctcaattctctttcaaaattttacagaatgttatcatactacatatatactttttatgtaagctttttcacttagtattttatcaaatatgtttttattatattcatagccttcttaaacattatatcaataattgcataataggcaacctctagcgattaccataattttgctcattgaaggctatctccagttgatcattgggatgagcatctttgtgcatgaatcctattgctgtatttgggaaaattttccaaggttagattccaataaatatctatttattattaaatattaaaatatctatttattattaaaaccatttataaggctttttcataaatgtatagcaaataggaattattaacttgagcataagatatgagatacatgaacctgaactattaaaataaaatattatatttaacccttagtttaagaagaagtcaatatgcttatttaaatattatggatggtgggcagatcacttgaggtcaggagttcgagaccagcctggccaacatggcaaaaccacatctctactaaaaataaaaaaattagctgggtgtggtggtgcactcctgtaatcccagctactcagaaggctgaggtacaagaattgctggaacctgggaggcggaggttgcagtgaaccaagattgcaccactgcactccagccggggtgacagagtgagactccgactgaaaataaataaataaataaataaataaataaataaatattatggatggtgaagggaatggtatagaattggagagattatcttactgaacacctgtagtcccagctttctctggaagtggtcgtatttgagcaggatgtgcacaaggcaattgaaatgcccataattagtttctcagctttgaatacactataaactcactggctgaaggaggaaattttagaaggaagctactaaaagatctaatttgaaaaactacaaaagcattaactaaaaaagtttattttccttttgtctgggcagtagtgaaaataactactcacaacattcactatgtttgcaaggaattaacacaaataaaagatgcctttttacttaaacaccaagacagaaaacttgcccaatactgagaagcaacttgcattagagagggaactgttaaatgttttcaacccagttcatctggtggatgtttttgcaggttactctgagaattttgcttatgaaaaatcattatttttagtgtagttcacaataatgtattgaacatacttctaatcaaaggtgctatgtccttgtgtatggtactaaatgtgtcctgtgtacttttgcacaactgagaatcctgcagcttggtttaatgagtgtgttcatgaaataaataatggaggaattgtca

SEQ ID NO: 192820 - DNA, 1592 bp, Homo sapiens
  Payload ID: 18060
  Gene Name: transient receptor potential cation channel, subfamily M, member 8
  ENST ID: ENST00000456930
  CDS Start-End: 1-1131
actgagtgttacagcagcgatgaagacttggcagaacagctgctggtctattcctgtgaagcttggggtggaagcaactgtctggagctggcggtggaggccacagaccagcatttcatcgcccagcctggggtccagtggtacgtaaatggggtgaattattttactgacctgtggaatgtgatggacacgctggggcttttttacttcatagcaggaattgtatttcggctccactcttctaataaaagctctttgtattctggacgagtcattttctgtctggactacattattttcactctaagattgatccacatttttactgtaagcagaaacttaggacccaagattataatgctgcagaggatgctgatcgatgtgttcttcttcctgttcctctttgcggtgtggatggtggcctttggcgtggccaggcaagggatccttaggcagaatgagcagcgctggaggtggatattccgttcggtcatctacgagccctacctggccatgttcggccaggtgcccagtgacgtggatggtaccacgtatgactttgcccactgcaccttcactgggaatgagtccaagccactgtgtgtggagctggatgagcacaacctgccccggttccccgagtggatcaccatccccctggtgtgcatctacatgttatccaccaacatcctgctggtcaacctgctggtcgccatgtttggctacacggtgggcaccgtccaggagaacaatgaccaggtctggaagttccagaggtacttcctggtgcaggagtactgcagccgcctcaatatccccttccccttcatcgtcttcgcttacttctacatggtggtgaagaagtgcttcaagtgttgctgcaaggagaaaaacatggagtcttctgtctgctgtttcaaaaatgaagacaatgagactctggcatgggagggtgtcatgaaggaaaactaccttgtcaagatcaacacaaaagccaacgacacctcagaggaaatgaggcatcgatttagacaactggatacaaagatcatattaaggaatgctgatgaacaattttgctatcgactactaaatgagagattttcagacccctgggtacatggtggatgattttaaatcaccctagtgtgctgagaccttgagaataaagtgtgtgattggtttcatacttgaagacggatataaaggaagaatatttcctttatgtgtttctccagaatggtgcctgtttctctctgtgtctcaatgcctgggactggaggttgatagtttaagtgtgttcttaccgcctcctttttcctttaatcttatttttgatgaacacatatataggagaacatctatcctatgaataagaacctggtcatgctttactcctgtattgttattttgttcatttccaattgattctctacttttcccttttttgtattatgtgactaattagttggcatattgttaaaagtctctcaaattaggccagattctaaaacatgctgcagcaagaggaccccgctctcttcaggaaaagtgttttcatttctcaggatgcttcttacctgtcagaggag

SEQ ID NO: 192821 - DNA, 2340 bp, Homo sapiens
  Payload ID: 18061
  Gene Name: transient receptor potential cation channel, subfamily V, member 1
  ENST ID: ENST00000310522
  CDS Start-End: 1-2340
atgaagaaatggagcagcacagacttgggggcagctgcggacccactccaaaaggacacctgcccagaccccctggatggagaccctaactccaggccacctccagccaagccccagctctccacggccaagagccgcacccggctctttgggaagggtgactcggaggaggctttcccggtggattgccctcacgaggaaggtgagctggactcctgcccgaccatcacagtcagccctgttatcaccatccagaggccaggagacggccccaccggtgccaggctgctgtcccaggactctgtcgccgccagcaccgagaagaccctcaggctctatgatcgcaggagtatctttgaagccgttgctcagaataactgccaggatctggagagcctgctgctcttcctgcagaagagcaagaagcacctcacagacaacgagttcaaagaccctgagacagggaagacctgtctgctgaaagccatgctcaacctgcacgacggacagaacaccaccatccccctgctcctggagatcgcgcggcaaacggacagcctgaaggagcttgtcaacgccagctacacggacagctactacaagggccagacagcactgcacatcgccatcgagagacgcaacatggccctggtgaccctcctggtggagaacggagcagacgtccaggctgcggcccatggggacttctttaagaaaaccaaagggcggcctggattctacttcggtgaactgcccctgtccctggccgcgtgcaccaaccagctgggcatcgtgaagttcctgctgcagaactcctggcagacggccgacatcagcgccagggactcggtgggcaacacggtgctgcacgccctggtggaggtggccgacaacacggccgacaacacgaagtttgtgacgagcatgtacaatgagattctgatgctgggggccaaactgcacccgacgctgaagctggaggagctcaccaacaagaagggaatgacgccgctggctctggcagctgggaccgggaagatcgggaatcgccacgacatgctcttggtggagccgctgaaccgactcctgcaggacaagtgggacagattcgtcaagcgcatcttctacttcaacttcctggtctactgcctgtacatgatcatcttcaccatggctgcctactacaggcccgtggatggcttgcctccctttaagatggaaaaaactggagactatttccgagttactggagagatcctgtctgtgttaggaggagtctacttctttttccgagggattcagtatttcctgcagaggcggccgtcgatgaagaccctgtttgtggacagctacagtgagatgcttttctttctgcagtcactgttcatgctggccaccgtggtgctgtacttcagccacctcaaggagtatgtggcttccatggtattctccctggccttgggctggaccaacatgctctactacacccgcggtttccagcagatgggcatctatgccgtcatgatagagaagatgatcctgagagacctgtgccgtttcatgtttgtctacatcgtcttcttgttcgggttttccacagcggtggtgacgctgattgaagacgggaagaatgactccctgccgtctgagtccacgtcgcacaggtggcgggggcctgcctgcaggccccccgatagctcctacaacagcctgtactccacctgcctggagctgttcaagttcaccatcggcatgggcgacctggagttcactgagaactatgacttcaaggctgtcttcatcatcctgctgctggcctatgtaattctcacctacatcctcctgctcaacatgctcatcgccctcatgggtgagactgtcaacaagatcgcacaggagagcaagaacatctggaagctgcagagagccatcaccatcctggacacggagaagagcttccttaagtgcatgaggaaggccttccgctcaggcaagctgctgcaggtggggtacacacctgatggcaaggacgactaccggtggtgcttcagggtggacgaggtgaactggaccacctggaacaccaacgtgggcatcatcaacgaagacccgggcaactgtgagggcgtcaagcgcaccctgagcttctccctgcggtcaagcagagtttcaggcagacactggaagaactttgccctggtcccccttttaagagaggcaagtgctcgagataggcagtctgctcagcccgaggaagtttatctgcgacagttttcagggtctctgaagccagaggacgctgaggtcttcaagagtcctgccgcttccggggagaagtga

SEQ ID NO: 192822 - DNA, 4068 bp, Homo sapiens
  Payload ID: 18061
  Gene Name: transient receptor potential cation channel, subfamily V, member 1
  Uniprot ID: Q8NER1
  ENST ID: ENST00000399756
  CDS Start-End: 528-3047
ctgccgctcaccctattccagggacacagtctgcttggctcttctggactgagccatcctcatcaccgagatcctccctgaattcagcccacgacagccaccccggccgttttccttgttctgtgtggggagggaggcagcgcggtggttatcaacctcaccctgcagaggaggcacctgaggcccagagacgaggagggatgggtctaacccagaaccacagatggctctgagccgggggcctgtccaccctcccaggccgacgtcagtggccgcaggactgcctgggccctgctaggcctgctcacctctgaggcctctggggtgagaggttcagtcctggaaacacttcagttctagggggctgggggcagcagcaagttggagttttggggtaccctgcttcacagggcccttggcaaggagggcaggtggggtctaaggacaagcagtccttactttgggagtcaaccccggcgtggtggctgctgcaggttgcacactgggccacagaggatccagcaaggatgaagaaatggagcagcacagacttgggggcagctgcggacccactccaaaaggacacctgcccagaccccctggatggagaccctaactccaggccacctccagccaagccccagctctccacggccaagagccgcacccggctctttgggaagggtgactcggaggaggctttcccggtggattgccctcacgaggaaggtgagctggactcctgcccgaccatcacagtcagccctgttatcaccatccagaggccaggagacggccccaccggtgccaggctgctgtcccaggactctgtcgccgccagcaccgagaagaccctcaggctctatgatcgcaggagtatctttgaagccgttgctcagaataactgccaggatctggagagcctgctgctcttcctgcagaagagcaagaagcacctcacagacaacgagttcaaagaccctgagacagggaagacctgtctgctgaaagccatgctcaacctgcacgacggacagaacaccaccatccccctgctcctggagatcgcgcggcaaacggacagcctgaaggagcttgtcaacgccagctacacggacagctactacaagggccagacagcactgcacatcgccatcgagagacgcaacatggccctggtgaccctcctggtggagaacggagcagacgtccaggctgcggcccatggggacttctttaagaaaaccaaagggcggcctggattctacttcggtgaactgcccctgtccctggccgcgtgcaccaaccagctgggcatcgtgaagttcctgctgcagaactcctggcagacggccgacatcagcgccagggactcggtgggcaacacggtgctgcacgccctggtggaggtggccgacaacacggccgacaacacgaagtttgtgacgagcatgtacaatgagattctgatgctgggggccaaactgcacccgacgctgaagctggaggagctcaccaacaagaagggaatgacgccgctggctctggcagctgggaccgggaagatcggggtcttggcctatattctccagcgggagatccaggagcccgagtgcaggcacctgtccaggaagttcaccgagtgggcctacgggcccgtgcactcctcgctgtacgacctgtcctgcatcgacacctgcgagaagaactcggtgctggaggtgatcgcctacagcagcagcgagacccctaatcgccacgacatgctcttggtggagccgctgaaccgactcctgcaggacaagtgggacagattcgtcaagcgcatcttctacttcaacttcctggtctactgcctgtacatgatcatcttcaccatggctgcctactacaggcccgtggatggcttgcctccctttaagatggaaaaaactggagactatttccgagttactggagagatcctgtctgtgttaggaggagtctacttctttttccgagggattcagtatttcctgcagaggcggccgtcgatgaagaccctgtttgtggacagctacagtgagatgcttttctttctgcagtcactgttcatgctggccaccgtggtgctgtacttcagccacctcaaggagtatgtggcttccatggtattctccctggccttgggctggaccaacatgctctactacacccgcggtttccagcagatgggcatctatgccgtcatgatagagaagatgatcctgagagacctgtgccgtttcatgtttgtctacatcgtcttcttgttcgggttttccacagcggtggtgacgctgattgaagacgggaagaatgactccctgccgtctgagtccacgtcgcacaggtggcgggggcctgcctgcaggccccccgatagctcctacaacagcctgtactccacctgcctggagctgttcaagttcaccatcggcatgggcgacctggagttcactgagaactatgacttcaaggctgtcttcatcatcctgctgctggcctatgtaattctcacctacatcctcctgctcaacatgctcatcgccctcatgggtgagactgtcaacaagatcgcacaggagagcaagaacatctggaagctgcagagagccatcaccatcctggacacggagaagagcttccttaagtgcatgaggaaggccttccgctcaggcaagctgctgcaggtggggtacacacctgatggcaaggacgactaccggtggtgcttcagggtggacgaggtgaactggaccacctggaacaccaacgtgggcatcatcaacgaagacccgggcaactgtgagggcgtcaagcgcaccctgagcttctccctgcggtcaagcagagtttcaggcagacactggaagaactttgccctggtcccccttttaagagaggcaagtgctcgagataggcagtctgctcagcccgaggaagtttatctgcgacagttttcagggtctctgaagccagaggacgctgaggtcttcaagagtcctgccgcttccggggagaagtgaggacgtcacgcagacagcactgtcaacactgggccttaggagaccccgttgccacggggggctgctgagggaacaccagtgctctgtcagcagcctggcctggtctgtgcctgcccagcatgttcccaaatctgtgctggacaagctgtgggaagcgttcttggaagcatggggagtgatgtacatccaaccgtcactgtccccaagtgaatctcctaacagactttcaggtttttactcactttactaaacagtttggatggtcagtctctactgggacatgttaggcccttgttttctttgattttattcttttttttgagacagaatttcactcttctcacccaggctggaatgcagtggcacaattttggctccctgcaacctccgcctcctggattccagcaattctcctgcctcggcttcccaagtagctgggattacaggcacgtgccaccatgtctggctaattttttgtatttttttaatagatatggggtttcgccatgttggccaggctggtctcgaactcctgacctcaggtgatccgcccacctcggcctcccaaagtgctgggattacaggtgtgagcctccacacctggctgttttctttgattttattctttttttttttttctgtgagacagagtttcactcttgttgcccaggctggagtgcagtggtgtgatcttggctcactgcaacttctgcctcccgggttcaagcgattcttctgcttcagtctcccaagtagcttggattacaggtgagcactaccacgcccggctaatttttgtatttttaatagagacggggtttcaccatgttggccaggctggtctcgaactcttgacctcaggtgatctgcccgccttggcctcccaaagtgctgggattacaggtgtgagccgctgcgctcggccttctttgattttatattattaggagcaaaagtaaatgaagcccaggaaaacacctttgggaacaaactcttcctttgatggaaaatgcagaggccc

SEQ ID NO: 192823 - DNA, 4092 bp, Homo sapiens
  Payload ID: 18061
  Gene Name: transient receptor potential cation channel, subfamily V, member 1
  Uniprot ID: Q8NER1
  ENST ID: ENST00000399759
  CDS Start-End: 202-2721
gcagagtgtgcagtatagattcagcgtttgtcgactgactgaatgatagcacaatcccggctgcttcctgttggctgggtttggttggactgggacccgtcagaggaaaaggcaacgccgctgacaaagaacattgccgaaaggttcatgggaggctccggctaacaggttgcacactgggccacagaggatccagcaaggatgaagaaatggagcagcacagacttgggggcagctgcggacccactccaaaaggacacctgcccagaccccctggatggagaccctaactccaggccacctccagccaagccccagctctccacggccaagagccgcacccggctctttgggaagggtgactcggaggaggctttcccggtggattgccctcacgaggaaggtgagctggactcctgcccgaccatcacagtcagccctgttatcaccatccagaggccaggagacggccccaccggtgccaggctgctgtcccaggactctgtcgccgccagcaccgagaagaccctcaggctctatgatcgcaggagtatctttgaagccgttgctcagaataactgccaggatctggagagcctgctgctcttcctgcagaagagcaagaagcacctcacagacaacgagttcaaagaccctgagacagggaagacctgtctgctgaaagccatgctcaacctgcacgacggacagaacaccaccatccccctgctcctggagatcgcgcggcaaacggacagcctgaaggagcttgtcaacgccagctacacggacagctactacaagggccagacagcactgcacatcgccatcgagagacgcaacatggccctggtgaccctcctggtggagaacggagcagacgtccaggctgcggcccatggggacttctttaagaaaaccaaagggcggcctggattctacttcggtgaactgcccctgtccctggccgcgtgcaccaaccagctgggcatcgtgaagttcctgctgcagaactcctggcagacggccgacatcagcgccagggactcggtgggcaacacggtgctgcacgccctggtggaggtggccgacaacacggccgacaacacgaagtttgtgacgagcatgtacaatgagattctgatgctgggggccaaactgcacccgacgctgaagctggaggagctcaccaacaagaagggaatgacgccgctggctctggcagctgggaccgggaagatcggggtcttggcctatattctccagcgggagatccaggagcccgagtgcaggcacctgtccaggaagttcaccgagtgggcctacgggcccgtgcactcctcgctgtacgacctgtcctgcatcgacacctgcgagaagaactcggtgctggaggtgatcgcctacagcagcagcgagacccctaatcgccacgacatgctcttggtggagccgctgaaccgactcctgcaggacaagtgggacagattcgtcaagcgcatcttctacttcaacttcctggtctactgcctgtacatgatcatcttcaccatggctgcctactacaggcccgtggatggcttgcctccctttaagatggaaaaaactggagactatttccgagttactggagagatcctgtctgtgttaggaggagtctacttctttttccgagggattcagtatttcctgcagaggcggccgtcgatgaagaccctgtttgtggacagctacagtgagatgcttttctttctgcagtcactgttcatgctggccaccgtggtgctgtacttcagccacctcaaggagtatgtggcttccatggtattctccctggccttgggctggaccaacatgctctactacacccgcggtttccagcagatgggcatctatgccgtcatgatagagaagatgatcctgagagacctgtgccgtttcatgtttgtctacatcgtcttcttgttcgggttttccacagcggtggtgacgctgattgaagacgggaagaatgactccctgccgtctgagtccacgtcgcacaggtggcgggggcctgcctgcaggccccccgatagctcctacaacagcctgtactccacctgcctggagctgttcaagttcaccatcggcatgggcgacctggagttcactgagaactatgacttcaaggctgtcttcatcatcctgctgctggcctatgtaattctcacctacatcctcctgctcaacatgctcatcgccctcatgggtgagactgtcaacaagatcgcacaggagagcaagaacatctggaagctgcagagagccatcaccatcctggacacggagaagagcttccttaagtgcatgaggaaggccttccgctcaggcaagctgctgcaggtggggtacacacctgatggcaaggacgactaccggtggtgcttcagggtggacgaggtgaactggaccacctggaacaccaacgtgggcatcatcaacgaagacccgggcaactgtgagggcgtcaagcgcaccctgagcttctccctgcggtcaagcagagtttcaggcagacactggaagaactttgccctggtcccccttttaagagaggcaagtgctcgagataggcagtctgctcagcccgaggaagtttatctgcgacagttttcagggtctctgaagccagaggacgctgaggtcttcaagagtcctgccgcttccggggagaagtgaggacgtcacgcagacagcactgtcaacactgggccttaggagaccccgttgccacggggggctgctgagggaacaccagtgctctgtcagcagcctggcctggtctgtgcctgcccagcatgttcccaaatctgtgctggacaagctgtgggaagcgttcttggaagcatggggagtgatgtacatccaaccgtcactgtccccaagtgaatctcctaacagactttcaggtttttactcactttactaaacagtttggatggtcagtctctactgggacatgttaggcccttgttttctttgattttattcttttttttgagacagaatttcactcttctcacccaggctggaatgcagtggcacaattttggctccctgcaacctccgcctcctggattccagcaattctcctgcctcggcttcccaagtagctgggattacaggcacgtgccaccatgtctggctaattttttgtatttttttaatagatatggggtttcgccatgttggccaggctggtctcgaactcctgacctcaggtgatccgcccacctcggcctcccaaagtgctgggattacaggtgtgagcctccacacctggctgttttctttgattttattctttttttttttttctgtgagacagagtttcactcttgttgcccaggctggagtgcagtggtgtgatcttggctcactgcaacttctgcctcccgggttcaagcgattcttctgcttcagtctcccaagtagcttggattacaggtgagcactaccacgcccggctaatttttgtatttttaatagagacggggtttcaccatgttggccaggctggtctcgaactcttgacctcaggtgatctgcccgccttggcctcccaaagtgctgggattacaggtgtgagccgctgcgctcggccttctttgattttatattattaggagcaaaagtaaatgaagcccaggaaaacacctttgggaacaaactcttcctttgatggaaaatgcagaggcccttcctctctgtgccgtgcttgctcctcttacctgcccgggtggtttgggggtgttggtgtttcctccctggagaagatgggggaggctgtcccactcccagctctggcagaatcaagctgttgcagcagtgccttcttcatccttccttacgatcaatcacagtctccagaagatcagctcaattgctgtgcaggttaaaactacagaaccacatcccaaaggtacctggtaagaatgtttgaaagatcttccatttctaggaaccccagtcctgcttctccgcaatggcacatgcttccactccatccatactggcatcctcaaataaacagatatgtatacatatata

SEQ ID NO: 192824 - DNA, 2607 bp, Homo sapiens
  Payload ID: 18061
  Gene Name: transient receptor potential cation channel, subfamily V, member 1
  ENST ID: ENST00000425167
  CDS Start-End: 18-2570
cagaggatccagcaaggatgaagaaatggagcagcacagacttgggggcagctgcggacccactccaaaaggacacctgcccagaccccctggatggagaccctaactccaggccacctccagccaagccccagctctccacggccaagagccgcacccggctctttgggaagggtgactcggaggaggctttcccggtggattgccctcacgaggaaggtgagctggactcctgcccgaccatcacagtcagccctgttatcaccatccagaggccaggagacggccccaccggtgccaggctgctgtcccaggactctgtcgccgccagcaccgagaagaccctcaggctctatgatcgcaggagtatctttgaagccgttgctcagaataactgccaggatctggagagcctgctgctcttcctgcagaagagcaagaagcacctcacagacaacgagttcaaagaccctgagacagggaagacctgtctgctgaaagccatgctcaacctgcacgacggacagaacaccaccatccccctgctcctggagatcgcgcggcaaacggacagcctgaaggagcttgtcaacgccagctacacggacagctactacaagggccagacagcactgcacatcgccatcgagagacgcaacatggccctggtgaccctcctggtggagaacggagcagacgtccaggctgcggcccatggggacttctttaagaaaaccaaagggcggcctggattctacttcggtgaactgcccctgtccctggccgcgtgcaccaaccagctgggcatcgtgaagttcctgctgcagaactcctggcagacggccgacatcagcgccagggactcggtgggcaacacggtgctgcacgccctggtggaggtggccgacaacacggccgacaacacgaagtttgtgacgagcatgtacaatgagattctgatgctgggggccaaactgcacccgacgctgaagctggaggagctcaccaacaagaagggaatgacgccgctggctctggcagctgggaccgggaagatcggggttatcgagaatggaccaccgctgtccttcatggtcttggcctatattctccagcgggagatccaggagcccgagtgcaggcacctgtccaggaagttcaccgagtgggcctacgggcccgtgcactcctcgctgtacgacctgtcctgcatcgacacctgcgagaagaactcggtgctggaggtgatcgcctacagcagcagcgagacccctaatcgccacgacatgctcttggtggagccgctgaaccgactcctgcaggacaagtgggacagattcgtcaagcgcatcttctacttcaacttcctggtctactgcctgtacatgatcatcttcaccatggctgcctactacaggcccgtggatggcttgcctccctttaagatggaaaaaactggagactatttccgagttactggagagatcctgtctgtgttaggaggagtctacttctttttccgagggattcagtatttcctgcagaggcggccgtcgatgaagaccctgtttgtggacagctacagtgagatgcttttctttctgcagtcactgttcatgctggccaccgtggtgctgtacttcagccacctcaaggagtatgtggcttccatggtattctccctggccttgggctggaccaacatgctctactacacccgcggtttccagcagatgggcatctatgccgtcatgatagagaagatgatcctgagagacctgtgccgtttcatgtttgtctacatcgtcttcttgttcgggttttccacagcggtggtgacgctgattgaagacgggaagaatgactccctgccgtctgagtccacgtcgcacaggtggcgggggcctgcctgcaggccccccgatagctcctacaacagcctgtactccacctgcctggagctgttcaagttcaccatcggcatgggcgacctggagttcactgagaactatgacttcaaggctgtcttcatcatcctgctgctggcctatgtaattctcacctacatcctcctgctcaacatgctcatcgccctcatgggtgagactgtcaacaagatcgcacaggagagcaagaacatctggaagctgcagagagccatcaccatcctggacacggagaagagcttccttaagtgcatgaggaaggccttccgctcaggcaagctgctgcaggtggggtacacacctgatggcaaggacgactaccggtggtgcttcagggtggacgaggtgaactggaccacctggaacaccaacgtgggcatcatcaacgaagacccgggcaactgtgagggcgtcaagcgcaccctgagcttctccctgcggtcaagcagagtttcaggcagacactggaagaactttgccctggtcccccttttaagagaggcaagtgctcgagataggcagtctgctcagcccgaggaagtttatctgcgacagttttcagggtctctgaagccagaggacgctgaggtcttcaagagtcctgccgcttccggggagaagtgaggacgtcacgcagacagcactgtcaacactgggcctt

SEQ ID NO: 192825 - DNA, 2525 bp, Homo sapiens
  Payload ID: 18061
  Gene Name: transient receptor potential cation channel, subfamily V, member 1
  ENST ID: ENST00000576351
  CDS Start-End: 34-2523
gttgcacactgggccacagaggatccagcaaggatgaagaaatggagcagcacagacttgggggcagctgcggacccactccaaaaggacacctgcccagaccccctggatggagaccctaactccaggccacctccagccaagccccagctctccacggccaagagccgcacccggctctttgggaagggtgactcggaggaggctttcccggtggattgccctcacgaggaaggtgagctggactcctgcccgaccatcacagtcagccctgttatcaccatccagaggccaggagacggccccaccggtgccaggctgctgtcccaggactctgtcgccgccagcaccgagaagaccctcaggctctatgatcgcaggagtatctttgaagccgttgctcagaataactgccaggatctggagagcctgctgctcttcctgcagaagagcaagaagcacctcacagacaacgagttcaaagaccctgagacagggaagacctgtctgctgaaagccatgctcaacctgcacgacggacagaacaccaccatccccctgctcctggagatcgcgcggcaaacggacagcctgaaggagcttgtcaacgccagctacacggacagctactacaagggccagacagcactgcacatcgccatcgagagacgcaacatggccctggtgaccctcctggtggagaacggagcagacgtccaggctgcggcccatggggacttctttaagaaaaccaaagggcggcctggattctacttcggtgaactgcccctgtccctggccgcgtgcaccaaccagctgggcatcgtgaagttcctgctgcagaactcctggcagacggccgacatcagcgccagggactcggtgggcaacacggtgctgcacgccctggtggaggtggccgacaacacggccgacaacacgaagtttgtgacgagcatgtacaatgagattctgatgctgggggccaaactgcacccgacgctgaagctggaggagctcaccaacaagaagggaatgacgccgctggctctggcagctgggaccgggaagatcggggtcttggcctatattctccagcgggagatccaggagcccgagtgcaggcacctgtccaggaagttcaccgagtgggcctacgggcccgtgcactcctcgctgtacgacctgtcctgcatcgacacctgcgagaagaactcggtgctggagaatcgccacgacatgctcttggtggagccgctgaaccgactcctgcaggacaagtgggacagattcgtcaagcgcatcttctacttcaacttcctggtctactgcctgtacatgatcatcttcaccatggctgcctactacaggcccgtggatggcttgcctccctttaagatggaaaaaactggagactatttccgagttactggagagatcctgtctgtgttaggaggagtctacttctttttccgagggattcagtatttcctgcagaggcggccgtcgatgaagaccctgtttgtggacagctacagtgagatgcttttctttctgcagtcactgttcatgctggccaccgtggtgctgtacttcagccacctcaaggagtatgtggcttccatggtattctccctggccttgggctggaccaacatgctctactacacccgcggtttccagcagatgggcatctatgccgtcatgatagagaagatgatcctgagagacctgtgccgtttcatgtttgtctacatcgtcttcttgttcgggttttccacagcggtggtgacgctgattgaagacgggaagaatgactccctgccgtctgagtccacgtcgcacaggtggcgggggcctgcctgcaggccccccgatagctcctacaacagcctgtactccacctgcctggagctgttcaagttcaccatcggcatgggcgacctggagttcactgagaactatgacttcaaggctgtcttcatcatcctgctgctggcctatgtaattctcacctacatcctcctgctcaacatgctcatcgccctcatgggtgagactgtcaacaagatcgcacaggagagcaagaacatctggaagctgcagagagccatcaccatcctggacacggagaagagcttccttaagtgcatgaggaaggccttccgctcaggcaagctgctgcaggtggggtacacacctgatggcaaggacgactaccggtggtgcttcagggtggacgaggtgaactggaccacctggaacaccaacgtgggcatcatcaacgaagacccgggcaactgtgagggcgtcaagcgcaccctgagcttctccctgcggtcaagcagagtttcaggcagacactggaagaactttgccctggtcccccttttaagagaggcaagtgctcgagataggcagtctgctcagcccgaggaagtttatctgcgacagttttcagggtctctgaagccagaggacgctgaggtcttcaagagtcctgccgcttccggggagaagtgagg

SEQ ID NO: 192826 - DNA, 4166 bp, Homo sapiens
  Payload ID: 18061
  Gene Name: transient receptor potential cation channel, subfamily V, member 1
  Uniprot ID: Q8NER1
  ENST ID: ENST00000572705
  CDS Start-End: 276-2795
ggctcaggcaggcctggcccagagtcacgctggcaaccacgagtttgggaagcagtcgtattctctctctctctctctctctctctctcagtatccatgacagtgtgatggagagtctctgccgtgccatctgggatgcaaaccgtccctgtgttccccacgtccaggccgtagatgctccccgccggtcagtcacttagtcgtcagatcgcccgtcctggtatcacagtgcttctgttcaggttgcacactgggccacagaggatccagcaaggatgaagaaatggagcagcacagacttgggggcagctgcggacccactccaaaaggacacctgcccagaccccctggatggagaccctaactccaggccacctccagccaagccccagctctccacggccaagagccgcacccggctctttgggaagggtgactcggaggaggctttcccggtggattgccctcacgaggaaggtgagctggactcctgcccgaccatcacagtcagccctgttatcaccatccagaggccaggagacggccccaccggtgccaggctgctgtcccaggactctgtcgccgccagcaccgagaagaccctcaggctctatgatcgcaggagtatctttgaagccgttgctcagaataactgccaggatctggagagcctgctgctcttcctgcagaagagcaagaagcacctcacagacaacgagttcaaagaccctgagacagggaagacctgtctgctgaaagccatgctcaacctgcacgacggacagaacaccaccatccccctgctcctggagatcgcgcggcaaacggacagcctgaaggagcttgtcaacgccagctacacggacagctactacaagggccagacagcactgcacatcgccatcgagagacgcaacatggccctggtgaccctcctggtggagaacggagcagacgtccaggctgcggcccatggggacttctttaagaaaaccaaagggcggcctggattctacttcggtgaactgcccctgtccctggccgcgtgcaccaaccagctgggcatcgtgaagttcctgctgcagaactcctggcagacggccgacatcagcgccagggactcggtgggcaacacggtgctgcacgccctggtggaggtggccgacaacacggccgacaacacgaagtttgtgacgagcatgtacaatgagattctgatgctgggggccaaactgcacccgacgctgaagctggaggagctcaccaacaagaagggaatgacgccgctggctctggcagctgggaccgggaagatcggggtcttggcctatattctccagcgggagatccaggagcccgagtgcaggcacctgtccaggaagttcaccgagtgggcctacgggcccgtgcactcctcgctgtacgacctgtcctgcatcgacacctgcgagaagaactcggtgctggaggtgatcgcctacagcagcagcgagacccctaatcgccacgacatgctcttggtggagccgctgaaccgactcctgcaggacaagtgggacagattcgtcaagcgcatcttctacttcaacttcctggtctactgcctgtacatgatcatcttcaccatggctgcctactacaggcccgtggatggcttgcctccctttaagatggaaaaaactggagactatttccgagttactggagagatcctgtctgtgttaggaggagtctacttctttttccgagggattcagtatttcctgcagaggcggccgtcgatgaagaccctgtttgtggacagctacagtgagatgcttttctttctgcagtcactgttcatgctggccaccgtggtgctgtacttcagccacctcaaggagtatgtggcttccatggtattctccctggccttgggctggaccaacatgctctactacacccgcggtttccagcagatgggcatctatgccgtcatgatagagaagatgatcctgagagacctgtgccgtttcatgtttgtctacatcgtcttcttgttcgggttttccacagcggtggtgacgctgattgaagacgggaagaatgactccctgccgtctgagtccacgtcgcacaggtggcgggggcctgcctgcaggccccccgatagctcctacaacagcctgtactccacctgcctggagctgttcaagttcaccatcggcatgggcgacctggagttcactgagaactatgacttcaaggctgtcttcatcatcctgctgctggcctatgtaattctcacctacatcctcctgctcaacatgctcatcgccctcatgggtgagactgtcaacaagatcgcacaggagagcaagaacatctggaagctgcagagagccatcaccatcctggacacggagaagagcttccttaagtgcatgaggaaggccttccgctcaggcaagctgctgcaggtggggtacacacctgatggcaaggacgactaccggtggtgcttcagggtggacgaggtgaactggaccacctggaacaccaacgtgggcatcatcaacgaagacccgggcaactgtgagggcgtcaagcgcaccctgagcttctccctgcggtcaagcagagtttcaggcagacactggaagaactttgccctggtcccccttttaagagaggcaagtgctcgagataggcagtctgctcagcccgaggaagtttatctgcgacagttttcagggtctctgaagccagaggacgctgaggtcttcaagagtcctgccgcttccggggagaagtgaggacgtcacgcagacagcactgtcaacactgggccttaggagaccccgttgccacggggggctgctgagggaacaccagtgctctgtcagcagcctggcctggtctgtgcctgcccagcatgttcccaaatctgtgctggacaagctgtgggaagcgttcttggaagcatggggagtgatgtacatccaaccgtcactgtccccaagtgaatctcctaacagactttcaggtttttactcactttactaaacagtttggatggtcagtctctactgggacatgttaggcccttgttttctttgattttattcttttttttgagacagaatttcactcttctcacccaggctggaatgcagtggcacaattttggctccctgcaacctccgcctcctggattccagcaattctcctgcctcggcttcccaagtagctgggattacaggcacgtgccaccatgtctggctaattttttgtatttttttaatagatatggggtttcgccatgttggccaggctggtctcgaactcctgacctcaggtgatccgcccacctcggcctcccaaagtgctgggattacaggtgtgagcctccacacctggctgttttctttgattttattctttttttttttttctgtgagacagagtttcactcttgttgcccaggctggagtgcagtggtgtgatcttggctcactgcaacttctgcctcccgggttcaagcgattcttctgcttcagtctcccaagtagcttggattacaggtgagcactaccacgcccggctaatttttgtatttttaatagagacggggtttcaccatgttggccaggctggtctcgaactcttgacctcaggtgatctgcccgccttggcctcccaaagtgctgggattacaggtgtgagccgctgcgctcggccttctttgattttatattattaggagcaaaagtaaatgaagcccaggaaaacacctttgggaacaaactcttcctttgatggaaaatgcagaggcccttcctctctgtgccgtgcttgctcctcttacctgcccgggtggtttgggggtgttggtgtttcctccctggagaagatgggggaggctgtcccactcccagctctggcagaatcaagctgttgcagcagtgccttcttcatccttccttacgatcaatcacagtctccagaagatcagctcaattgctgtgcaggttaaaactacagaaccacatcccaaaggtacctggtaagaatgtttgaaagatcttccatttctaggaaccccagtcctgcttctccgcaatggcacatgcttccactccatccatactggcatcctcaaataaacagatatgtatacatatata

SEQ ID NO: 192827 - DNA, 4105 bp, Homo sapiens
  Payload ID: 18061
  Gene Name: transient receptor potential cation channel, subfamily V, member 1
  Uniprot ID: Q8NER1
  ENST ID: ENST00000571088
  CDS Start-End: 215-2734
ccgaagggcgtccacagcgactcctgctagtgcagggcagctgctgccagggccgggcccgggaccccacggaggcggggagaccactcttctcccacacgagcccagctctcccttcgagtagcaaccgccttcaagctcacaagcacccgtgggcctggggtgtgcctgcgtctagctggttgcacactgggccacagaggatccagcaaggatgaagaaatggagcagcacagacttgggggcagctgcggacccactccaaaaggacacctgcccagaccccctggatggagaccctaactccaggccacctccagccaagccccagctctccacggccaagagccgcacccggctctttgggaagggtgactcggaggaggctttcccggtggattgccctcacgaggaaggtgagctggactcctgcccgaccatcacagtcagccctgttatcaccatccagaggccaggagacggccccaccggtgccaggctgctgtcccaggactctgtcgccgccagcaccgagaagaccctcaggctctatgatcgcaggagtatctttgaagccgttgctcagaataactgccaggatctggagagcctgctgctcttcctgcagaagagcaagaagcacctcacagacaacgagttcaaagaccctgagacagggaagacctgtctgctgaaagccatgctcaacctgcacgacggacagaacaccaccatccccctgctcctggagatcgcgcggcaaacggacagcctgaaggagcttgtcaacgccagctacacggacagctactacaagggccagacagcactgcacatcgccatcgagagacgcaacatggccctggtgaccctcctggtggagaacggagcagacgtccaggctgcggcccatggggacttctttaagaaaaccaaagggcggcctggattctacttcggtgaactgcccctgtccctggccgcgtgcaccaaccagctgggcatcgtgaagttcctgctgcagaactcctggcagacggccgacatcagcgccagggactcggtgggcaacacggtgctgcacgccctggtggaggtggccgacaacacggccgacaacacgaagtttgtgacgagcatgtacaatgagattctgatgctgggggccaaactgcacccgacgctgaagctggaggagctcaccaacaagaagggaatgacgccgctggctctggcagctgggaccgggaagatcggggtcttggcctatattctccagcgggagatccaggagcccgagtgcaggcacctgtccaggaagttcaccgagtgggcctacgggcccgtgcactcctcgctgtacgacctgtcctgcatcgacacctgcgagaagaactcggtgctggaggtgatcgcctacagcagcagcgagacccctaatcgccacgacatgctcttggtggagccgctgaaccgactcctgcaggacaagtgggacagattcgtcaagcgcatcttctacttcaacttcctggtctactgcctgtacatgatcatcttcaccatggctgcctactacaggcccgtggatggcttgcctccctttaagatggaaaaaactggagactatttccgagttactggagagatcctgtctgtgttaggaggagtctacttctttttccgagggattcagtatttcctgcagaggcggccgtcgatgaagaccctgtttgtggacagctacagtgagatgcttttctttctgcagtcactgttcatgctggccaccgtggtgctgtacttcagccacctcaaggagtatgtggcttccatggtattctccctggccttgggctggaccaacatgctctactacacccgcggtttccagcagatgggcatctatgccgtcatgatagagaagatgatcctgagagacctgtgccgtttcatgtttgtctacatcgtcttcttgttcgggttttccacagcggtggtgacgctgattgaagacgggaagaatgactccctgccgtctgagtccacgtcgcacaggtggcgggggcctgcctgcaggccccccgatagctcctacaacagcctgtactccacctgcctggagctgttcaagttcaccatcggcatgggcgacctggagttcactgagaactatgacttcaaggctgtcttcatcatcctgctgctggcctatgtaattctcacctacatcctcctgctcaacatgctcatcgccctcatgggtgagactgtcaacaagatcgcacaggagagcaagaacatctggaagctgcagagagccatcaccatcctggacacggagaagagcttccttaagtgcatgaggaaggccttccgctcaggcaagctgctgcaggtggggtacacacctgatggcaaggacgactaccggtggtgcttcagggtggacgaggtgaactggaccacctggaacaccaacgtgggcatcatcaacgaagacccgggcaactgtgagggcgtcaagcgcaccctgagcttctccctgcggtcaagcagagtttcaggcagacactggaagaactttgccctggtcccccttttaagagaggcaagtgctcgagataggcagtctgctcagcccgaggaagtttatctgcgacagttttcagggtctctgaagccagaggacgctgaggtcttcaagagtcctgccgcttccggggagaagtgaggacgtcacgcagacagcactgtcaacactgggccttaggagaccccgttgccacggggggctgctgagggaacaccagtgctctgtcagcagcctggcctggtctgtgcctgcccagcatgttcccaaatctgtgctggacaagctgtgggaagcgttcttggaagcatggggagtgatgtacatccaaccgtcactgtccccaagtgaatctcctaacagactttcaggtttttactcactttactaaacagtttggatggtcagtctctactgggacatgttaggcccttgttttctttgattttattcttttttttgagacagaatttcactcttctcacccaggctggaatgcagtggcacaattttggctccctgcaacctccgcctcctggattccagcaattctcctgcctcggcttcccaagtagctgggattacaggcacgtgccaccatgtctggctaattttttgtatttttttaatagatatggggtttcgccatgttggccaggctggtctcgaactcctgacctcaggtgatccgcccacctcggcctcccaaagtgctgggattacaggtgtgagcctccacacctggctgttttctttgattttattctttttttttttttctgtgagacagagtttcactcttgttgcccaggctggagtgcagtggtgtgatcttggctcactgcaacttctgcctcccgggttcaagcgattcttctgcttcagtctcccaagtagcttggattacaggtgagcactaccacgcccggctaatttttgtatttttaatagagacggggtttcaccatgttggccaggctggtctcgaactcttgacctcaggtgatctgcccgccttggcctcccaaagtgctgggattacaggtgtgagccgctgcgctcggccttctttgattttatattattaggagcaaaagtaaatgaagcccaggaaaacacctttgggaacaaactcttcctttgatggaaaatgcagaggcccttcctctctgtgccgtgcttgctcctcttacctgcccgggtggtttgggggtgttggtgtttcctccctggagaagatgggggaggctgtcccactcccagctctggcagaatcaagctgttgcagcagtgccttcttcatccttccttacgatcaatcacagtctccagaagatcagctcaattgctgtgcaggttaaaactacagaaccacatcccaaaggtacctggtaagaatgtttgaaagatcttccatttctaggaaccccagtcctgcttctccgcaatggcacatgcttccactccatccatactggcatcctcaaataaacagatatgtatacatatata

SEQ ID NO: 192828 - DNA, 2808 bp, Homo sapiens
  Payload ID: 18062
  Gene Name: transient receptor potential cation channel, subfamily V, member 2
  Uniprot ID: Q9Y5S1
  ENST ID: ENST00000338560
  CDS Start-End: 400-2694
gattcgcagcagggtgtgtccagatggtcagtctctggtggctagcctgtcctgacaggggagagttaagctcccgttctccaccgtgccggctggccaggtgggctgagggtgaccgagagaccagaacctgcttgctggagcttagtgctcagagctggggagggaggttccgccgctcctctgctgtcagcgccggcagcccctcccggcttcacttcctcccgcagcccctgctactgagaagctccgggatcccagcagccgccacgccctggcctcagcctgcggggctccagtcaggccaacaccgacgcgcagctgggaggaagacaggacccttgacatctccatctgcacagaggtcctggctggaccgagcagcctcctcctcctaggatgacctcaccctccagctctccagttttcaggttggagacattagatggaggccaagaagatggctctgaggcggacagaggaaagctggattttgggagcgggctgcctcccatggagtcacagttccagggcgaggaccggaaattcgcccctcagataagagtcaacctcaactaccgaaagggaacaggtgccagtcagccggatccaaaccgatttgaccgagatcggctcttcaatgcggtctcccggggtgtccccgaggatctggctggacttccagagtacctgagcaagaccagcaagtacctcaccgactcggaatacacagagggctccacaggtaagacgtgcctgatgaaggctgtgctgaaccttaaggacggagtcaatgcctgcattctgccactgctgcagatcgacagggactctggcaatcctcagcccctggtaaatgcccagtgcacagatgactattaccgaggccacagcgctctgcacatcgccattgagaagaggagtctgcagtgtgtgaagctcctggtggagaatggggccaatgtgcatgcccgggcctgcggccgcttcttccagaagggccaagggacttgcttttatttcggtgagctacccctctctttggccgcttgcaccaagcagtgggatgtggtaagctacctcctggagaacccacaccagcccgccagcctgcaggccactgactcccagggcaacacagtcctgcatgccctagtgatgatctcggacaactcagctgagaacattgcactggtgaccagcatgtatgatgggctcctccaagctggggcccgcctctgccctaccgtgcagcttgaggacatccgcaacctgcaggatctcacgcctctgaagctggccgccaaggagggcaagatcgagattttcaggcacatcctgcagcgggagttttcaggactgagccacctttcccgaaagttcaccgagtggtgctatgggcctgtccgggtgtcgctgtatgacctggcttctgtggacagctgtgaggagaactcagtgctggagatcattgcctttcattgcaagagcccgcaccgacaccgaatggtcgttttggagcccctgaacaaactgctgcaggcgaaatgggatctgctcatccccaagttcttcttaaacttcctgtgtaatctgatctacatgttcatcttcaccgctgttgcctaccatcagcctaccctgaagaagcaggccgcccctcacctgaaagcggaggttggaaactccatgctgctgacgggccacatccttatcctgctaggggggatctacctcctcgtgggccagctgtggtacttctggcggcgccacgtgttcatctggatctcgttcatagacagctactttgaaatcctcttcctgttccaggccctgctcacagtggtgtcccaggtgctgtgtttcctggccatcgagtggtacctgcccctgcttgtgtctgcgctggtgctgggctggctgaacctgctttactatacacgtggcttccagcacacaggcatctacagtgtcatgatccagaaggtcatcctgcgggacctgctgcgcttccttctgatctacttagtcttccttttcggcttcgctgtagccctggtgagcctgagccaggaggcttggcgccccgaagctcctacaggccccaatgccacagagtcagtgcagcccatggagggacaggaggacgagggcaacggggcccagtacaggggtatcctggaagcctccttggagctcttcaaattcaccatcggcatgggcgagctggccttccaggagcagctgcacttccgcggcatggtgctgctgctgctgctggcctacgtgctgctcacctacatcctgctgctcaacatgctcatcgccctcatgagcgagaccgtcaacagtgtcgccactgacagctggagcatctggaagctgcagaaagccatctctgtcctggagatggagaatggctattggtggtgcaggaagaagcagcgggcaggtgtgatgctgaccgttggcactaagccagatggcagccccgatgagcgctggtgcttcagggtggaggaggtgaactgggcttcatgggagcagacgctgcctacgctgtgtgaggacccgtcaggggcaggtgtccctcgaactctcgagaaccctgtcctggcttcccctcccaaggaggatgaggatggtgcctctgaggaaaactatgtgcccgtccagctcctccagtccaactgatggcccagatgcagcaggaggccagaggacagagcagaggatctttccaaccacatctgctggctctggggtcccagtgaattctggtggcaaatatatattttcactaactaa

SEQ ID NO: 192829 - DNA, 796 bp, Homo sapiens
  Payload ID: 18062
  Gene Name: transient receptor potential cation channel, subfamily V, member 2
  ENST ID: ENST00000455666
  CDS Start-End: 1-796
agatttctcattaggtgtgccttcttggtggtgtctgatatgtttcaacattgggcccagcgttgggcccagtcagccggatccaaaccgatttgaccgagatcggctcttcaatgcggtctcccggggtgtccccgaggatctggctggacttccagagtacctgagcaagaccagcaagtacctcaccgactcggaatacacagagggctccacaggtaagacgtgcctgatgaaggctgtgctgaaccttaaggacggagtcaatgcctgcattctgccactgctgcagatcgacagggactctggcaatcctcagcccctggtaaatgcccagtgcacagatgactattaccgaggccacagcgctctgcacatcgccattgagaagaggagtctgcagtgtgtgaagctcctggtggagaatggggccaatgtgcatgcccgggcctgcggccgcttcttccagaagggccaagggacttgcttttatttcggtgagctacccctctctttggccgcttgcaccaagcagtgggatgtggtaagctacctcctggagaacccacaccagcccgccagcctgcaggccactgactcccagggcaacacagtcctgcatgccctagtgatgatctcggacaactcagctgagaacattgcactggtgaccagcatgtatgatgggctcctccaagctggggcccgcctctgccctaccgtgcagcttgaggacatccgcaacctgcaggatctcacgcctctgaagctggccgccaaggagggcaagatcgag

SEQ ID NO: 192830 - DNA, 473 bp, Homo sapiens
  Payload ID: 18062
  Gene Name: transient receptor potential cation channel, subfamily V, member 2
  ENST ID: ENST00000577277
  CDS Start-End: 1-232
tgaaatcctcttcctgttccaggccctgctcacagtggtgtcccaggtgctgtgtttcctggccatcgagtggtacctgcccctgcttgtgtctgcgctggtgctgggctggctgaacctgctttactatacacgtggcttccagcacacaggcatctacagtgtcatgatccagaagggtggaggaggtgaactgggcttcatgggagcagacgctgcctacgctgtgtgaggacccgtcaggggcaggtgtccctcgaactctcgagaaccctgtcctggcttcccctcccaaggaggatgaggatggtgcctctgaggaaaactatgtgcccgtccagctcctccagtccaactgatggcccagatgcagcaggaggccagaggacagagcagaggatctttccaaccacatctgctggctctggggtcccagtgaattctggtggcaaatatatattttcactaactaa

SEQ ID NO: 192831 - DNA, 586 bp, Homo sapiens
  Payload ID: 18062
  Gene Name: transient receptor potential cation channel, subfamily V, member 2
  ENST ID: ENST00000581560
  CDS Start-End: 1-417
gaggacgagggcaacggggcccagtacaggggtatcctggaagcctccttggagctcttcaaattcaccatcggcatgggcgagctggccttccaggagcagctgcacttccgcggcatggtgctgctgctgctgctggcctacgtgctgctcacctacatcctgctgctcaacatgctcatcgccctcatgagcgagaccgtcaacagtgtcgccactgacagctggagcatctggaagctgcagaaagccatctctgtcctggagatggagaatggctattggtggtgcaggaagaagcagcgggcaggtgtgatgctgaccgttggcactaagccagatggcagccccgatgagcgctggtgcttcaggaactctcgagaaccctgtcctggcttcccctcccaaggaggatgaggatggtgcctctgaggaaaactatgtgcccgtccagctcctccagtccaactgatggcccagatgcagcaggaggccagaggacagagcagaggatctttccaaccacatctgctggctctggggtcccagtgaattctggtggcaaatatatattttcactaactaa

SEQ ID NO: 192832 - DNA, 530 bp, Homo sapiens
  Payload ID: 18062
  Gene Name: transient receptor potential cation channel, subfamily V, member 2
  ENST ID: ENST00000580788
  CDS Start-End: 1-289
caacggggcccagtacaggggtatcctggaagcctccttggagctcttcaaattcaccatcggcatgggcgagctggccttccaggagcagctgcacttccgcggcatggtgctgctgctgctgctggcctacgtgctgctcacctacatcctgctgctcaacatgctcatcgccctcatgagcgagaccgtcaacagtgtcgccactgacagctggagcatctggaagctgcagggtggaggaggtgaactgggcttcatgggagcagacgctgcctacgctgtgtgaggacccgtcaggggcaggtgtccctcgaactctcgagaaccctgtcctggcttcccctcccaaggaggatgaggatggtgcctctgaggaaaactatgtgcccgtccagctcctccagtccaactgatggcccagatgcagcaggaggccagaggacagagcagaggatctttccaaccacatctgctggctctggggtcccagtgaattctggtggcaaatatatattttcactaactaa

SEQ ID NO: 192833 - DNA, 512 bp, Homo sapiens
  Payload ID: 18062
  Gene Name: transient receptor potential cation channel, subfamily V, member 2
  ENST ID: ENST00000577865
  CDS Start-End: 1-273
gccctcatgagcgagaccgtcaacagtgtcgccactgacagctggagcatctggaagctgcagaaagccatctctgtcctggagatggagaatggctattggtggtgcaggaagaagcagcgggcaggtgtgatgctgaccgttggcactaagccagatggcagccccgatgagcgctggtgcttcaggcaaacctcagagctgctctgttgccctcagggtggaggaggtgaactgggcttcatgggagcagacgctgcctacgctgtgtgaggacccgtcaggggcaggtgtccctcgaactctcgagaaccctgtcctggcttcccctcccaaggaggatgaggatggtgcctctgaggaaaactatgtgcccgtccagctcctccagtccaactgatggcccagatgcagcaggaggccagaggacagagcagaggatctttccaaccacatctgctggctctggggtcccagtgaattctggtggcaaatatatattttcactaact

SEQ ID NO: 192834 - DNA, 3235 bp, Homo sapiens
  Payload ID: 18063
  Gene Name: transient receptor potential cation channel, subfamily V, member 3
  Uniprot ID: Q8NET8
  ENST ID: ENST00000301365
  CDS Start-End: 133-2508
tccagccatccctctgcctgcaatgagagcttcccgccgcctcagccacagtcccacccgggggccttgggccccagacatgcggtgatctcagggcaagggttgccacgaccacccagaacctcaccagccatgaaagcccaccccaaggagatggtgcctctcatgggcaagagagttgctgcccccagtgggaaccctgccatcctgccagagaagaggccggcggagatcacccccacaaagaagagtgcacacttcttcctggagatagaagggtttgaacccaaccccacagttgccaagacctctcctcctgtcttctccaagcccatggattccaacatccggcagtgcatctctggtaactgtgatgacatggactccccccagtctcctcaggatgatgtgacagagaccccatccaatcccaacagccccagtgcacagctggccaaggaagagcagaggaggaaaaagaggcggctgaagaagcgcatctttgcagccgtgtctgagggctgcgtggaggagttggtagagttgctggtggagctgcaggagctttgcaggcggcgccatgatgaggatgtgcctgacttcctcatgcacaagctgacggcctccgacacggggaagacctgcctgatgaaggccttgttaaacatcaaccccaacaccaaggagatagtgcggatcctgcttgcctttgctgaagagaacgacatcctgggcaggttcatcaacgccgagtacacagaggaggcctatgaagggcagacggcgctgaacatcgccatcgagcggcggcagggggacatcgcagccctgctcatcgccgccggcgccgacgtcaacgcgcacgccaagggggccttcttcaaccccaagtaccaacacgaaggcttctacttcggtgagacgcccctggccctggcagcatgcaccaaccagcccgagattgtgcagctgctgatggagcacgagcagacggacatcacctcgcgggactcacgaggcaacaacatccttcacgccctggtgaccgtggccgaggacttcaagacgcagaatgactttgtgaagcgcatgtacgacatgatcctactgcggagtggcaactgggagctggagaccactcgcaacaacgatggcctcacgccgctgcagctggccgccaagatgggcaaggcggagatcctgaagtacatcctcagtcgtgagatcaaggagaagcggctccggagcctgtccaggaagttcaccgactgggcgtacggacccgtgtcatcctccctctacgacctcaccaacgtggacaccaccacggacaactcagtgctggaaatcactgtctacaacaccaacatcgacaaccggcatgagatgctgaccctggagccgctgcacacgctgctgcatatgaagtggaagaagtttgccaagcacatgttctttctgtccttctgcttttatttcttctacaacatcaccctgaccctcgtctcgtactaccgcccccgggaggaggaggccatcccgcaccccttggccctgacgcacaagatggggtggctgcagctcctagggaggatgtttgtgctcatctgggccatgtgcatctctgtgaaagagggcattgccatcttcctgctgagaccctcggatctgcagtccatcctctcggatgcctggttccactttgtcttttttatccaagctgtgcttgtgatactgtctgtcttcttgtacttgtttgcctacaaagagtacctcgcctgcctcgtgctggccatggccctgggctgggcgaacatgctctactatacgcggggtttccagtccatgggcatgtacagcgtcatgatccagaaggtcattttgcatgatgttctgaagttcttgtttgtatatatcgtgtttttgcttggatttggagtagccttggcctcgctgatcgagaagtgtcccaaagacaacaaggactgcagctcctacggcagcttcagcgacgcagtgctggaactcttcaagctcaccataggcctgggtgacctgaacatccagcagaactccaagtatcccattctctttctgttcctgctcatcacctatgtcatcctcacctttgttctcctcctcaacatgctcattgctctgatgggcgagactgtggagaacgtctccaaggagagcgaacgcatctggcgcctgcagagagccaggaccatcttggagtttgagaaaatgttaccagaatggctgaggagcagattccggatgggagagctgtgcaaagtggccgaggatgatttccgactgtgtttgcggatcaatgaggtgaagtggactgaatggaagacgcacgtctccttccttaacgaagacccggggcctgtaagacgaacagcagatttcaacaaaatccaagattcttccaggaacaacagcaaaaccactctcaatgcatttgaagaagtcgaggaattcccggaaacctcggtgtagaagcggaacccagagctggtgtgcgcgtgcgctgtctggcgctgcaggcggagtcaccgactctgtgcagagaggctttgagggatggtggagtccggctctgctggcctagaagcagagtgcaccctcgtgctcagtgctcagtgggtgtctgaactgaggggcagttgtcaatttgtctgagtgggaaacatcctggattttgttacttggcaaacagctggtgtaaacctacagccagcagcagtctggagcctgggagcctcctgaagtcccgggtgaagcctctggttttaccaattgcaggtcggcttggctgggagagatggatggcgggaaaggggcagcagtcttgaggagcagggagaggagtctttcctcctgccagcttcccccgtcagccccaaccccagcccacacattgtaccatctcttctgctgtgactgggttgcctgaatttgtgggagacccgtgatcccatcccagagtgtgcgggggacggaggtaagctggatatcctgggggaggaggggaatgcgctctggaaacacccttccggaacccttcggggaaaaggagaccatccttggagtgaacgtcccctgacaccccaaggttcaaactgtctcaagctgagagatgtttttagtagcagaattaacacagggttttaacttgcaatacggaaaagacatttcagttgagaatgaaaattactacaatgaa

SEQ ID NO: 192835 - DNA, 5050 bp, Homo sapiens
  Payload ID: 18063
  Gene Name: transient receptor potential cation channel, subfamily V, member 3
  ENST ID: ENST00000381913
  CDS Start-End: 1-1019
agggggacatcgcagccctgctcatcgccgccggcgccgacgtcaacgcgcacgccaagggggccttcttcaaccccaagtaccaacacgaaggcttctacttcggtgagacgcccctggccctggcagcatgcaccaaccagcccgagattgtgcagctgctgatggagcacgagcagacggacatcacctcgcgggactcacgaggcaacaacatccttcacgccctggtgaccgtggccgaggacttcaagacgcagaatgactttgtgaagcgcatgtacgacatgatcctactgcggagtggcaactgggagctggagaccactcgcaacaacgatggcctcacgccgctgcagctggccgccaagatgggcaaggcggagatcctgaagtacatcctcagtcgtgagatcaaggagaagcggctccggagcctgtccaggaagttcaccgactgggcgtacggacccgtgtcatcctccctctacgacctcaccaacgtggacaccaccacggacaactcagtgctggaaatcactgtctacaacaccaacatcgacaaccggcatgagatgctgaccctggagccgctgcacacgctgctgcatatgaagtggaagaagtttgccaagcacatgttctttctgtccttctgcttttatttcttctacaacatcaccctgaccctcgtctcgtactaccgcccccgggaggaggaggccatcccgcaccccttggccctgacgcacaagatggggtggctgcagctcctagggaggatgtttgtgctcatctgggccatgtgcatctctgtgaaagagggcattgccatcttcctgctgagaccctcggatctgcagtccatcctctcggatgcctggttccactttgtcttagtacctcgcctgcctcgtgctggccatggccctgggctgggcgaacatgctctactatacgcggggtttccagtccatgggcatgtacagcgtcatgatccagaaggtcattttgcatgatgttctgaagttcttgtttgtatatatcgtgtttttgcttggatttggagtagccttggcctcgctgatcgagaagtgtcccaaagacaacaaggactgcagctcctacggcagcttcagcgacgcagtgctggaactcttcaagctcaccataggcctgggtgacctgaacatccagcagaactccaagtatcccattctctttctgttcctgctcatcacctatgtcatcctcacctttgttctcctcctcaacatgctcattgctctgatgggcgagactgtggagaacgtctccaaggagagcgaacgcatctggcgcctgcagagagccaggaccatcttggagtttgagaaaatgttaccagaatggctgaggagcagattccggatgggagagctgtgcaaagtggccgaggatgatttccgactgtgtttgcggatcaatgaggtgaagtggactgaatggaagacgcacgtctccttccttaacgaagacccggggcctgtaagacgaacagatttcaacaaaatccaagattcttccaggaacaacagcaaaaccactctcaatgcatttgaagaagtcgaggaattcccggaaacctcggtgtagaagcggaacccagagctggtgtgcgcgtgcgctgtctggcgctgcaggcggagtcaccgactctgtgcagagaggctttgagggatggtggagtccggctctgctggcctagaagcagagtgcaccctcgtgctcagtgctcagtgggtgtctgaactgaggggcagttgtcaatttgtctgagtgggaaacatcctggattttgttacttggcaaacagctggtgtaaacctacagccagcagcagtctggagcctgggagcctcctgaagtcccgggtgaagcctctggttttaccaattgcaggtcggcttggctgggagagatggatggcgggaaaggggcagcagtcttgaggagcagggagaggagtctttcctcctgccagcttcccccgtcagccccaaccccagcccacacattgtaccatctcttctgctgtgactgggttgcctgaatttgtgggagacccgtgatcccatcccagagtgtgcgggggacggaggtaagctggatatcctgggggaggaggggaatgcgctctggaaacacccttccggaacccttcggggaaaaggagaccatccttggagtgaacgtcccctgacaccccaaggttcaaactgtctcaagctgagagatgtttttagtagcagaattaacacagggttttaacttgcaatacggaaaagacatttcagttgagaatgaaaattactacaatgaagtttgtgattttaaaagtggagacagactgggggctttggggctggatgtaagtattatatatttggcctcagggtgcccagagcaagacaaaaagcttttcttcacacacacaaaagtctgcatgagacactccgggcaagtcctgctgggccgccgcgatctgggtgaaaggtcctggctcttttcctcgtcctgacctcacagtagcgcgtgcctgtgtgctgggatcgtggctttcgctgaagcagaaatagcagctgctcgatcgatatcatcttggaactcagcagttagtcgcatacctcagtatgtctcagtgggggaatttaacaaaatgcctcaactgctttggtacgaagtattttttttttaattttaactgtgaattttgaagctgaaggggaagcttgtgagagaaaagcatttgccaagactttgagcttatttttaggtcctcgtcctctgatgttctctttctgaaatgacacggagtcagtctggggggcagaggtgaagtggagacggaaggattttccaggtgactggggccgaaaccaccagaaaatccactctgccgccgttatctggtgaaaggattcatgtaaaaatgttcgaggtggaattataaaaatagtaaccataaatgttaatcttaaatggcagaaatagaaatttggccttcagataacatggcgatagataagttcatctggcttgaggcaaactgaagagtcggggcctagcagtgcactctgggccagtttctctgccctgggccactctgtgtgccagactagctggacagatagagactttgtgcccctgatggggccgattggggagaggtgggctggggtgtgtgaggcttcacaatccacagcagcccctgccctcccagctgacccagggagtaatcgcgtgctctaagccacagtggtcggggctgggcatgggcctctggagaagagaagatttgaggagaactgtcctagaggcaggaggagcagatgtgtttcagaatgggcagaattaggaaattgagaaagattttggctcaacagaatccagcaactgctccagatgttggagatgtttaagcagaagctggttgcgcacttaatgaggaatgttgttgaaaatggtcattggaagaagtttaaggtcccttttagcctggagattgtacaaatcagcattccacatctggagttagctacccgcattaagcctgaacagacatcttggtctgaaaggaagtggtttggattcatgatgccaagctccacactatggagctgggaattccagaattgctttgactcagatattaatggagaaagtcatatccattaatggataaagccgtatctgttatggataaagccgtatccagagttgctttgactcggatgttaatggataaagccaattattgatttctatttgcctaacctgccagcttttgtccaagtggggaatggagagccatagggatgtttgtcatctcacatgttttggtgatctgctgtctgtgggtctggatggaatttgttggcaagaccattttctgtattggatattcttcccaacagtgtccaccccaaaaggctttcagccaaaacgtctgagcctaggtaggtttaccaagggaagccataagtcaagaagcatcagagtgaaaaggagcacttccttcattttacgcccagaggctaatgctccgagaggaatgtgtacttgggcaaagtcatgcaggaaggtcatatcagagctgtggaggctggagtgtcctgattcttggaccacagatgtctccctgagccattatttatttatttttaaaaagcacagttattccatcattttgagtctttgtatttcgcttatattggggggcaggactattttctcaggtgtctcatttggcagtcaacattgtcccctatgttccctatgactagttgaaaattcaagtgtgcccacaggggtgcacaaaaccacacccatgcacacacacaccctcagcccccacacacaccccgttgaacccgtgggtctatcaggacatcctaaaactccgtgattgacatttcagtaatttcaggggaaggtgttttccagggatggggtctcccaggttcagatagtgcctttggctgcaaatgctcctttagctaaacttttcctcaggaagaattcattattctagacattatgtgatatatctgttaggaataaaaggtgcttaaccttcctccctgggatgtgggagaaggtgctggaggttgtactgtgaagtcttcaggctcttagaaggctccagcctgagagagccctttattattgacattcctgtccttcctcaaggcctggtgacctgtgacctttcgctctgggcagggcccaggtagatgggccgtcatccgggcctgtaagccgtacttgatttctgcattgatttacatattttttactgtgatcttggttccaaacacagaatcgtcaccccattctcccttgaatgtgccggatccttgtaaattctcatttacctacttgttcttagtgtgtatgtgtgtgcgaaactctatgttcaagaaagaaatcatacaaagagtaagaacatgtttgtgccattgaagaaatggttttttgatttctaataaatatttgttttgcctcgtta

SEQ ID NO: 192836 - DNA, 2726 bp, Homo sapiens
  Payload ID: 18063
  Gene Name: transient receptor potential cation channel, subfamily V, member 3
  ENST ID: ENST00000571139
  CDS Start-End: 95-262
gcctcagccacagtcccacccgggggccttgggccccagacatgcggtgatctcagggcaagggttgccacgaccacccagaacctcaccagccatgaaagcccaccccaaggagatggtgcctctcatgggcaagagagttgctgcccccagtgggaaccctgccatcctgccagagaagaggccggcggagatcacccccacaaagaagagtagacacagggttttgccgcattggcctcaaactcctgacctcaactgatctgcccactttgacctcccagagggctgggattacaggcatgagccaccacacctggcctagcccagctttgaatctggactttgctacctatctgctgcgtgaccttggtgcacacttcttcctggagatagaagggtttgaacccaaccccacagttgccaagacctctcctcctgtcttctccaagcccatggattccaacatccggcagtgcatctctggtaactgtgatgacatggactccccccagtctcctcaggatgatgtgacagagaccccatccaatcccaacagccccagtgcacagctggccaaggaagagcagaggaggaaaaagaggcggctgaagaagcgcatctttgcagccgtgtctgagggctgcgtggaggagttggtagagttgctggtggagctgcaggagctttgcaggcggcgccatgatgaggatgtgcctgacttcctcatgcacaagctgacggcctccgacacggggaagacctgcctgatgaaggccttgttaaacatcaaccccaacaccaaggagatagtgcggatcctgcttgcctttgctgaagagaacgacatcctgggcaggttcatcaacgccgagtacacagaggaggcctatgaagggcagacggcgctgaacatcgccatcgagcggcggcagggggacatcgcagccctgctcatcgccgccggcgccgacgtcaacgcgcacgccaagggggccttcttcaaccccaagtaccaacacgaaggcttctacttcggtgagacgcccctggccctggcagcatgcaccaaccagcccgagattgtgcagctgctgatggagcacgagcagacggacatcacctcgcgggactcacgaggcaacaacatccttcacgccctggtgaccgtggccgaggacttcaagacgcagaatgactttgtgaagcgcatgtacgacatgatcctactgcggagtggcaactgggagctggagaccactcgcaacaacgatggcctcacgccgctgcagctggccgccaagatgggcaaggcggagatcctgaagtacatcctcagtcgtgagatcaaggagaagcggctccggagcctgtccaggaagttcaccgactgggcgtacggacccgtgtcatcctccctctacgacctcaccaacgtggacaccaccacggacaactcagtgctggaaatcactgtctacaacaccaacatcgacaaccggcatgagatgctgaccctggagccgctgcacacgctgctgcatatgaagtggaagaagtttgccaagcacatgttctttctgtccttctgcttttatttcttctacaacatcaccctgaccctcgtctcgtactaccgcccccgggaggaggaggccatcccgcaccccttggccctgacgcacaagatggggtggctgcagctcctagggaggatgtttgtgctcatctgggccatgtgcatctctgtgaaagagggcattgccatcttcctgctgagaccctcggatctgcagtccatcctctcggatgcctggttccactttgtcttttttatccaagctgtgcttgtgatactgtctgtcttcttgtacttgtttgcctacaaagagtacctcgcctgcctcgtgctggccatggccctgggctgggcgaacatgctctactatacgcggggtttccagtccatgggcatgtacagcgtcatgatccagaaggtcattttgcatgatgttctgaagttcttgtttgtatatatcgtgtttttgcttggatttggagtagccttggcctcgctgatcgagaagtgtcccaaagacaacaaggactgcagctcctacggcagcttcagcgacgcagtgctggaactcttcaagctcaccataggcctgggtgacctgaacatccagcagaactccaagtatcccattctctttctgttcctgctcatcacctatgtcatcctcacctttgttctcctcctcaacatgctcattgctctgatgggcgagactgtggagaacgtctccaaggagagcgaacgcatctggcgcctgcagagagccaggaccatcttggagtttgagaaaatgttaccagaatggctgaggagcagattccggatgggagagctgtgcaaagtggccgaggatgatttccgactgtgtttgcggatcaatgaggtgaagtggactgaatggaagacgcacgtctccttccttaacgaagacccggggcctgtaagacgaacagcagatttcaacaaaatccaagattcttccaggaacaacagcaaaaccactctcaatgcatttgaagaagtcgaggaattcccggaaacctcggtgtagaagcggaacccagagctggtgtgcgcgtgcgctgtctggcgctgcaggcggagtcaccgactctgtgcagagaggctttgagggatggtggagtcc

SEQ ID NO: 192837 - DNA, 2744 bp, Homo sapiens
  Payload ID: 18063
  Gene Name: transient receptor potential cation channel, subfamily V, member 3
  ENST ID: ENST00000573539
  CDS Start-End: 95-262
gcctcagccacagtcccacccgggggccttgggccccagacatgcggtgatctcagggcaagggttgccacgaccacccagaacctcaccagccatgaaagcccaccccaaggagatggtgcctctcatgggcaagagagttgctgcccccagtgggaaccctgccatcctgccagagaagaggccggcggagatcacccccacaaagaagagtagacacagggttttgccgcattggcctcaaactcctgacctcaactgatctgcccactttgacctcccagagggctgggattacaggcatgagccaccacacctggcctagcccagctttgaatctggactttgctacctatctgctgcgtgaccttggtgcacacttcttcctggagatagaagggtttgaacccaaccccacagttgccaagacctctcctcctgtcttctccaagcccatggattccaacatccggcagtgcatctctggtaactgtgatgacatggactccccccagtctcctcaggatgatgtgacagagaccccatccaatcccaacagccccagtgcacagctggccaaggaagagcagaggaggaaaaagaggcggctgaagaagcgcatctttgcagccgtgtctgagggctgcgtggaggagttggtagagttgctggtggagctgcaggagctttgcaggcggcgccatgatgaggatgtgcctgacttcctcatgcacaagctgacggcctccgacacggggaagacctgcctgatgaaggccttgttaaacatcaaccccaacaccaaggagatagtgcggatcctgcttgcctttgctgaagagaacgacatcctgggcaggttcatcaacgccgagtacacagaggaggcctatgaaggttctcactctgttgggcaggctggagtgcagtggcgcgaccacgactcgctgcagccttgacctccctgggctcagggcagacggcgctgaacatcgccatcgagcggcggcagggggacatcgcagccctgctcatcgccgccggcgccgacgtcaacgcgcacgccaagggggccttcttcaaccccaagtaccaacacgaaggcttctacttcggtgagacgcccctggccctggcagcatgcaccaaccagcccgagattgtgcagctgctgatggagcacgagcagacggacatcacctcgcgggactcacgaggcaacaacatccttcacgccctggtgaccgtggccgaggacttcaagacgcagaatgactttgtgaagcgcatgtacgacatgatcctactgcggagtggcaactgggagctggagaccactcgcaacaacgatggcctcacgccgctgcagctggccgccaagatgggcaaggcggagatcctgaagtacatcctcagtcgtgagatcaaggagaagcggctccggagcctgtccaggaagttcaccgactgggcgtacggacccgtgtcatcctccctctacgacctcaccaacgtggacaccaccacggacaactcagtgctggaaatcactgtctacaacaccaacatcgacaaccggcatgagatgctgaccctggagccgctgcacacgctgctgcatatgaagtggaagaagtttgccaagcacatgttctttctgtccttctgcttttatttcttctacaacatcaccctgaccctcgtctcgtactaccgcccccgggaggaggaggccatcccgcaccccttggccctgacgcacaagatggggtggctgcagctcctagggaggatgtttgtgctcatctgggccatgtgcatctctgtgaaagagggcattgccatcttcctgctgagaccctcggatctgcagtccatcctctcggatgcctggttccactttgtcttagtacctcgcctgcctcgtgctggccatggccctgggctgggcgaacatgctctactatacgcggggtttccagtccatgggcatgtacagcgtcatgatccagaaggtcattttgcatgatgttctgaagttcttgtttgtatatatcgtgtttttgcttggatttggagtagccttggcctcgctgatcgagaagtgtcccaaagacaacaaggactgcagctcctacggcagcttcagcgacgcagtgctggaactcttcaagctcaccataggcctgggtgacctgaacatccagcagaactccaagtatcccattctctttctgttcctgctcatcacctatgtcatcctcacctttgttctcctcctcaacatgctcattgctctgatgggcgagactgtggagaacgtctccaaggagagcgaacgcatctggcgcctgcagagagccaggaccatcttggagtttgagaaaatgttaccagaatggctgaggagcagattccggatgggagagctgtgcaaagtggccgaggatgatttccgactgtgtttgcggatcaatgaggtgaagtggactgaatggaagacgcacgtctccttccttaacgaagacccggggcctgtaagacgaacagcagatttcaacaaaatccaagattcttccaggaacaacagcaaaaccactctcaatgcatttgaagaagtcgaggaattcccggaaacctcggtgtagaagcggaacccagagctggtgtgcgcgtgcgctgtctggcgctgcaggcggagtcaccgactctgtgcagagaggctttgagggatggtggagtcc

SEQ ID NO: 192838 - DNA, 2937 bp, Homo sapiens
  Payload ID: 18063
  Gene Name: transient receptor potential cation channel, subfamily V, member 3
  Uniprot ID: Q8NET8
  ENST ID: ENST00000572519
  CDS Start-End: 133-2430
tccagccatccctctgcctgcaatgagagcttcccgccgcctcagccacagtcccacccgggggccttgggccccagacatgcggtgatctcagggcaagggttgccacgaccacccagaacctcaccagccatgaaagcccaccccaaggagatggtgcctctcatgggcaagagagttgctgcccccagtgggaaccctgccatcctgccagagaagaggccggcggagatcacccccacaaagaagagtgcacacttcttcctggagatagaagggtttgaacccaaccccacagttgccaagacctctcctcctgtcttctccaagcccatggattccaacatccggcagtgcatctctggtaactgtgatgacatggactccccccagtctcctcaggatgatgtgacagagaccccatccaatcccaacagccccagtgcacagctggccaaggaagagcagaggaggaaaaagaggcggctgaagaagcgcatctttgcagccgtgtctgagggctgcgtggaggagttggtagagttgctggtggagctgcaggagctttgcaggcggcgccatgatgaggatgtgcctgacttcctcatgcacaagctgacggcctccgacacggggaagacctgcctgatgaaggccttgttaaacatcaaccccaacaccaaggagatagtgcggatcctgcttgcctttgctgaagagaacgacatcctgggcaggttcatcaacgccgagtacacagaggaggcctatgaagggcagacggcgctgaacatcgccatcgagcggcggcagggggacatcgcagccctgctcatcgccgccggcgccgacgtcaacgcgcacgccaagggggccttcttcaaccccaagtaccaacacgaaggcttctacttcggtgagacgcccctggccctggcagcatgcaccaaccagcccgagattgtgcagctgctgatggagcacgagcagacggacatcacctcgcgggactcacgaggcaacaacatccttcacgccctggtgaccgtggccgaggacttcaagacgcagaatgactttgtgaagcgcatgtacgacatgatcctactgcggagtggcaactgggagctggagaccactcgcaacaacgatggcctcacgccgctgcagctggccgccaagatgggcaaggcggagatcctgaagtacatcctcagtcgtgagatcaaggagaagcggctccggagcctgtccaggaagttcaccgactgggcgtacggacccgtgtcatcctccctctacgacctcaccaacgtggacaccaccacggacaactcagtgctggaaatcactgtctacaacaccaacatcgacaaccggcatgagatgctgaccctggagccgctgcacacgctgctgcatatgaagtggaagaagtttgccaagcacatgttctttctgtccttctgcttttatttcttctacaacatcaccctgaccctcgtctcgtactaccgcccccgggaggaggaggccatcccgcaccccttggccctgacgcacaagatggggtggctgcagctcctagggaggatgtttgtgctcatctgggccatgtgcatctctgtgaaagagggcattgccatcttcctgctgagaccctcggatctgcagtccatcctctcggatgcctggttccactttgtcttttttatccaagctgtgcttgtgatactgtctgtcttcttgtacttgtttgcctacaaagagtacctcgcctgcctcgtgctggccatggccctgggctgggcgaacatgctctactatacgcggggtttccagtccatgggcatgtacagcgtcatgatccagaaggtcattttgcatgatgttctgaagttcttgtttgtatatatcgtgtttttgcttggatttggagtagccttggcctcgctgatcgagaagtgtcccaaagacaacaaggactgcagctcctacggcagcttcagcgacgcagtgctggaactcttcaagctcaccataggcctgggtgacctgaacatccagcagaactccaagtatcccattctctttctgttcctgctcatcacctatgtcatcctcacctttgttctcctcctcaacatgctcattgctctgatgggcgagactgtggagaacgtctccaaggagagcgaacgcatctggcgcctgcagagagccaggaccatcttggagtttgagaaaatgttaccagaatggctgaggagcagattccggatgggagagctgtgcaaagtggccgaggatgatttccgactgtgtttgcggatcaatgaggtgaagtggactgaatggaagacgcacgtctccttccttaacgaagacccggggcctgtaagacgaacaggtactgtcgctgtgaggtgacatggtgtccgctcctgtctcagaccatgtaaccttgggcagatcaagtctaagggtcctgactttccccatctgtcaaatgggagggttgaatggaaatgcttcttaggtctcttccagctctgacttttagaaccctagttggcacaacttttaaaatggcgtagccctaagccatagaaacacatcatgcaggccgggcgcggtggctcgtgcctgtaatcccagcactttgggaggacgagtcgggtgaatcacctgaggtcaggagtttgagaccagcctggccaacatggtgacaccttgtctctactaaagatacaaaaattagccgaacgtggtggcaggtgcctataatcccagctactcgagaggctgagtcaggagaattgcttgaacctgggaggtggaggttgcagtgagctgagatcacaccactgcactgcagcctgggtgacaagagggaaactccatctcaaaaaagaaaaaaaagaaaaagaaaaaaga

SEQ ID NO: 192839 - DNA, 1621 bp, Homo sapiens
  Payload ID: 18063
  Gene Name: transient receptor potential cation channel, subfamily V, member 3
  ENST ID: ENST00000577016
  CDS Start-End: 1-440
atgagatgctgaccctggagccgctgcacacgctgctgcatatgaagtggaagaagtttgccaagcacatgttctttctgtccttctgcttttatttcttctacaacatcaccctgaccctcgtctcgtactaccgcccccgggaggaggaggccatcccgcaccccttggccctgacgcacaagatggggtggctgcagctcctagggaggatgtttgtgctcatctgggccatgtgcatctctgtgaaagagggcattgccatcttcctgctgagaccctcggatctgcagtccatcctctcggatgcctggttccactttgtcttccttggcctcgctgatcgagaagtgtcccaaagacaacaaggactgcagctcctacggcagcttcagcgacgcagtgctggaactcttcaagctcaccataggcctgggtgacctgaacatccagcagaactccaagtatcccattctctttctgttcctgctcatcacctatgtcatcctcacctttgttctcctcctcaacatgctcattgctctgatgggcgagactgtggagaacgtctccaaggagagcgaacgcatctggcgcctgcagagagccaggaccatcttggagtttgagaaaatgttaccagaatggctgaggagcagattccggatgggagagctgtgcaaagtggccgaggatgatttccgactgtgtttgcggatcaatgaggtgaagtggactgaatggaagacgcacgtctccttccttaacgaagacccggggcctgtaagacgaacagcagatttcaacaaaatccaagattcttccaggaacaacagcaaaaccactctcaatgcatttgaagaagtcgaggaattcccggaaacctcggtgtagaagcggaacccagagctggtgtgcgcgtgcgctgtctggcgctgcaggcggagtcaccgactctgtgcagagaggctttgagggatggtggagtccggctctgctggcctagaagcagagtgcaccctcgtgctcagtgctcagtgggtgtctgaactgaggggcagttgtcaatttgtctgagtgggaaacatcctggattttgttacttggcaaacagctggtgtaaacctacagccagcagcagtctggagcctgggagcctcctgaagtcccgggtgaagcctctggttttaccaattgcaggtcggcttggctgggagagatggatggcgggaaaggggcagcagtcttgaggagcagggagaggagtctttcctcctgccagcttcccccgtcagccccaaccccagcccacacattgtaccatctcttctgctgtgactgggttgcctgaatttgtgggagacccgtgatcccatcccagagtgtgcgggggacggaggtaagctggatatcctgggggaggaggggaatgcgctctggaaacacccttccggaacccttcggggaaaaggagaccatccttggagtgaacgtcccctgacaccccaaggttcaaactgtctcaagctgagagatgtttttagtagcagaattaacacagggttttaacttgcaatacggaaaagacatttcagttgagaatgaaaattactacaatgaa

SEQ ID NO: 192840 - DNA, 2766 bp, Homo sapiens
  Payload ID: 18063
  Gene Name: transient receptor potential cation channel, subfamily V, member 3
  Uniprot ID: Q8NET8
  ENST ID: ENST00000576742
  CDS Start-End: 323-2695
ccacaacttcgatcttggcacctgcggcctcccctgccttttctccggtggggatgaggctgctgtgtgggtgtgggggtgactcacacgggccacgtgggtgggcgggtgctgcagctgtggctggtgggcgtggcctgcctggcgccgagggcaggtggctcagccagttctgcctctgacgcctcattccagccatccctctgcctgcaatgagagcttcccgccgcctcagccacagtcccacccgggggccttgggccccagacatgcggtgatctcagggcaagggttgccacgaccacccagaacctcaccagccatgaaagcccaccccaaggagatggtgcctctcatgggcaagagagttgctgcccccagtgggaaccctgccatcctgccagagaagaggccggcggagatcacccccacaaagaagagtgcacacttcttcctggagatagaagggtttgaacccaaccccacagttgccaagacctctcctcctgtcttctccaagcccatggattccaacatccggcagtgcatctctggtaactgtgatgacatggactccccccagtctcctcaggatgatgtgacagagaccccatccaatcccaacagccccagtgcacagctggccaaggaagagcagaggaggaaaaagaggcggctgaagaagcgcatctttgcagccgtgtctgagggctgcgtggaggagttggtagagttgctggtggagctgcaggagctttgcaggcggcgccatgatgaggatgtgcctgacttcctcatgcacaagctgacggcctccgacacggggaagacctgcctgatgaaggccttgttaaacatcaaccccaacaccaaggagatagtgcggatcctgcttgcctttgctgaagagaacgacatcctgggcaggttcatcaacgccgagtacacagaggaggcctatgaagggcagacggcgctgaacatcgccatcgagcggcggcagggggacatcgcagccctgctcatcgccgccggcgccgacgtcaacgcgcacgccaagggggccttcttcaaccccaagtaccaacacgaaggcttctacttcggtgagacgcccctggccctggcagcatgcaccaaccagcccgagattgtgcagctgctgatggagcacgagcagacggacatcacctcgcgggactcacgaggcaacaacatccttcacgccctggtgaccgtggccgaggacttcaagacgcagaatgactttgtgaagcgcatgtacgacatgatcctactgcggagtggcaactgggagctggagaccactcgcaacaacgatggcctcacgccgctgcagctggccgccaagatgggcaaggcggagatcctgaagtacatcctcagtcgtgagatcaaggagaagcggctccggagcctgtccaggaagttcaccgactgggcgtacggacccgtgtcatcctccctctacgacctcaccaacgtggacaccaccacggacaactcagtgctggaaatcactgtctacaacaccaacatcgacaaccggcatgagatgctgaccctggagccgctgcacacgctgctgcatatgaagtggaagaagtttgccaagcacatgttctttctgtccttctgcttttatttcttctacaacatcaccctgaccctcgtctcgtactaccgcccccgggaggaggaggccatcccgcaccccttggccctgacgcacaagatggggtggctgcagctcctagggaggatgtttgtgctcatctgggccatgtgcatctctgtgaaagagggcattgccatcttcctgctgagaccctcggatctgcagtccatcctctcggatgcctggttccactttgtcttttttatccaagctgtgcttgtgatactgtctgtcttcttgtacttgtttgcctacaaagagtacctcgcctgcctcgtgctggccatggccctgggctgggcgaacatgctctactatacgcggggtttccagtccatgggcatgtacagcgtcatgatccagaaggtcattttgcatgatgttctgaagttcttgtttgtatatatcgtgtttttgcttggatttggagtagccttggcctcgctgatcgagaagtgtcccaaagacaacaaggactgcagctcctacggcagcttcagcgacgcagtgctggaactcttcaagctcaccataggcctgggtgacctgaacatccagcagaactccaagtatcccattctctttctgttcctgctcatcacctatgtcatcctcacctttgttctcctcctcaacatgctcattgctctgatgggcgagactgtggagaacgtctccaaggagagcgaacgcatctggcgcctgcagagagccaggaccatcttggagtttgagaaaatgttaccagaatggctgaggagcagattccggatgggagagctgtgcaaagtggccgaggatgatttccgactgtgtttgcggatcaatgaggtgaagtggactgaatggaagacgcacgtctccttccttaacgaagacccggggcctgtaagacgaacagatttcaacaaaatccaagattcttccaggaacaacagcaaaaccactctcaatgcatttgaagaagtcgaggaattcccggaaacctcggtgtagaagcggaacccagagctggtgtgcgcgtgcgctgtctggcgctgcaggcggagtcaccgactctgtgcaga

SEQ ID NO: 192841 - DNA, 5742 bp, Homo sapiens
  Payload ID: 18063
  Gene Name: transient receptor potential cation channel, subfamily V, member 3
  ENST ID: ENST00000616411
  CDS Start-End: 1-2328
atgagccaccacacctggcctagcccagctttgaatctggactttgctacctatctgctgcgtgaccttggtgcacacttcttcctggagatagaagggtttgaacccaaccccacagttgccaagacctctcctcctgtcttctccaagcccatggattccaacatccggcagtgcatctctggtaactgtgatgacatggactccccccagtctcctcaggatgatgtgacagagaccccatccaatcccaacagccccagtgcacagctggccaaggaagagcagaggaggaaaaagaggcggctgaagaagcgcatctttgcagccgtgtctgagggctgcgtggaggagttggtagagttgctggtggagctgcaggagctttgcaggcggcgccatgatgaggatgtgcctgacttcctcatgcacaagctgacggcctccgacacggggaagacctgcctgatgaaggccttgttaaacatcaaccccaacaccaaggagatagtgcggatcctgcttgcctttgctgaagagaacgacatcctgggcaggttcatcaacgccgagtacacagaggaggcctatgaagggcagacggcgctgaacatcgccatcgagcggcggcagggggacatcgcagccctgctcatcgccgccggcgccgacgtcaacgcgcacgccaagggggccttcttcaaccccaagtaccaacacgaaggcttctacttcggtgagacgcccctggccctggcagcatgcaccaaccagcccgagattgtgcagctgctgatggagcacgagcagacggacatcacctcgcgggactcacgaggcaacaacatccttcacgccctggtgaccgtggccgaggacttcaagacgcagaatgactttgtgaagcgcatgtacgacatgatcctactgcggagtggcaactgggagctggagaccactcgcaacaacgatggcctcacgccgctgcagctggccgccaagatgggcaaggcggagatcctgaagtacatcctcagtcgtgagatcaaggagaagcggctccggagcctgtccaggaagttcaccgactgggcgtacggacccgtgtcatcctccctctacgacctcaccaacgtggacaccaccacggacaactcagtgctggaaatcactgtctacaacaccaacatcgacaaccggcatgagatgctgaccctggagccgctgcacacgctgctgcatatgaagtggaagaagtttgccaagcacatgttctttctgtccttctgcttttatttcttctacaacatcaccctgaccctcgtctcgtactaccgcccccgggaggaggaggccatcccgcaccccttggccctgacgcacaagatggggtggctgcagctcctagggaggatgtttgtgctcatctgggccatgtgcatctctgtgaaagagggcattgccatcttcctgctgagaccctcggatctgcagtccatcctctcggatgcctggttccactttgtcttttttatccaagctgtgcttgtgatactgtctgtcttcttgtacttgtttgcctacaaagagtacctcgcctgcctcgtgctggccatggccctgggctgggcgaacatgctctactatacgcggggtttccagtccatgggcatgtacagcgtcatgatccagaaggtcattttgcatgatgttctgaagttcttgtttgtatatatcgtgtttttgcttggatttggagtagccttggcctcgctgatcgagaagtgtcccaaagacaacaaggactgcagctcctacggcagcttcagcgacgcagtgctggaactcttcaagctcaccataggcctgggtgacctgaacatccagcagaactccaagtatcccattctctttctgttcctgctcatcacctatgtcatcctcacctttgttctcctcctcaacatgctcattgctctgatgggcgagactgtggagaacgtctccaaggagagcgaacgcatctggcgcctgcagagagccaggaccatcttggagtttgagaaaatgttaccagaatggctgaggagcagattccggatgggagagctgtgcaaagtggccgaggatgatttccgactgtgtttgcggatcaatgaggtgaagtggactgaatggaagacgcacgtctccttccttaacgaagacccggggcctgtaagacgaacagcagatttcaacaaaatccaagattcttccaggaacaacagcaaaaccactctcaatgcatttgaagaagtcgaggaattcccggaaacctcggtgtagaagcggaacccagagctggtgtgcgcgtgcgctgtctggcgctgcaggcggagtcaccgactctgtgcagagaggctttgagggatggtggagtccggctctgctggcctagaagcagagtgcaccctcgtgctcagtgctcagtgggtgtctgaactgaggggcagttgtcaatttgtctgagtgggaaacatcctggattttgttacttggcaaacagctggtgtaaacctacagccagcagcagtctggagcctgggagcctcctgaagtcccgggtgaagcctctggttttaccaattgcaggtcggcttggctgggagagatggatggcgggaaaggggcagcagtcttgaggagcagggagaggagtctttcctcctgccagcttcccccgtcagccccaaccccagcccacacattgtaccatctcttctgctgtgactgggttgcctgaatttgtgggagacccgtgatcccatcccagagtgtgcgggggacggaggtaagctggatatcctgggggaggaggggaatgcgctctggaaacacccttccggaacccttcggggaaaaggagaccatccttggagtgaacgtcccctgacaccccaaggttcaaactgtctcaagctgagagatgtttttagtagcagaattaacacagggttttaacttgcaatacggaaaagacatttcagttgagaatgaaaattactacaatgaagtttgtgattttaaaagtggagacagactgggggctttggggctggatgtaagtattatatatttggcctcagggtgcccagagcaagacaaaaagcttttcttcacacacacaaaagtctgcatgagacactccgggcaagtcctgctgggccgccgcgatctgggtgaaaggtcctggctcttttcctcgtcctgacctcacagtagcgcgtgcctgtgtgctgggatcgtggctttcgctgaagcagaaatagcagctgctcgatcgatatcatcttggaactcagcagttagtcgcatacctcagtatgtctcagtgggggaatttaacaaaatgcctcaactgctttggtacgaagtattttttttttaattttaactgtgaattttgaagctgaaggggaagcttgtgagagaaaagcatttgccaagactttgagcttatttttaggtcctcgtcctctgatgttctctttctgaaatgacacggagtcagtctggggggcagaggtgaagtggagacggaaggattttccaggtgactggggccgaaaccaccagaaaatccactctgccgccgttatctggtgaaaggattcatgtaaaaatgttcgaggtggaattataaaaatagtaaccataaatgttaatcttaaatggcagaaatagaaatttggccttcagataacatggcgatagataagttcatctggcttgaggcaaactgaagagtcggggcctagcagtgcactctgggccagtttctctgccctgggccactctgtgtgccagactagctggacagatagagactttgtgcccctgatggggccgattggggagaggtgggctggggtgtgtgaggcttcacaatccacagcagcccctgccctcccagctgacccagggagtaatcgcgtgctctaagccacagtggtcggggctgggcatgggcctctggagaagagaagatttgaggagaactgtcctagaggcaggaggagcagatgtgtttcagaatgggcagaattaggaaattgagaaagattttggctcaacagaatccagcaactgctccagatgttggagatgtttaagcagaagctggttgcgcacttaatgaggaatgttgttgaaaatggtcattggaagaagtttaaggtcccttttagcctggagattgtacaaatcagcattccacatctggagttagctacccgcattaagcctgaacagacatcttggtctgaaaggaagtggtttggattcatgatgccaagctccacactatggagctgggaattccagaattgctttgactcagatattaatggagaaagtcatatccattaatggataaagccgtatctgttatggataaagccgtatccagagttgctttgactcggatgttaatggataaagccaattattgatttctatttgcctaacctgccagcttttgtccaagtggggaatggagagccatagggatgtttgtcatctcacatgttttggtgatctgctgtctgtgggtctggatggaatttgttggcaagaccattttctgtattggatattcttcccaacagtgtccaccccaaaaggctttcagccaaaacgtctgagcctaggtaggtttaccaagggaagccataagtcaagaagcatcagagtgaaaaggagcacttccttcattttacgcccagaggctaatgctccgagaggaatgtgtacttgggcaaagtcatgcaggaaggtcatatcagagctgtggaggctggagtgtcctgattcttggaccacagatgtctccctgagccattatttatttatttttaaaaagcacagttattccatcattttgagtctttgtatttcgcttatattggggggcaggactattttctcaggtgtctcatttggcagtcaacattgtcccctatgttccctatgactagttgaaaattcaagtgtgcccacaggggtgcacaaaaccacacccatgcacacacacaccctcagcccccacacacaccccgttgaacccgtgggtctatcaggacatcctaaaactccgtgattgacatttcagtaatttcaggggaaggtgttttccagggatggggtctcccaggttcagatagtgcctttggctgcaaatgctcctttagctaaacttttcctcaggaagaattcattattctagacattatgtgatatatctgttaggaataaaaggtgcttaaccttcctccctgggatgtgggagaaggtgctggaggttgtactgtgaagtcttcaggctcttagaaggctccagcctgagagagccctttattattgacattcctgtccttcctcaaggcctggtgacctgtgacctttcgctctgggcagggcccaggtagatgggccgtcatccgggcctgtaagccgtacttgatttctgcattgatttacatattttttactgtgatcttggttccaaacacagaatcgtcaccccattctcccttgaatgtgccggatccttgtaaattctcatttacctacttgttcttagtgtgtatgtgtgtgcgaaactctatgttcaagaaagaaatcatacaaagagtaagaacatgtttgtgccattgaagaaatggttttttgatttctaataaatatttgttttgcctcgtt

SEQ ID NO: 192842 - DNA, 3233 bp, Homo sapiens
  Payload ID: 18064
  Gene Name: transient receptor potential cation channel, subfamily V, member 4
  Uniprot ID: Q9HBA0
  ENST ID: ENST00000261740
  CDS Start-End: 84-2699
gggattcaggaagcgcggatctcccggccgccggcgcccagccgtcccggaggctgagcagtgcagacgggcctggggcaggcatggcggattccagcgaaggcccccgcgcggggcccggggaggtggctgagctccccggggatgagagtggcaccccaggtggggaggcttttcctctctcctccctggccaatctgtttgagggggaggatggctccctttcgccctcaccggctgatgccagtcgccctgctggcccaggcgatgggcgaccaaatctgcgcatgaagttccagggcgccttccgcaagggggtgcccaaccccatcgatctgctggagtccaccctatatgagtcctcggtggtgcctgggcccaagaaagcacccatggactcactgtttgactacggcacctatcgtcaccactccagtgacaacaagaggtggaggaagaagatcatagagaagcagccgcagagccccaaagcccctgcccctcagccgccccccatcctcaaagtcttcaaccggcctatcctctttgacatcgtgtcccggggctccactgctgacctggacgggctgctcccattcttgctgacccacaagaaacgcctaactgatgaggagtttcgagagccatctacggggaagacctgcctgcccaaggccttgctgaacctgagcaatggccgcaacgacaccatccctgtgctgctggacatcgcggagcgcaccggcaacatgagggagttcattaactcgcccttccgtgacatctactatcgaggtcagacagccctgcacatcgccattgagcgtcgctgcaaacactacgtggaacttctcgtggcccagggagctgatgtccacgcccaggcccgtgggcgcttcttccagcccaaggatgaggggggctacttctactttggggagctgcccctgtcgctggctgcctgcaccaaccagccccacattgtcaactacctgacggagaacccccacaagaaggcggacatgcggcgccaggactcgcgaggcaacacagtgctgcatgcgctggtggccattgctgacaacacccgtgagaacaccaagtttgttaccaagatgtacgacctgctgctgctcaagtgtgcccgcctcttccccgacagcaacctggaggccgtgctcaacaacgacggcctctcgcccctcatgatggctgccaagacgggcaagattgggatctttcagcacatcatccggcgggaggtgacggatgaggacacacggcacctgtcccgcaagttcaaggactgggcctatgggccagtgtattcctcgctttatgacctctcctccctggacacgtgtggggaagaggcctccgtgctggagatcctggtgtacaacagcaagattgagaaccgccacgagatgctggctgtggagcccatcaatgaactgctgcgggacaagtggcgcaagttcggggccgtctccttctacatcaacgtggtctcctacctgtgtgccatggtcatcttcactctcaccgcctactaccagccgctggagggcacaccgccgtacccttaccgcaccacggtggactacctgcggctggctggcgaggtcattacgctcttcactggggtcctgttcttcttcaccaacatcaaagacttgttcatgaagaaatgccctggagtgaattctctcttcattgatggctccttccagctgctctacttcatctactctgtcctggtgatcgtctcagcagccctctacctggcagggatcgaggcctacctggccgtgatggtctttgccctggtcctgggctggatgaatgccctttacttcacccgtgggctgaagctgacggggacctatagcatcatgatccagaagattctcttcaaggaccttttccgattcctgctcgtctacttgctcttcatgatcggctacgcttcagccctggtctccctcctgaacccgtgtgccaacatgaaggtgtgcaatgaggaccagaccaactgcacagtgcccacttacccctcgtgccgtgacagcgagaccttcagcaccttcctcctggacctgtttaagctgaccatcggcatgggcgacctggagatgctgagcagcaccaagtaccccgtggtcttcatcatcctgctggtgacctacatcatcctcacctttgtgctgctcctcaacatgctcattgccctcatgggcgagacagtgggccaggtctccaaggagagcaagcacatctggaagctgcagtgggccaccaccatcctggacattgagcgctccttccccgtattcctgaggaaggccttccgctctggggagatggtcaccgtgggcaagagctcggacggcactcctgaccgcaggtggtgcttcagggtggatgaggtgaactggtctcactggaaccagaacttgggcatcatcaacgaggacccgggcaagaatgagacctaccagtattatggcttctcgcataccgtgggccgcctccgcagggatcgctggtcctcggtggtaccccgcgtggtggaactgaacaagaactcgaacccggacgaggtggtggtgcctctggacagcatggggaacccccgctgcgatggccaccagcagggttacccccgcaagtggaggactgatgacgccccgctctagggactgcagcccagccccagcttctctgcccactcatttctagtccagccgcatttcagcagtgccttctggggtgtccccccacaccctgctttggccccagaggcgagggaccagtggaggtgccagggaggccccaggaccctgtggtcccctggctctgcctccccaccctggggtgggggctcccggccacctgtcttgctcctatggagtcacataagccaacgccagagcccctccacctcaggccccagcccctgcctctccattatttatttgctctgctctcaggaagcgacgtgacccctgccccagctggaacctggcagaggccttaggaccccgttccaagtgcactgcccggccaagccccagcctcagcctgcgcctgagctgcatgcgccaccatttttggcagcgtggcagctttgcaaggggctggggccctcggcgtggggccatgccttctgtgtgttctgtagtgtctgggatttgccggtgctcaataaatgtttattcattgacggtgga

SEQ ID NO: 192843 - DNA, 3247 bp, Homo sapiens
  Payload ID: 18064
  Gene Name: transient receptor potential cation channel, subfamily V, member 4
  Uniprot ID: Q9HBA0
  ENST ID: ENST00000418703
  CDS Start-End: 96-2711
ggggcttcctggagcccccgcccctggccgggttctgcctgactcccctttcattcccttgcaggctgagcagtgcagacgggcctggggcaggcatggcggattccagcgaaggcccccgcgcggggcccggggaggtggctgagctccccggggatgagagtggcaccccaggtggggaggcttttcctctctcctccctggccaatctgtttgagggggaggatggctccctttcgccctcaccggctgatgccagtcgccctgctggcccaggcgatgggcgaccaaatctgcgcatgaagttccagggcgccttccgcaagggggtgcccaaccccatcgatctgctggagtccaccctatatgagtcctcggtggtgcctgggcccaagaaagcacccatggactcactgtttgactacggcacctatcgtcaccactccagtgacaacaagaggtggaggaagaagatcatagagaagcagccgcagagccccaaagcccctgcccctcagccgccccccatcctcaaagtcttcaaccggcctatcctctttgacatcgtgtcccggggctccactgctgacctggacgggctgctcccattcttgctgacccacaagaaacgcctaactgatgaggagtttcgagagccatctacggggaagacctgcctgcccaaggccttgctgaacctgagcaatggccgcaacgacaccatccctgtgctgctggacatcgcggagcgcaccggcaacatgagggagttcattaactcgcccttccgtgacatctactatcgaggtcagacagccctgcacatcgccattgagcgtcgctgcaaacactacgtggaacttctcgtggcccagggagctgatgtccacgcccaggcccgtgggcgcttcttccagcccaaggatgaggggggctacttctactttggggagctgcccctgtcgctggctgcctgcaccaaccagccccacattgtcaactacctgacggagaacccccacaagaaggcggacatgcggcgccaggactcgcgaggcaacacagtgctgcatgcgctggtggccattgctgacaacacccgtgagaacaccaagtttgttaccaagatgtacgacctgctgctgctcaagtgtgcccgcctcttccccgacagcaacctggaggccgtgctcaacaacgacggcctctcgcccctcatgatggctgccaagacgggcaagattgggatctttcagcacatcatccggcgggaggtgacggatgaggacacacggcacctgtcccgcaagttcaaggactgggcctatgggccagtgtattcctcgctttatgacctctcctccctggacacgtgtggggaagaggcctccgtgctggagatcctggtgtacaacagcaagattgagaaccgccacgagatgctggctgtggagcccatcaatgaactgctgcgggacaagtggcgcaagttcggggccgtctccttctacatcaacgtggtctcctacctgtgtgccatggtcatcttcactctcaccgcctactaccagccgctggagggcacaccgccgtacccttaccgcaccacggtggactacctgcggctggctggcgaggtcattacgctcttcactggggtcctgttcttcttcaccaacatcaaagacttgttcatgaagaaatgccctggagtgaattctctcttcattgatggctccttccagctgctctacttcatctactctgtcctggtgatcgtctcagcagccctctacctggcagggatcgaggcctacctggccgtgatggtctttgccctggtcctgggctggatgaatgccctttacttcacccgtgggctgaagctgacggggacctatagcatcatgatccagaagattctcttcaaggaccttttccgattcctgctcgtctacttgctcttcatgatcggctacgcttcagccctggtctccctcctgaacccgtgtgccaacatgaaggtgtgcaatgaggaccagaccaactgcacagtgcccacttacccctcgtgccgtgacagcgagaccttcagcaccttcctcctggacctgtttaagctgaccatcggcatgggcgacctggagatgctgagcagcaccaagtaccccgtggtcttcatcatcctgctggtgacctacatcatcctcacctttgtgctgctcctcaacatgctcattgccctcatgggcgagacagtgggccaggtctccaaggagagcaagcacatctggaagctgcagtgggccaccaccatcctggacattgagcgctccttccccgtattcctgaggaaggccttccgctctggggagatggtcaccgtgggcaagagctcggacggcactcctgaccgcaggtggtgcttcagggtggatgaggtgaactggtctcactggaaccagaacttgggcatcatcaacgaggacccgggcaagaatgagacctaccagtattatggcttctcgcataccgtgggccgcctccgcagggatcgctggtcctcggtggtaccccgcgtggtggaactgaacaagaactcgaacccggacgaggtggtggtgcctctggacagcatggggaacccccgctgcgatggccaccagcagggttacccccgcaagtggaggactgatgacgccccgctctagggactgcagcccagccccagcttctctgcccactcatttctagtccagccgcatttcagcagtgccttctggggtgtccccccacaccctgctttggccccagaggcgagggaccagtggaggtgccagggaggccccaggaccctgtggtcccctggctctgcctccccaccctggggtgggggctcccggccacctgtcttgctcctatggagtcacataagccaacgccagagcccctccacctcaggccccagcccctgcctctccattatttatttgctctgctctcaggaagcgacgtgacccctgccccagctggaacctggcagaggccttaggaccccgttccaagtgcactgcccggccaagccccagcctcagcctgcgcctgagctgcatgcgccaccatttttggcagcgtggcagctttgcaaggggctggggccctcggcgtggggccatgccttctgtgtgttctgtagtgtctgggatttgccggtgctcaataaatgtttattcattgacggtggaga

SEQ ID NO: 192844 - DNA, 2804 bp, Homo sapiens
  Payload ID: 18064
  Gene Name: transient receptor potential cation channel, subfamily V, member 4
  ENST ID: ENST00000538125
  CDS Start-End: 84-1742
gggattcaggaagcgcggatctcccggccgccggcgcccagccgtcccggaggctgagcagtgcagacgggcctggggcaggcatggcggattccagcgaaggcccccgcgcggggcccggggaggtggctgagctccccggggatgagagtggcaccccaggtggggaggcttttcctctctcctccctggccaatctgtttgagggggaggatggctccctttcgccctcaccggctgatgccagtcgccctgctggcccaggcgatgggcgaccaaatctgcgcatgaagttccagggcgccttccgcaagggggtgcccaaccccatcgatctgctggagtccaccctatatgagtcctcggtggtgcctgggcccaagaaagcacccatggactcactgtttgactacggcacctatcgtcaccactccagtgacaacaagaggtggaggaagaagatcatagagaagcagccgcagagccccaaagcccctgcccctcagccgccccccatcctcaaagtcttcaaccggcctatcctctttgacatcgtgtcccggggctccactgctgacctggacgggctgctcccattcttgctgacccacaagaaacgcctaactgatgaggagtttcgagagccatctacggggaagacctgcctgcccaaggccttgctgaacctgagcaatggccgcaacgacaccatccctgtgctgctggacatcgcggagcgcaccggcaacatgagggagttcattaactcgcccttccgtgacatctactatcgaggtcagacagccctgcacatcgccattgagcgtcgctgcaaacactacgtggaacttctcgtggcccagggagctgatgtccacgcccaggcccgtgggcgcttcttccagcccaaggatgaggggggctacttctactttggggagctgcccctgtcgctggctgcctgcaccaaccagccccacattgtcaactacctgacggagaacccccacaagaaggcggacatgcggcgccaggactcgcgaggcaacacagtgctgcatgcgctggtggccattgctgacaacacccgtgagaacaccaagtttgttaccaagatgtacgacctgctgctgctcaagtgtgcccgcctcttccccgacagcaacctggaggccgtgctcaacaacgacggcctctcgcccctcatgatggctgccaagacgggcaagattgggatctttcagcacatcatccggcgggaggtgacggatgaggacacacggcacctgtcccgcaagttcaaggactgggcctatgggccagtgtattcctcgctttatgacctctcctccctggacacgtgtggggaagaggcctccgtgctggagatcctggtgtacaacagcaagattgagaaccgccacgagatgctggctgtggagcccatcaatgaactgctgcgggacaagtggcgcaagttcggggccgtctccttctacatcaacgtggtctcctacctgtgtgccatggtcatcttcactctcaccgcctactaccagccgctggagggcacaccgccgtacccttaccgcaccacggtggactacctgcggctggctggcgaggtcattacgctcttcactggggtcctgttcttcttcaccaacatcaaagacttgttcatgaagaaatgccctggagtgaattctctcttcattgatggctccttccagctgctctagtgagtagaggtccctgggccggcagcttctgggtgaggaagcttcatctactctgtcctggtgatcgtctcagcagccctctacctggcagggatcgaggcctacctggccgtgatggtctttgccctggtcctgggctggatgaatgccctttacttcacccgtgggctgaagctgacggggacctatagcatcatgatccagaagattctcttcaaggaccttttccgattcctgctcgtctacttgctcttcatgatcggctacgcttcagccctggtctccctcctgaacccgtgtgccaacatgaaggtgtgcaatgaggaccagaccaactgcacagtgcccacttacccctcgtgccgtgacagcgagaccttcagcaccttcctcctggacctgtttaagctgaccatcggcatgggcgacctggagatgctgagcagcaccaagtaccccgtggtcttcatcatcctgctggtgacctacatcatcctcacctttgtgctgctcctcaacatgctcattgccctcatgggcgagacagtgggccaggtctccaaggagagcaagcacatctggaagctgcagtgggccaccaccatcctggacattgagcgctccttccccgtattcctgaggaaggccttccgctctggggagatggtcaccgtgggcaagagctcggacggcactcctgaccgcaggtggtgcttcagggtggatgaggtgaactggtctcactggaaccagaacttgggcatcatcaacgaggacccgggcaagaatgagacctaccagtattatggcttctcgcataccgtgggccgcctccgcagggatcgctggtcctcggtggtaccccgcgtggtggaactgaacaagaactcgaacccggacgaggtggtggtgcctctggacagcatggggaacccccgctgcgatggccaccagcagggttacccccgcaagtggaggactgatgacgccccgctctagggactgcagcccagccccagcttctctgcccactcatttctagtccagccgcatttcagcagt

SEQ ID NO: 192845 - DNA, 2475 bp, Homo sapiens
  Payload ID: 18064
  Gene Name: transient receptor potential cation channel, subfamily V, member 4
  Uniprot ID: Q9HBA0
  ENST ID: ENST00000541794
  CDS Start-End: 1-2475
atggcggattccagcgaaggcccccgcgcggggcccggggaggtggctgagctccccggggatgagagtggcaccccaggtggggaggcttttcctctctcctccctggccaatctgtttgagggggaggatggctccctttcgccctcaccggctgatgccagtcgccctgctggcccaggcgatgggcgaccaaatctgcgcatgaagttccagggcgccttccgcaagggggtgcccaaccccatcgatctgctggagtccaccctatatgagtcctcggtggtgcctgggcccaagaaagcacccatggactcactgtttgactacggcacctatcgtcaccactccagtgacaacaagaggtggaggaagaagatcatagagaagcagccgcagagccccaaagcccctgcccctcagccgccccccatcctcaaagtcttcaaccggcctatcctctttgacatcgtgtcccggggctccactgctgacctggacgggctgctcccattcttgctgacccacaagaaacgcctaactgatgaggagtttcgagagccatctacggggaagacctgcctgcccaaggccttgctgaacctgagcaatggccgcaacgacaccatccctgtgctgctggacatcgcggagcgcaccggcaacatgagggagttcattaactcgcccttccgtgacatctactatcgaggggagctgcccctgtcgctggctgcctgcaccaaccagccccacattgtcaactacctgacggagaacccccacaagaaggcggacatgcggcgccaggactcgcgaggcaacacagtgctgcatgcgctggtggccattgctgacaacacccgtgagaacaccaagtttgttaccaagatgtacgacctgctgctgctcaagtgtgcccgcctcttccccgacagcaacctggaggccgtgctcaacaacgacggcctctcgcccctcatgatggctgccaagacgggcaagattgggatctttcagcacatcatccggcgggaggtgacggatgaggacacacggcacctgtcccgcaagttcaaggactgggcctatgggccagtgtattcctcgctttatgacctctcctccctggacacgtgtggggaagaggcctccgtgctggagatcctggtgtacaacagcaagattgagaaccgccacgagatgctggctgtggagcccatcaatgaactgctgcgggacaagtggcgcaagttcggggccgtctccttctacatcaacgtggtctcctacctgtgtgccatggtcatcttcactctcaccgcctactaccagccgctggagggcacaccgccgtacccttaccgcaccacggtggactacctgcggctggctggcgaggtcattacgctcttcactggggtcctgttcttcttcaccaacatcaaagacttgttcatgaagaaatgccctggagtgaattctctcttcattgatggctccttccagctgctctacttcatctactctgtcctggtgatcgtctcagcagccctctacctggcagggatcgaggcctacctggccgtgatggtctttgccctggtcctgggctggatgaatgccctttacttcacccgtgggctgaagctgacggggacctatagcatcatgatccagaagattctcttcaaggaccttttccgattcctgctcgtctacttgctcttcatgatcggctacgcttcagccctggtctccctcctgaacccgtgtgccaacatgaaggtgtgcaatgaggaccagaccaactgcacagtgcccacttacccctcgtgccgtgacagcgagaccttcagcaccttcctcctggacctgtttaagctgaccatcggcatgggcgacctggagatgctgagcagcaccaagtaccccgtggtcttcatcatcctgctggtgacctacatcatcctcacctttgtgctgctcctcaacatgctcattgccctcatgggcgagacagtgggccaggtctccaaggagagcaagcacatctggaagctgcagtgggccaccaccatcctggacattgagcgctccttccccgtattcctgaggaaggccttccgctctggggagatggtcaccgtgggcaagagctcggacggcactcctgaccgcaggtggtgcttcagggtggatgaggtgaactggtctcactggaaccagaacttgggcatcatcaacgaggacccgggcaagaatgagacctaccagtattatggcttctcgcataccgtgggccgcctccgcagggatcgctggtcctcggtggtaccccgcgtggtggaactgaacaagaactcgaacccggacgaggtggtggtgcctctggacagcatggggaacccccgctgcgatggccaccagcagggttacccccgcaagtggaggactgatgacgccccgctctag

SEQ ID NO: 192846 - DNA, 2436 bp, Homo sapiens
  Payload ID: 18064
  Gene Name: transient receptor potential cation channel, subfamily V, member 4
  Uniprot ID: Q9HBA0
  ENST ID: ENST00000537083
  CDS Start-End: 1-2436
atggcggattccagcgaaggcccccgcgcggggcccggggaggtggctgagctccccggggatgagagtggcaccccaggtggggaggcttttcctctctcctccctggccaatctgtttgagggggaggatggctccctttcgccctcaccggctgatgccagtcgccctgctggcccaggcgatgggcgaccaaatctgcgcatgaagttccagggcgccttccgcaagggggtgcccaaccccatcgatctgctggagtccaccctatatgagtcctcggtggtgcctgggcccaagaaagcacccatggactcactgtttgactacggcacctatcgtcaccactccagtgacaacaagaggtggaggaagaagatcatagagaagcagccgcagagccccaaagcccctgcccctcagccgccccccatcctcaaagtcttcaaccggcctatcctctttgacatcgtgtcccggggctccactgctgacctggacgggctgctcccattcttgctgacccacaagaaacgcctaactgatgaggagtttcgagagccatctacggggaagacctgcctgcccaaggccttgctgaacctgagcaatggccgcaacgacaccatccctgtgctgctggacatcgcggagcgcaccggcaacatgagggagttcattaactcgcccttccgtgacatctactatcgaggtcagacagccctgcacatcgccattgagcgtcgctgcaaacactacgtggaacttctcgtggcccagggagctgatgtccacgcccaggcccgtgggcgcttcttccagcccaaggatgaggggggctacttctactttggggagctgcccctgtcgctggctgcctgcaccaaccagccccacattgtcaactacctgacggagaacccccacaagaaggcggacatgcggcgccaggactcgcgaggcaacacagtgctgcatgcgctggtggccattgctgacaacacccgtgagaacaccaagtttgttaccaagatgtacgacctgctgctgctcaagtgtgcccgcctcttccccgacagcaacctggaggccgtgctcaacaacgacggcctctcgcccctcatgatggctgccaagacgggcaagattgggaaccgccacgagatgctggctgtggagcccatcaatgaactgctgcgggacaagtggcgcaagttcggggccgtctccttctacatcaacgtggtctcctacctgtgtgccatggtcatcttcactctcaccgcctactaccagccgctggagggcacaccgccgtacccttaccgcaccacggtggactacctgcggctggctggcgaggtcattacgctcttcactggggtcctgttcttcttcaccaacatcaaagacttgttcatgaagaaatgccctggagtgaattctctcttcattgatggctccttccagctgctctacttcatctactctgtcctggtgatcgtctcagcagccctctacctggcagggatcgaggcctacctggccgtgatggtctttgccctggtcctgggctggatgaatgccctttacttcacccgtgggctgaagctgacggggacctatagcatcatgatccagaagattctcttcaaggaccttttccgattcctgctcgtctacttgctcttcatgatcggctacgcttcagccctggtctccctcctgaacccgtgtgccaacatgaaggtgtgcaatgaggaccagaccaactgcacagtgcccacttacccctcgtgccgtgacagcgagaccttcagcaccttcctcctggacctgtttaagctgaccatcggcatgggcgacctggagatgctgagcagcaccaagtaccccgtggtcttcatcatcctgctggtgacctacatcatcctcacctttgtgctgctcctcaacatgctcattgccctcatgggcgagacagtgggccaggtctccaaggagagcaagcacatctggaagctgcagtgggccaccaccatcctggacattgagcgctccttccccgtattcctgaggaaggccttccgctctggggagatggtcaccgtgggcaagagctcggacggcactcctgaccgcaggtggtgcttcagggtggatgaggtgaactggtctcactggaaccagaacttgggcatcatcaacgaggacccgggcaagaatgagacctaccagtattatggcttctcgcataccgtgggccgcctccgcagggatcgctggtcctcggtggtaccccgcgtggtggaactgaacaagaactcgaacccggacgaggtggtggtgcctctggacagcatggggaacccccgctgcgatggccaccagcagggttacccccgcaagtggaggactgatgacgccccgctctag

SEQ ID NO: 192847 - DNA, 2295 bp, Homo sapiens
  Payload ID: 18064
  Gene Name: transient receptor potential cation channel, subfamily V, member 4
  Uniprot ID: Q9HBA0
  ENST ID: ENST00000544971
  CDS Start-End: 1-2295
atggcggattccagcgaaggcccccgcgcggggcccggggaggtggctgagctccccggggatgagagtggcaccccaggtggggaggcttttcctctctcctccctggccaatctgtttgagggggaggatggctccctttcgccctcaccggctgatgccagtcgccctgctggcccaggcgatgggcgaccaaatctgcgcatgaagttccagggcgccttccgcaagggggtgcccaaccccatcgatctgctggagtccaccctatatgagtcctcggtggtgcctgggcccaagaaagcacccatggactcactgtttgactacggcacctatcgtcaccactccagtgacaacaagaggtggaggaagaagatcatagagaagcagccgcagagccccaaagcccctgcccctcagccgccccccatcctcaaagtcttcaaccggcctatcctctttgacatcgtgtcccggggctccactgctgacctggacgggctgctcccattcttgctgacccacaagaaacgcctaactgatgaggagtttcgagagccatctacggggaagacctgcctgcccaaggccttgctgaacctgagcaatggccgcaacgacaccatccctgtgctgctggacatcgcggagcgcaccggcaacatgagggagttcattaactcgcccttccgtgacatctactatcgaggggagctgcccctgtcgctggctgcctgcaccaaccagccccacattgtcaactacctgacggagaacccccacaagaaggcggacatgcggcgccaggactcgcgaggcaacacagtgctgcatgcgctggtggccattgctgacaacacccgtgagaacaccaagtttgttaccaagatgtacgacctgctgctgctcaagtgtgcccgcctcttccccgacagcaacctggaggccgtgctcaacaacgacggcctctcgcccctcatgatggctgccaagacgggcaagattgggaaccgccacgagatgctggctgtggagcccatcaatgaactgctgcgggacaagtggcgcaagttcggggccgtctccttctacatcaacgtggtctcctacctgtgtgccatggtcatcttcactctcaccgcctactaccagccgctggagggcacaccgccgtacccttaccgcaccacggtggactacctgcggctggctggcgaggtcattacgctcttcactggggtcctgttcttcttcaccaacatcaaagacttgttcatgaagaaatgccctggagtgaattctctcttcattgatggctccttccagctgctctacttcatctactctgtcctggtgatcgtctcagcagccctctacctggcagggatcgaggcctacctggccgtgatggtctttgccctggtcctgggctggatgaatgccctttacttcacccgtgggctgaagctgacggggacctatagcatcatgatccagaagattctcttcaaggaccttttccgattcctgctcgtctacttgctcttcatgatcggctacgcttcagccctggtctccctcctgaacccgtgtgccaacatgaaggtgtgcaatgaggaccagaccaactgcacagtgcccacttacccctcgtgccgtgacagcgagaccttcagcaccttcctcctggacctgtttaagctgaccatcggcatgggcgacctggagatgctgagcagcaccaagtaccccgtggtcttcatcatcctgctggtgacctacatcatcctcacctttgtgctgctcctcaacatgctcattgccctcatgggcgagacagtgggccaggtctccaaggagagcaagcacatctggaagctgcagtgggccaccaccatcctggacattgagcgctccttccccgtattcctgaggaaggccttccgctctggggagatggtcaccgtgggcaagagctcggacggcactcctgaccgcaggtggtgcttcagggtggatgaggtgaactggtctcactggaaccagaacttgggcatcatcaacgaggacccgggcaagaatgagacctaccagtattatggcttctcgcataccgtgggccgcctccgcagggatcgctggtcctcggtggtaccccgcgtggtggaactgaacaagaactcgaacccggacgaggtggtggtgcctctggacagcatggggaacccccgctgcgatggccaccagcagggttacccccgcaagtggaggactgatgacgccccgctctag

SEQ ID NO: 192848 - DNA, 2514 bp, Homo sapiens
  Payload ID: 18064
  Gene Name: transient receptor potential cation channel, subfamily V, member 4
  Uniprot ID: Q9HBA0
  ENST ID: ENST00000536838
  CDS Start-End: 1-2514
atggcggattccagcgaaggcccccgcgcggggcccggggaggtggctgagctccccggggatgagagtggcaccccaggcgatgggcgaccaaatctgcgcatgaagttccagggcgccttccgcaagggggtgcccaaccccatcgatctgctggagtccaccctatatgagtcctcggtggtgcctgggcccaagaaagcacccatggactcactgtttgactacggcacctatcgtcaccactccagtgacaacaagaggtggaggaagaagatcatagagaagcagccgcagagccccaaagcccctgcccctcagccgccccccatcctcaaagtcttcaaccggcctatcctctttgacatcgtgtcccggggctccactgctgacctggacgggctgctcccattcttgctgacccacaagaaacgcctaactgatgaggagtttcgagagccatctacggggaagacctgcctgcccaaggccttgctgaacctgagcaatggccgcaacgacaccatccctgtgctgctggacatcgcggagcgcaccggcaacatgagggagttcattaactcgcccttccgtgacatctactatcgaggtcagacagccctgcacatcgccattgagcgtcgctgcaaacactacgtggaacttctcgtggcccagggagctgatgtccacgcccaggcccgtgggcgcttcttccagcccaaggatgaggggggctacttctactttggggagctgcccctgtcgctggctgcctgcaccaaccagccccacattgtcaactacctgacggagaacccccacaagaaggcggacatgcggcgccaggactcgcgaggcaacacagtgctgcatgcgctggtggccattgctgacaacacccgtgagaacaccaagtttgttaccaagatgtacgacctgctgctgctcaagtgtgcccgcctcttccccgacagcaacctggaggccgtgctcaacaacgacggcctctcgcccctcatgatggctgccaagacgggcaagattgggatctttcagcacatcatccggcgggaggtgacggatgaggacacacggcacctgtcccgcaagttcaaggactgggcctatgggccagtgtattcctcgctttatgacctctcctccctggacacgtgtggggaagaggcctccgtgctggagatcctggtgtacaacagcaagattgagaaccgccacgagatgctggctgtggagcccatcaatgaactgctgcgggacaagtggcgcaagttcggggccgtctccttctacatcaacgtggtctcctacctgtgtgccatggtcatcttcactctcaccgcctactaccagccgctggagggcacaccgccgtacccttaccgcaccacggtggactacctgcggctggctggcgaggtcattacgctcttcactggggtcctgttcttcttcaccaacatcaaagacttgttcatgaagaaatgccctggagtgaattctctcttcattgatggctccttccagctgctctacttcatctactctgtcctggtgatcgtctcagcagccctctacctggcagggatcgaggcctacctggccgtgatggtctttgccctggtcctgggctggatgaatgccctttacttcacccgtgggctgaagctgacggggacctatagcatcatgatccagaagattctcttcaaggaccttttccgattcctgctcgtctacttgctcttcatgatcggctacgcttcagccctggtctccctcctgaacccgtgtgccaacatgaaggtgtgcaatgaggaccagaccaactgcacagtgcccacttacccctcgtgccgtgacagcgagaccttcagcaccttcctcctggacctgtttaagctgaccatcggcatgggcgacctggagatgctgagcagcaccaagtaccccgtggtcttcatcatcctgctggtgacctacatcatcctcacctttgtgctgctcctcaacatgctcattgccctcatgggcgagacagtgggccaggtctccaaggagagcaagcacatctggaagctgcagtgggccaccaccatcctggacattgagcgctccttccccgtattcctgaggaaggccttccgctctggggagatggtcaccgtgggcaagagctcggacggcactcctgaccgcaggtggtgcttcagggtggatgaggtgaactggtctcactggaaccagaacttgggcatcatcaacgaggacccgggcaagaatgagacctaccagtattatggcttctcgcataccgtgggccgcctccgcagggatcgctggtcctcggtggtaccccgcgtggtggaactgaacaagaactcgaacccggacgaggtggtggtgcctctggacagcatggggaacccccgctgcgatggccaccagcagggttacccccgcaagtggaggactgatgacgccccgctctag

SEQ ID NO: 192849 - DNA, 2952 bp, Homo sapiens
  Payload ID: 18065
  Gene Name: transient receptor potential cation channel, subfamily V, member 5
  ENST ID: ENST00000265310
  CDS Start-End: 350-2539
ctcagctctgcaaagagctcctccccctccaggaaaagcacttctccccaggcagggcggtcagtcccctcagcgcacctgcatgcacacacaccacctcacaaccacacactgcatgcacacacatacaccacagccacacactgtgcatacacgcacaccccacaacccacatactgcatgcacacacacacacctacaagctgcatgctgcatacacaagtcatacaggagataaactcagagtcccagccccaaatagaccccatctcttgctcagttgctgtcatcctagacctgtttctttcgccacatttctataatctgccagtgtctgcaaggagaagacatggggggttttctacctaaggcagaagggcccgggagccaactccagaaacttctgccctcctttctggtcagagaacaagactgggaccagcacctggacaagcttcatatgctgcagcagaagaggattctagagtctccactgcttcgagcatccaaggaaaatgacctgtctgttcttaggcaacttctactggactgcacctgtgacgttcgacaaagaggagccctgggggagacggcgctgcacatagcagccctctatgacaacttggaggcggccttggtgctgatggaggctgccccagagctggtctttgagcccaccacatgtgaggcttttgcaggtcagactgcactgcacatcgctgttgtgaaccagaatgtgaacctggtgcgtgccctgctcacccgcagggccagtgtctctgccagagccacaggcactgccttccgccatagtccccgcaacctcatctactttggggagcaccctttgtcctttgctgcctgtgtgaacagcgaggagatcgtgcggctgctcattgagcatggagctgacatcagggcccaggactccctgggaaacacagtattacacatcctcatcctccagcccaacaaaacctttgcctgccagatgtacaacctgctgctgtcctatgatggacatggggaccacctgcagcccctggaccttgtgcccaatcaccagggtctcacccccttcaagctggctggagtggagggtaacactgtgatgttccagcacctgatgcagaagcggaggcacatccagtggacgtatggacccctgacctccattctctacgacctcacggagatcgactcctggggagaggagctgtccttcctggagcttgtggtctcctctgataaacgagaggctcgccaaattctggaacagaccccagtgaaggagctggtgagcttcaagtggaacaagtatggccggccgtacttctgcatcctggctgccttgtacctgctctacatgatctgctttactacgtgctgcgtctaccgcccccttaagtttcgtggtggcaaccgcactcattctcgagacatcaccatcctccagcaaaaactactacaggaggcctatgagacacgtgaagatatcatcaggctggtgggggagctggtgagcatcgttggggctgtgatcatcctgctcctagagattccagacatcttcagggttggtgcctctcgctattttggaaagacgattcttggggggccattccatgtcatcatcatcacctatgcctccctggtgctggtgaccatggtgatgcggctcaccaacaccaatggggaggtggtgcccatgtcctttgccctggtgctgggctggtgcagtgtcatgtatttcactcgaggattccagatgctgggtcccttcaccatcatgatccagaagatgatttttggagacctaatgcgtttctgctggctgatggctgtggtcatcttgggatttgcctccgcgttctatatcattttccagacagaggacccaaccagtctggggcaattctatgactaccccatggcactgttcaccacctttgagctttttctcactgttattgatgcacctgccaactacgacgtggacttgcccttcatgttcagcattgtcaacttcgccttcaccatcattgccacactgctcatgctcaacttgttcatcgccatgatgggcgacacccactggagggtggcccaggagagggatgagctctggagggcccaggtcgtggccaccacagtgatgctggagcggaagctgcctcgctgcctgtggcctcgctccgggatctgtgggtgcgaattcgggctgggggaccgctggttcctgcgggttgagaaccacaatgatcagaatcctctgcgagtgcttcgctatgtggaagtgttcaagaactcagacaaggaggatgaccaggagcatccatctgagaaacagccctctggggctgagagtgggactctagccagagcctctttggctcttccaacttcctccctgtcccggaccgcgtcccagagcagcagtcaccgaggctgggagatccttcgtcaaaacaccctggggcacttgaatcttggactgaaccttagtgagggggatggagaggaggtctaccatttttgattaacatcgctatcactcttgaccttactcccggttggcctgggggcggggacagagacggagacctctgcctatgcaagtgtctaacttctgtgcctgttaatcatgggagggtgagacagaacaatccctaaagggtcatgcctcacacttcacatcagaatttctggcaatgggcaatggtcatcgattgtctcacgtattttctgggctcttgcaagtcacccatctcaggaaaaaggaggttggcaactaaagacatgaggcagggatgctagattaatgtcaggaccatttctcttctgccccacgcagcccctagaaagtagtaagctgtgaggcttttctggctccccagggcttacgtgggaagagccaggcatggcatagaggttgtggcccttctttttttc

SEQ ID NO: 192850 - DNA, 2025 bp, Homo sapiens
  Payload ID: 18065
  Gene Name: transient receptor potential cation channel, subfamily V, member 5
  ENST ID: ENST00000439304
  CDS Start-End: 1-2025
aaggcagaagggcccgggagccaactccagaaacttctgccctcctttctggtcagagaacaagactgggaccagcacctggacaagcttcatatgctgcagcagaagaggattctagagtctccactgcttcgagcatccaaggaaaatgacctgtctgttcttaggcaacttctactggactgcacctgtgacgttcgacaaagaggagccctgggggagacggcgctgcacatagcagccctctatgacaacttggaggcggccttggtgctgatggaggctgccccagagctggtctttgagcccaccacatgtgaggcttttgcaggtcagactgcactgcacatcgctgttgtgaaccagaatgtgaacctggtgcgtgccctgctcacccgcagggccagtgtctctgccagagccacaggcactgccttccgccatagtccccgcaacctcatctactttggggagcaccctttgtcctttgctgcctgtgtgaacagcgaggagatcgtgcggctgctcattgagcatggagctgacatcagggcccaggactccctgggaaacacagtattacacatcctcatcctccagcccaacaaaacctttgcctgccagatgtacaacctgctgctgtcctatgatggacatggggaccacctgcagcccctggaccttgtgcccaatcaccagggtctcacccccttcaagctggctggagtggagggtaacactgtggctcgccaaattctggaacagaccccagtgaaggagctggtgagcttcaagtggaacaagtatggccggccgtacttctgcatcctggctgccttgtacctgctctacatgatctgctttactacgtgctgcgtctaccgcccccttaagtttcgtggtggcaaccgcactcattctcgagacatcaccatcctccagcaaaaactactacaggaggcctatgagacacgtgaagatatcatcaggctggtgggggagctggtgagcatcgttggggctgtgatcatcctgctcctagagattccagacatcttcagggttggtgcctctcgctattttggaaagacgattcttggggggccattccatgtcatcatcatcacctatgcctccctggtgctggtgaccatggtgatgcggctcaccaacaccaatggggaggtggtgcccatgtcctttgccctggtgctgggctggtgcagtgtcatgtatttcactcgaggattccagatgctgggtcccttcaccatcatgatccagaagatgatttttggagacctaatgcgtttctgctggctgatggctgtggtcatcttgggatttgcctccgcgttctatatcattttccagacagaggacccaaccagtctggggcaattctatgactaccccatggcactgttcaccacctttgagctttttctcactgttattgatgcacctgccaactacgacgtggacttgcccttcatgttcagcattgtcaacttcgccttcaccatcattgccacactgctcatgctcaacttgttcatcgccatgatgggcgacacccactggagggtggcccaggagagggatgagctctggagggcccaggtcgtggccaccacagtgatgctggagcggaagctgcctcgctgcctgtggcctcgctccgggatctgtgggtgcgaattcgggctgggggaccgctggttcctgcgggttgagaaccacaatgatcagaatcctctgcgagtgcttcgctatgtggaagtgttcaagaactcagacaaggaggatgaccaggagcatccatctgagaaacagccctctggggctgagagtgggactctagccagagcctctttggctcttccaacttcctccctgtcccggaccgcgtcccagagcagcagtcaccgaggctgggagatccttcgtcaaaacaccctggggcacttgaatcttggactgaaccttagtgagggggatggagaggaggtctaccatttttga

SEQ ID NO: 192851 - DNA, 2120 bp, Homo sapiens
  Payload ID: 18065
  Gene Name: transient receptor potential cation channel, subfamily V, member 5
  Uniprot ID: Q9NQA5
  ENST ID: ENST00000442623
  CDS Start-End: 265-1410
cacacacaccacctcacaaccacacactgcatgcacacacatacaccacagccacacactgtgcatacacgcacaccccacaacccacatactgcatgcacacacacacacctacaagctgcatgctgcatacacaagtcatacaggagataaactcagagtcccagccccaaatagaccccatctcttgctcagttgctgtcatcctagacctgtttctttcgccacatttctataatctgccagtgtctgcaaggagaagacatggggggttttctacctaaggcagaagggcccgggagccaactccagaaacttctgccctcctttctggtcagagaacaagactgggaccagcacctggacaagcttcatatgctgcagcagaagaggattctagagtctccactgcttcgagcatccaaggaaaatgacctgtctgttcttaggcaacttctactggactgcacctgtgacgttcgacaaagaggagccctgggggagacggcgctgcacatagcagccctctatgacaacttggaggcggccttggtgctgatggaggctgccccagagctggtctttgagcccaccacatgtgaggcttttgcaggtcagactgcactgcacatcgctgttgtgaaccagaatgtgaacctggtgcgtgccctgctcacccgcagggccagtgtctctgccagagccacaggcactgccttccgccatagtccccgcaacctcatctactttggggagcaccctttgtcctttgctgcctgtgtgaacagcgaggagatcgtgcggctgctcattgagcatggagctgacatcagggcccaggactccctgggaaacacagtattacacatcctcatcctccagcccaacaaaacctttgcctgccagatgtacaacctgctgctgtcctatgatggacatggggaccacctgcagcccctggaccttgtgcccaatcaccagggtctcacccccttcaagctggctggagtggagggtaacactgtgatgttccagcacctgatgcagaagcggaggcacatccagtggacgtatggacccctgacctccattctctacgacctcacggagatcgactcctggggagaggagctgtccttcctggagcttgtggtctcctctgataaacgagaggctcgccaaattctggaacagaccccagtgaaggagctggtgagcttcaagtggaacaagtatggccggccgtacttctgcatcctggctgccttgtacctgctctacatgatctgctttactacgtgctgcgtctaccgcccccttaagtttcgtggtggcaaccgcactcattctcgagacatcaccatcctccagcaaaaactactacaggtgattctcctcagaaggggatgagagagaattgcatcaaggggtgatggtgctggaaacgaagccatgctactcagggacgatgccacgctctgggttccagcaggtgtaggctcctaaacacccaggtagaaattagacatgagaccaggaggccacagatggggtttaatgagcacaagagcatttgtccagggagctgtggattttctcacacaaactttgaaagagtgcttggcatgagtaagcctgtgcttttgtgaaattttttggtaatttacaaaaagtatcagggttttttagtgggatgttcaaggtaaactctattgctcaaaaggaggaaaattgtgctccaagtccatttctgagtccatttttgttgtatttgggcaacacagacagccctgctggcctgcaccctcttctgtgtgctgtctatatgggcccatgggaataatgtgtcagctgtctgactgcctgtcagacactctgcagaaggatgtctggattgggtatcaggctgaagtaaatactctctgaggctccatttagtgttgtgggcctgccattctgtgttgtggtggccaagggaaaactagggttaggaagaggactgattcgaggtacacagtaaatatagaaatctgctgttgaagaaagtaaacctcctttttgtgcaacagaaagggtagactctaatgagcacttctgaatatatatatttaacaactgta

SEQ ID NO: 192852 - DNA, 2952 bp, Homo sapiens; identical to SEQ ID NO: 192849
  Payload ID: 18065
  Gene Name: transient receptor potential cation channel, subfamily V, member 5
  ENST ID: ENST00000621710
  CDS Start-End: 350-2539

SEQ ID NO: 192853 - DNA, 2025 bp, Homo sapiens; identical to SEQ ID NO: 192850
  Payload ID: 18065
  Gene Name: transient receptor potential cation channel, subfamily V, member 5
  ENST ID: ENST00000633909
  CDS Start-End: 1-2025

SEQ ID NO: 192854 - DNA, 2120 bp, Homo sapiens; identical to SEQ ID NO: 192851
  Payload ID: 18065
  Gene Name: transient receptor potential cation channel, subfamily V, member 5
  ENST ID: ENST00000633067
  CDS Start-End: 265-1410

SEQ ID NO: 192855 - DNA, 2928 bp, Homo sapiens
  Payload ID: 18066
  Gene Name: transient receptor potential cation channel, subfamily V, member 6
  Uniprot ID: Q9H1D0
  ENST ID: ENST00000359396
  CDS Start-End: 127-2424
agacaggccagccctgcagagtcctggctggctctgccaagtgtaacaaactcacagccctctccaaactggctggggctgctgggagactcccaaggaactcgtcaggaaggcaggagacaggagacgggacctctacagggagacggtgggccggcccttgggggggctgatgtggccccaaggctgagtcccgtcagggtctggcctcggcctcaggcccccaaggagccggccctacaccccatgggtttgtcactgcccaaggagaaagggctaattctctgcctatggagcaagttctgcagatggttccagagacgggagtcctgggcccagagccgagatgagcagaacctgctgcagcagaagaggatctgggagtctcctctccttctagctgccaaagataatgatgtccaggccctgaacaagttgctcaagtatgaggattgcaaggtgcaccagagaggagccatgggggaaacagcgctacacatagcagccctctatgacaacctggaggccgccatggtgctgatggaggctgccccggagctggtctttgagcccatgacatctgagctctatgagggtcagactgcactgcacatcgctgttgtgaaccagaacatgaacctggtgcgagccctgcttgcccgcagggccagtgtctctgccagagccacaggcactgccttccgccgtagtccctgcaacctcatctactttggggagcaccctttgtcctttgctgcctgtgtgaacagtgaggagatcgtgcggctgctcattgagcatggagctgacatccgggcccaggactccctgggaaacacagtgttacacatcctcatcctccagcccaacaaaacctttgcctgccagatgtacaacctgttgctgtcctacgacagacatggggaccacctgcagcccctggacctcgtgcccaatcaccagggtctcacccctttcaagctggctggagtggagggtaacactgtgatgtttcagcacctgatgcagaagcggaagcacacccagtggacgtatggaccactgacctcgactctctatgacctcacagagatcgactcctcaggggatgagcagtccctgctggaacttatcatcaccaccaagaagcgggaggctcgccagatcctggaccagacgccggtgaaggagctggtgagcctcaagtggaagcggtacgggcggccgtacttctgcatgctgggtgccatatatctgctgtacatcatctgcttcaccatgtgctgcatctaccgccccctcaagcccaggaccaataaccgcacgagcccccgggacaacaccctcttacagcagaagctacttcaggaagcctacatgacccctaaggacgatatccggctggtcggggagctggtgactgtcattggggctatcatcatcctgctggtagaggttccagacatcttcagaatgggggtcactcgcttctttggacagaccatccttgggggcccattccatgtcctcatcatcacctatgccttcatggtgctggtgaccatggtgatgcggctcatcagtgccagcggggaggtggtacccatgtcctttgcactcgtgctgggctggtgcaacgtcatgtacttcgcccgaggattccagatgctaggccccttcaccatcatgattcagaagatgatttttggcgacctgatgcgattctgctggctgatggctgtggtcatcctgggctttgcttcagccttctatatcatcttccagacagaggaccccgaggagctaggccacttctacgactaccccatggccctgttcagcaccttcgagctgttccttaccatcatcgatggcccagccaactacaacgtggacctgcccttcatgtacagcatcacctatgctgcctttgccatcatcgccacactgctcatgctcaacctcctcattgccatgatgggcgacactcactggcgagtggcccatgagcgggatgagctgtggagggcccagattgtggccaccacagtgatgctggagcggaagctgcctcgctgcctgtggcctcgctccgggatctgcggacgggagtatggcctgggagaccgctggttcctgcgggtggaagacaggcaagatctcaaccggcagcggatccaacgctacgcacaggccttccacacccggggctctgaggatttggacaaagactcagtggaaaaactagagctgggctgtcccttcagcccccacctgtcccttcctatgccctcagtgtctcgaagtacctcccgcagcagtgccaattgggaaaggcttcggcaagggaccctgaggagagacctgcgtgggataatcaacaggggtctggaggacggggagagctgggaatatcagatctgactgcgtgttctcacttcgcttcctggaacttgctctcattttcctgggtgcatcaaacaaaacaaaaaccaaacacccagaggtctcatctcccaggccccaggggagaaagaggagtagcatgaacgccaaggaatgtacgttgagaatcactgctccaggcctgcattactccttcagctctggggcagaggaagcccagcccaagcacggggctggcagggcgtgaggaactctcctgtggcctgctcatcacccttccgacaggagcactgcatgtcagagcactttaaaaacaggccagcctgcttgggcgctcggtctccaccccagggtcataagtggggagagagcccttcccagggcacccaggcaggtgcagggaagtgcagagcttgtggaaagcgtgtgagtgagggagacaggaacggctctgggggtgggaagtggggctaggtcttgccaactccatcttcaataaagtcgttttcggatccctgccca

SEQ ID NO: 192856 - DNA, 532 bp, Homo sapiens
  Payload ID: 18066
  Gene Name: transient receptor potential cation channel, subfamily V, member 6
  ENST ID: ENST00000436401
  CDS Start-End: 167-532
agagtcctggctggctctgccaagtgtaacaaactcacagccctctccaaactggctggggctgctgggagactcccaaggaactcgtcaggaaggcaggaccaataaccgcacgagcccccgggacaacaccctcttacagcagaagctacttcaggaagcctacatgacccctaaggacgatatccggctggtcggggagctggtgactgtcattggggctatcatcatcctgctggtagaggttccagacatcttcagaatgggggtcactcgcttctttggacagaccatccttgggggcccattccatgtcctcatcatcacctatgccttcatggtgctggtgaccatggtgatgcggctcatcagtgccagcggggaggtggtacccatgtcctttgcactcgtgctgggctggtgcaacgtcatgtacttcgcccgaggattccagatgctaggccccttcaccatcatgattcagaagatgatttttggcgacctgatgcgattctgctggctgatggctgtg

SEQ ID NO: 192857 - DNA, 247 bp, Homo sapiens
  Payload ID: 18066
  Gene Name: transient receptor potential cation channel, subfamily V, member 6
  ENST ID: ENST00000431833
  CDS Start-End: 78-247
aggccctgaacaagttgctcaagtatgaggattgcaaggtgcaccagagagaagccatataacccacctctctgtaaatgccaggagccatgggggaaacagcgctacacatagcagccctctatgacaacctggaggccgccatggtgctgatggaggctgccccggagctggtctttgagcccatgacatctgagctctatgagggtcagactgcactgcacatcgctgttgtgaaccagaacat

SEQ ID NO: 192858 - DNA, 3071 bp, Homo sapiens
  Payload ID: 18066
  Gene Name: transient receptor potential cation channel, subfamily V, member 6
  ENST ID: ENST00000463646
  CDS Start-End: 790-2370
ataggatctgggagtctcctctccttctagctgccaaagataatgatgtccaggccctgaacaagttgctcaagtatgaggattgcaaggtgcaccagagaggtaagaagcacaaatgcagcatgatctcctaggtgagccccacacatggggcctcccaggagtgcccaggacctcgtgctgttggcctctgaatctatcgtctccaatccgctgtcccacagaagccatataacccacctctctgtaaatgccaggagccatgggggaaacagcgctacacatagcagccctctatgacaacctggaggccgccatggtgctgatggaggctgccccggagctggtctttgagcccatgacatctgagctctatgagggtgagggcccacgggtctggggtgaagagcaggagtgactggttgggtatttcaagtcagtctctgtgatggataatttgggaaagacacaggggatctgagcctcctactctttttttctcttctctgtctcccttccgtgtcagtcctgactgcccatcactagaacgcctgccccctgaaatgccaggggcctagagaagaggaagagatgggcagcagctggatcccctgggaatcctgaacacccgagagctccctgttctccatcccaggctacccctgagggaaagagactggggtgcatatgggagggaccccctgcaggatcctggggacagacccgtgactgacagctgtctctgggccaggtcagactgcactgcacatcgctgttgtgaaccagaacatgaacctggtgcgagccctgcttgcccgcagggccagtgtctctgccagagccacaggcactgccttccgccgtagtccctgcaacctcatctactttggggagcaccctttgtcctttgctgcctgtgtgaacagtgaggagatcgtgcggctgctcattgagcatggagctgacatccgggcccaggactccctgggaaacacagtgttacacatcctcatcctccagcccaacaaaacctttgcctgccagatgtacaacctgttgctgtcctacgacagacatggggaccacctgcagcccctggacctcgtgcccaatcaccagggtctcacccctttcaagctggctggagtggagggtaacactgtgatgtttcagcacctgatgcagaagcggaagcacacccagtggacgtatggaccactgacctcgactctctatgacctcacagagatcgactcctcaggggatgagcagtccctgctggaacttatcatcaccaccaagaagcgggaggctcgccagatcctggaccagacgccggtgaaggagctggtgagcctcaagtggaagcggtacgggcggccgtacttctgcatgctgggtgccatatatctgctgtacatcatctgcttcaccatgtgctgcatctaccgccccctcaagcccaggaccaataaccgcacgagcccccgggacaacaccctcttacagcagaagctacttcaggaagcctacatgacccctaaggacgatatccggctggtcggggagctggtgactgtcattggggctatcatcatcctgctggtagaggttccagacatcttcagaatgggggtcactcgcttctttggacagaccatccttgggggcccattccatgtcctcatcatcacctatgccttcatggtgctggtgaccatggtgatgcggctcatcagtgccagcggggaggtggtacccatgtcctttgcactcgtgctgggctggtgcaacgtcatgtacttcgcccgaggattccagatgctaggccccttcaccatcatgattcagaagatgatttttggcgacctgatgcgattctgctggctgatggctgtggtcatcctgggctttgcttcagccttctatatcatcttccagacagaggaccccgaggagctaggccacttctacgactaccccatggccctgttcagcaccttcgagctgttccttaccatcatcgatggcccagccaactacaacgtggacctgcccttcatgtacagcatcacctatgctgcctttgccatcatcgccacactgctcatgctcaacctcctcattgccatgatgggcgacactcactggcgagtggcccatgagcgggatgagctgtggagggcccagattgtggccaccacagtgatgctggagcggaagctgcctcgctgcctgtggcctcgctccgggatctgcggacgggagtatggcctgggagaccgctggttcctgcgggtggaagacaggcaagatctcaaccggcagcggatccaacgctacgcacaggccttccacccggggctctgaggatttggacaaagactcagtggaaaaactagagctgggctgtcccttcagcccccacctgtcccttcctatgccctcagtgtctcgaagtacctcccgcagcagtgccaattgggaaaggcttcggcaagggaccctgaggagagacctgcgtgggataatcaacaggggtctggaggacggggagagctgggaatatcagatctgactgcgtgttctcacttcgcttcctggaacttgctctcattttcctgggtgcatcaaacaaaacaaaaaccaaacacccagaggtctcatctcccaggccccaggggagaaagaggagtagcatgaacgccaaggaatgtacgttgagaatcactgctccaggcctgcattactccttcagctctggggcagaggaagcccagcccaagcacggggctggcagggcgtgaggaactctcctgtggcctgctcatcacccttccgacaggagcactgcatgtcagagcactttaaaaacaggccagcctgcttgggcgctcggtctccaccccagggtcataagtggggagagagcccttcccagggcacccaggcaggtgcagggaagtgcagagcttgtggaaagcgtgtgagtgagggagacaggaacggctctgggggtgggaagtggggctaggtcttgccaactccatcttcaataaagtcgttttcgg

SEQ ID NO: 192859 - DNA, 2927 bp, Homo sapiens
  Payload ID: 18066
  Gene Name: transient receptor potential cation channel, subfamily V, member 6
  ENST ID: ENST00000611485
  CDS Start-End: 247-2424
agacaggccagctctgcagagtcctggctggctctgccaagtgtaacaaactcacagccctctccaaactggctggggctgctgggagactcccaaggaactcgtcaggaaggcaggagacaggagacgggacctctacagggagacggtgggccggcccttgggggggctgatgtggccccaaggctgagtcccgtcagggtctggcctcggcctcaggcccccaaggagccggccctacaccccatgggtttgtcactgcccaaggagaaagggctaattctctgcctatggagcaagttctgcagatggttccagagacgggagtcctgggcccagagccgagatgagcagaacctgctgcagcagaagaggatctgggagtctcctctccttctagctgccaaagataatgatgtccaggccctgaacaagttgctcaagtatgaggattgcaaggtgcaccagagaggagccatgggggaaacagcgctacacatagcagccctctatgacaacctggaggccgccatggtgctgatggaggctgccccggagctggtctttgagcccatgacatctgagctctatgagggtcagactgcactgcacatcgctgttgtgaaccagaacatgaacctggtgcgagccctgcttgcccgcagggccagtgtctctgccagagccacaggcactgccttccgccgtagtccccgcaacctcatctactttggggagcaccctttgtcctttgctgcctgtgtgaacagtgaggagatcgtgcggctgctcattgagcatggagctgacatccgggcccaggactccctgggaaacacagtgttacacatcctcatcctccagcccaacaaaacctttgcctgccagatgtacaacctgttgctgtcctacgacagacatggggaccacctgcagcccctggacctcgtgcccaatcaccagggtctcacccctttcaagctggctggagtggagggtaacactgtgatgtttcagcacctgatgcagaagcggaagcacacccagtggacgtatggaccactgacctcgactctctatgacctcacagagatcgactcctcaggggatgagcagtccctgctggaacttatcatcaccaccaagaagcgggaggctcgccagatcctggaccagacgccggtgaaggagctggtgagcctcaagtggaagcggtacgggcggccgtacttctgcatgctgggtgccatatatctgctgtacatcatctgcttcaccatgtgctgcatctaccgccccctcaagcccaggaccaataaccgcacaagcccccgggacaacaccctcttacagcagaagctacttcaggaagcctacgtgacccctaaggacgatatccggctggtcggggagctggtgactgtcattggggctatcatcatcctgctggtagaggttccagacatcttcagaatgggggtcactcgcttctttggacagaccatccttgggggcccattccatgtcctcatcatcacctatgccttcatggtgctggtgaccatggtgatgcggctcatcagtgccagcggggaggtggtacccatgtcctttgcactcgtgctgggctggtgcaacgtcatgtacttcgcccgaggattccagatgctaggccccttcaccatcatgattcagaagatgatttttggcgacctgatgcgattctgctggctgatggctgtggtcatcctgggctttgcttcagccttctatatcatcttccagacagaggaccccgaggagctaggccacttctacgactaccccatggccctgttcagcaccttcgagctgttccttaccatcatcgatggcccagccaactacaacgtggacctgcccttcatgtacagcatcacctatgctgcctttgccatcatcgccacactgctcatgctcaacctcctcattgccatgatgggcgacactcactggcgagtggcccatgagcgggatgagctgtggagggcccaggttgtggccaccacggtgatgctggagcggaagctgcctcgctgcctgtggcctcgctccgggatctgcggacgggagtatggcctgggggaccgctggttcctgcgggtggaagacaggcaagatctcaaccggcagcggatccaacgctacgcacaggccttccacacccggggctctgaggatttggacaaagactcagtggaaaaactagagctgggctgtcccttcagcccccacctgtcccttcctacgccctcagtgtctcgaagtacctcccgcagcagtgccaattgggaaaggcttcggcaagggaccctgaggagagacctgcgtgggataatcaacaggggtctggaggacggggagagctgggaatatcagatctgactgcgtgttctcacttcgcttcctggaacttgctctcattttcctgggtgcatcaaacaaaacaaaaaccaaacacccagaggtctcatctcccagccccaggggagaaagaggagtagcatgaacgccaaggaatgtacgttgagaatcactgctccaggcctgcattactccttcagctctggggcagaggaagcccagcccaagcacggggctggcagggcgtgaggaactctcctgtggcctgctcatcacccttccgacaggagcactgcatgtcagagcactttaaaaacaggccagcctgcttgggcgctcggtctccaccccagggtcataagtggggagagagcccttcccagggcacccaggcaggtgcagggaagtgcagagcttgtggaaagcgtgtgagtgagggagacaggaacggctctgggggtgggaagtggggctaggtcttgccaactccatcttcaataaagtcgttttcggatccctgccca

SEQ ID NO: 192860 - DNA, 247 bp, Homo sapiens; identical to SEQ ID NO: 192857
  Payload ID: 18066
  Gene Name: transient receptor potential cation channel, subfamily V, member 6
  ENST ID: ENST00000633826
  CDS Start-End: 1-62

SEQ ID NO: 192861 - DNA, 532 bp, Homo sapiens
  Payload ID: 18066
  Gene Name: transient receptor potential cation channel, subfamily V, member 6
  ENST ID: ENST00000633318
  CDS Start-End: 263-532
agagtcctggctggctctgccaagtgtaacaaactcacagccctctccaaactggctggggctgctgggagactcccaaggaactcgtcaggaaggcaggaccaataaccgcacaagcccccgggacaacaccctcttacagcagaagctacttcaggaagcctacgtgacccctaaggacgatatccggctggtcggggagctggtgactgtcattggggctatcatcatcctgctggtagaggttccagacatcttcagaatgggggtcactcgcttctttggacagaccatccttgggggcccattccatgtcctcatcatcacctatgccttcatggtgctggtgaccatggtgatgcggctcatcagtgccagcggggaggtggtacccatgtcctttgcactcgtgctgggctggtgcaacgtcatgtacttcgcccgaggattccagatgctaggccccttcaccatcatgattcagaagatgatttttggcgacctgatgcgattctgctggctgatggctgtg

SEQ ID NO: 192862 - DNA, 407 bp, Homo sapiens
  Payload ID: 18067
  Gene Name: transition protein 1 (during histone to protamine replacement)
  Uniprot ID: P09430
  ENST ID: ENST00000236979
  CDS Start-End: 31-198
gcaaagcccctcattttggcagaacttaccatgtcgaccagccgcaaattaaagagtcatggcatgaggaggagcaagagccgatctcctcacaagggagtcaagagaggtggcagcaaaagaaaataccgtaagggcaacctgaaaagtaggaaacggggcgatgacgccaatcgcaattaccgctcccacttgtgagcccccagcgggctctgccctggtgcgcttcacacagcaccaagcagcaacaagaacagcagaaggggaactgccaaggagacctgatgttagatcaaagccagagaggagcctatggaatgtggatcaaatgccagttgtgacgaaatgaggaatgtatatgttggctgtttttccccaacatctcaataaaactttgaaagcagaaa

SEQ ID NO: 192863 - DNA, 626 bp, Homo sapiens
  Payload ID: 18068
  Gene Name: transition protein 2 (during histone to protamine replacement)
  Uniprot ID: Q05952
  ENST ID: ENST00000312693
  CDS Start-End: 71-487
ggcctctgtaaagctaggcctgctgggagaggatgaggaggaggccctgcccctccaaacgtggcctcctatggacacccagactcacagccttcctatcacccacactcagctccatagcaactctcagccccaaagccgcacctgcacccgccattgccaaaccttcagccagagttgcagacagagccatcgtggcagccggagccagagctccagccagagcccggccagccaccgcaacccaactggagcccacagctcatccggccaccagagccagagtcccaacactagtccaccaccaaagcgccacaaaaagactatgaactcccaccactctcccatgcggcccaccatcctgcactgccgctgccccaagaacagaaagaacttggaaggcaagctgaaaaagaaaaaaatggccaagaggatccagcaggtgtacaaaaccaagacgcggagctcaggatggaaatccaactaatgagaccgcactccttggcttgttcctgcgtgtttcacccaaaggagaaaatgctaggatgaagtcaatcttcttgcaggaacatgttactatggtgatttctacgcaacactaattaaagcttgtacctggaagacta

SEQ ID NO: 192864 - DNA, 1931 bp, Homo sapiens
  Payload ID: 18069
  Gene Name: transketolase
  ENST ID: ENST00000296289
  CDS Start-End: 461-1834
cgcctgtcgccgcgggagcagccgctatctctgtgtgtccgcgtgtgcgcccggtccccgcctgccgcaccatggagagctaccacaagcctgaccagcagaagctgcaggccttgaaggacacggccaaccgcctacgtatcagctccatccaggccaccactgcggcgggctctggccaccccacgtcatgctgcagcgccgcagagatcatggctgtcctctttttccacaccatgcgctacaagtcccaggacccccggaatccgcacaatgaccgctttgtgctctccaagggccatgcagctcccatcctctacgcggtctgggctgaagctggtttcctggccgaggcggagctgctgaacctgaggaagatcagctccgacttgtgggatggcctacaccggcaaatacttcgacaaggccagctaccgagtctattgcttgctgggaggccatggccttcgccagcatctataagctggacaaccttgtggccattctagacatcaatcgcctgggccagagtgacccggccccactgcagcaccagatggacatctaccagaagcggtgcgaggccttcggttggcatgccatcatcgtggatggacacagcgtggaggagctgtgcaaggcctttggccaggccaagcaccagccaacagccatcattgccaagaccttcaagggccgagggatcacgggggtagaagataaggagtcttggcatgggaagcccctccccaaaaacatggctgagcagatcatccaggagatctacagccagatccagagcaaaaagaagatcctggcaacccctccacaggaggacgcaccctcagtggacattgccaacatccgcatgcccagcctgcccagctacaaagttggggacaagatagccacccgcaaggcctacgggcaggcactggccaagctgggccatgccagtgaccgcatcatcgccctggatggggacaccaaaaattccaccttctcggagatcttcaaaaaggagcacccggaccgcttcatcgagtgctacattgctgagcagaacatggtgagcatcgcggtgggctgtgccacccgcaacaggacggtgcccttctgcagcacttttgcagccttcttcacgcgggcctttgaccagattcgcatggccgccatctccgagagcaacatcaacctctgcggctcccactgcggcgtttccatcggggaagacgggccctcccagatggccctagaagatctggctatgtttcggtcagtccccacatcaactgtcttttacccaagtgatggcgttgctacagagaaggcagtggaactagccgccaatacaaagggtatctgcttcatccggaccagccgcccagaaaatgccatcatctataacaacaatgaggacttccaggtcggacaagccaaggtggtcctgaagagcaaggatgaccaggtgaccgttatcggggctggggtgaccctgcacgaggccttggccgctgccgaactgctgaagaaagaaaagatcaacatccgcgtgctggaccccttcaccatcaagcccctggacagaaaactcattctcgacagcgctcgtgccaccaagggcaggatcctcaccgtggaggaccattattatgaaggtggcattggtgaggctgtgtccagtgcagtagtgggcgagcctggcatcactgtcacccacctggcagttaaccgggtaccaagaagtgggaagccggctgagctgctgaagatgtttggtatcgacagggatgccattgcacaagctgtgaggggcctcatcaccaaggcctagggcgggtatgaagtgtggggcgggggtctatacattcctgagattctgggaaaggtgctcaaagatgtactgagaggaggggtaaatatatgttttg

SEQ ID NO: 192865 - DNA, 2075 bp, Homo sapiens
  Payload ID: 18069
  Gene Name: transketolase
  Uniprot ID: P29401
  ENST ID: ENST00000423516
  CDS Start-End: 81-1976
ctcggcagccgcctgtcgccgcgggagcagccgctatctctgtgtgtccgcgtgtgcgcccggtccccgcctgccgcaccatggagagctaccacaagcctgaccagcagaagctgcaggccttgaaggacacggccaaccgcctacgtatcagctccatccaggccaccactgcggcgggctctggccaccccacgtcatgctgcagcgccgcagagatcatggctgtcctctttttccacaccatgcgctacaagtcccaggacccccggaatccgcacaatgaccgctttgtgctctccaagggccatgcagctcccatcctctacgcggtctgggctgaagctggtttcctggccgaggcggagctgctgaacctgaggaagatcagctccgacttggacgggcacccggtcccgaaacaagctttcaccgacgtggccactggctccctgggccagggcctcggggccgcttgtgggatggcctacaccggcaaatacttcgacaaggccagcctcccgagtagctgggactacagctaccgagtctattgcttgctgggagacggggagctgtcagagggctctgtatgggaggccatggccttcgccagcatctataagctggacaaccttgtggccattctagacatcaatcgcctgggccagagtgacccggccccactgcagcaccagatggacatctaccagaagcggtgcgaggccttcggttggcatgccatcatcgtggatggacacagcgtggaggagctgtgcaaggcctttggccaggccaagcaccagccaacagccatcattgccaagaccttcaagggccgagggatcacgggggtagaagataaggagtcttggcatgggaagcccctccccaaaaacatggctgagcagatcatccaggagatctacagccagatccagagcaaaaagaagatcctggcaacccctccacaggaggacgcaccctcagtggacattgccaacatccgcatgcccagcctgcccagctacaaagttggggacaagatagccacccgcaaggcctacgggcaggcactggccaagctgggccatgccagtgaccgcatcatcgccctggatggggacaccaaaaattccaccttctcggagatcttcaaaaaggagcacccggaccgcttcatcgagtgctacattgctgagcagaacatggtgagcatcgcggtgggctgtgccacccgcaacaggacggtgcccttctgcagcacttttgcagccttcttcacgcgggcctttgaccagattcgcatggccgccatctccgagagcaacatcaacctctgcggctcccactgcggcgtttccatcggggaagacgggccctcccagatggccctagaagatctggctatgtttcggtcagtccccacatcaactgtcttttacccaagtgatggcgttgctacagagaaggcagtggaactagccgccaatacaaagggtatctgcttcatccggaccagccgcccagaaaatgccatcatctataacaacaatgaggacttccaggtcggacaagccaaggtggtcctgaagagcaaggatgaccaggtgaccgttatcggggctggggtgaccctgcacgaggccttggccgctgccgaactgctgaagaaagaaaagatcaacatccgcgtgctggaccccttcaccatcaagcccctggacagaaaactcattctcgacagcgctcgtgccaccaagggcaggatcctcaccgtggaggaccattattatgaaggtggcattggtgaggctgtgtccagtgcagtagtgggcgagcctggcatcactgtcacccacctggcagttaaccgggtaccaagaagtgggaagccggctgagctgctgaagatgtttggtatcgacagggatgccattgcacaagctgtgaggggcctcatcaccaaggcctagggcgggtatgaagtgtggggcgggggtctatacattcctgagattctgggaaaggtgctcaaagatgtactgagaggaggggtaaatatatgttttgag

SEQ ID NO: 192866 - DNA, 2831 bp, Homo sapiens
  Payload ID: 18069
  Gene Name: transketolase
  Uniprot ID: P29401
  ENST ID: ENST00000423525
  CDS Start-End: 59-1930
gggagcagccgctatctctgtgtgtccgcgtgtgcgcccggtccccgcctgccgcaccatggagagctaccacaagcctgaccagcagaagctgcaggccttgaaggacacggccaaccgcctacgtatcagctccatccaggccaccactgcggcgggctctggccaccccacgtcatgctgcagcgccgcagagatcatggctgtcctctttttccacaccatgcgctacaagtcccaggacccccggaatccgcacaatgaccgctttgtgctctccaagggccatgcagctcccatcctctacgcggtctgggctgaagctggtttcctggccgaggcggagctgctgaacctgaggaagatcagctccgacttggacgggcacccggtcccgaaacaagctttcaccgacgtggccactggctccctgggccagggcctcggggccgcttgtgggatggcctacaccggcaaatacttcgacaaggccagctaccgagtctattgcttgctgggagacggggagctgtcagagggctctgtatgggaggccatggccttcgccagcatctataagctggacaaccttgtggccattctagacatcaatcgcctgggccagagtgacccggccccactgcagcaccagatggacatctaccagaagcggtgcgaggccttcggttggcatgccatcatcgtggatggacacagcgtggaggagctgtgcaaggcctttggccaggccaagcaccagccaacagccatcattgccaagaccttcaagggccgagggatcacgggggtagaagataaggagtcttggcatgggaagcccctccccaaaaacatggctgagcagatcatccaggagatctacagccagatccagagcaaaaagaagatcctggcaacccctccacaggaggacgcaccctcagtggacattgccaacatccgcatgcccagcctgcccagctacaaagttggggacaagatagccacccgcaaggcctacgggcaggcactggccaagctgggccatgccagtgaccgcatcatcgccctggatggggacaccaaaaattccaccttctcggagatcttcaaaaaggagcacccggaccgcttcatcgagtgctacattgctgagcagaacatggtgagcatcgcggtgggctgtgccacccgcaacaggacggtgcccttctgcagcacttttgcagccttcttcacgcgggcctttgaccagattcgcatggccgccatctccgagagcaacatcaacctctgcggctcccactgcggcgtttccatcggggaagacgggccctcccagatggccctagaagatctggctatgtttcggtcagtccccacatcaactgtcttttacccaagtgatggcgttgctacagagaaggcagtggaactagccgccaatacaaagggtatctgcttcatccggaccagccgcccagaaaatgccatcatctataacaacaatgaggacttccaggtcggacaagccaaggtggtcctgaagagcaaggatgaccaggtgaccgttatcggggctggggtgaccctgcacgaggccttggccgctgccgaactgctgaagaaagaaaagatcaacatccgcgtgctggaccccttcaccatcaagcccctggacagaaaactcattctcgacagcgctcgtgccaccaagggcaggatcctcaccgtggaggaccattattatgaaggtggcattggtgaggctgtgtccagtgcagtagtgggcgagcctggcatcactgtcacccacctggcagttaaccgggtaccaagaagtgggaagccggctgagctgctgaagatgtttggtatcgacagggatgccattgcacaagctgtgaggggcctcatcaccaaggcctagggcggccagtgcaggttctggggaagaagcgtggagggtgcgctagggaggctggtgtccttggtcctgggccaggacctgggtgtcccaagtccccttggaatcacctgcaactgccctcaacctccagaactatcgctgcctcccattcatcaccaggtgacatttgactgcaacctgccttctagctgagaggctgagacctacatccctcattgtgacctcagtccacctggccctgagcgggctggggaactgcctcagtctggaagctgaccaggcactctcagggccgccccacctcccccaagtccccacagccttgcagtcaggtctcctgggatagggaggttcacttgcttgttgtccctcgtccttgtcatatccttttaactaggcatctcagagaagcagagacagggcagccttcgtcctgggggaaaagggaccctcaggatggcatgagaggtcctcaatcccaagtgtggaactgtccccctcaacttgttaaaatgcagatttctgggtcttgccaatggggcctgggactccatgtgacaactggcccaggagcttctgatgtcacacagaattctgcagtcccaagctccagccccgacctgctctgctgttcctaggtgactgccctcacactgctgaccacagtggatttctccccctgctgctcgggctcagctggggtcagccctgcttataaggtcaactgtgcaaaaccttatactggccaagaacaaactagtgctgggggaggagggctgggtgccccggccactggtggagtccccaggaaatcctcagagctgttgcgaggatgagacacatttgtggacacgtccacctgtcctcctgaccgtctggagagaataaacctgtcaaagcc

SEQ ID NO: 192867 - DNA, 1941 bp, Homo sapiens
  Payload ID: 18069
  Gene Name: transketolase
  ENST ID: ENST00000450814
  CDS Start-End: 81-542
ctcggcagccgcctgtcgccgcgggagcagccgctatctctgtgtgtccgcgtgtgcgcccggtccccgcctgccgcaccatggagagctaccacaagcctgaccagcagaagctgcaggccttgaaggacacggccaaccgcctacgtatcagctccatccaggccaccactgcggcgggctctggccaccccacgtcatgctgcagcgccgcagagatcatggctgtcctctttttccacaccatgcgctacaagtcccaggacccccggaatccgcacaatgaccgctttgtgctctccaagggccatgcagctcccatcctctacgcggtctgggctgaagctggtttcctggccgaggcggagctgctgaacctgaggaagatcagctccgacttggacgggcacccggtcccgaaacaagctttcaccgacgtggccactggctccctgggccagggcctcggggccgcttgtgggatggcctacaccggcaaatacttcgacaaggccagacatcaatcgcctgggccagagtgacccggccccactgcagcaccagatggacatctaccagaagcggtgcgaggccttcggttggcatgccatcatcgtggatggacacagcgtggaggagctgtgcaaggcctttggccaggccaagcaccagccaacagccatcattgccaagaccttcaagggccgagggatcacgggggtagaagataaggagtcttggcatgggaagcccctccccaaaaacatggctgagcagatcatccaggagatctacagccagatccagagcaaaaagaagatcctggcaacccctccacaggaggacgcaccctcagtggacattgccaacatccgcatgcccagcctgcccagctacaaagttggggacaagatagccacccgcaaggcctacgggcaggcactggccaagctgggccatgccagtgaccgcatcatcgccctggatggggacaccaaaaattccaccttctcggagatcttcaaaaaggagcacccggaccgcttcatcgagtgctacattgctgagcagaacatggtgagcatcgcggtgggctgtgccacccgcaacaggacggtgcccttctgcagcacttttgcagccttcttcacgcgggcctttgaccagattcgcatggccgccatctccgagagcaacatcaacctctgcggctcccactgcggcgtttccatcggggaagacgggccctcccagatggccctagaagatctggctatgtttcggtcagtccccacatcaactgtcttttacccaagtgatggcgttgctacagagaaggcagtggaactagccgccaatacaaagggtatctgcttcatccggaccagccgcccagaaaatgccatcatctataacaacaatgaggacttccaggtcggacaagccaaggtggtcctgaagagcaaggatgaccaggtgaccgttatcggggctggggtgaccctgcacgaggccttggccgctgccgaactgctgaagaaagaaaagatcaacatccgcgtgctggaccccttcaccatcaagcccctggacagaaaactcattctcgacagcgctcgtgccaccaagggcaggatcctcaccgtggaggaccattattatgaaggtggcattggtgaggctgtgtccagtgcagtagtgggcgagcctggcatcactgtcacccacctggcagttaaccgggtaccaagaagtgggaagccggctgagctgctgaagatgtttggtatcgacagggatgccattgcacaagctgtgaggggcctcatcaccaaggcctagggcgggtatgaagtgtggggcgggggtctatacattcctgagattctgggaaaggtgctcaaagatgtactgagaggaggggtaaatatatgttttgag

SEQ ID NO: 192868 - DNA, 1055 bp, Homo sapiens
  Payload ID: 18069
  Gene Name: transketolase
  ENST ID: ENST00000472528
  CDS Start-End: 46-291
atctctgtgtgtccgcgtgtgcgcccggtccccgcctgccgcaccatggagagctaccacaagcctgaccagcagaagctgcaggccttgaaggacacggccaaccgcctacgtatcagctccatccaggccaccactgcggcgggctctgggtgtagtgtcttttcccatgaccgggagttcatagaaataccaccccacgtcatgctgcagcgccgcagagatcatggctgtcctctttttccacaccatgcgctacaagtcccaggacccccggaatccgcacaatgaccgctttgtgctctccaagggccatgcagctcccatcctctacgcggtctgggctgaagctggtttcctggccgaggcggagctgctgaacctgaggaagatcagctccgacttggacgggcacccggtcccgaaacaagctttcaccgacgtggccactggctccctgggccagggcctcggggccgcttgtgggatggcctacaccggcaaatacttcgacaaggccagatggagtctcgctctgtcacccaggctggagtgcagtggtacgatctcggcccactgcaacctccgcctcccgggttcaagtgattctcctcctgcctcagcctcccgagtagctgggactacagctaccgagtctattgcttgctgggagacggggagctgtcagagggctctgtatgggaggccatggccttcgccagcatctataagctggacaaccttgtggccattctagacatcaatcgcctgggccagagtgacccggccccactgcagcaccagatggacatctaccagaagcggtgcgaggccttcggttggcatgccatcatcgtggatggacacagcgtggaggagctgtgcaaggcctttggccaggccaagcaccagccaacagccatcattgccaagaccttcaagggccgagggatcacgggggtagaagataaggagtcttggcatgggaagcccctccccaaaaacatggctgagcagatcatccaggagatctacagccagatccagagcaaaaa

SEQ ID NO: 192869 - DNA, 3010 bp, Homo sapiens
  Payload ID: 18069
  Gene Name: transketolase
  Uniprot ID: P29401
  ENST ID: ENST00000462138
  CDS Start-End: 90-1961
gcgcccggcctcggcagccgcctgtcgccgcgggagcagccgctatctctgtgtgtccgcgtgtgcgcccggtccccgcctgccgcaccatggagagctaccacaagcctgaccagcagaagctgcaggccttgaaggacacggccaaccgcctacgtatcagctccatccaggccaccactgcggcgggctctggccaccccacgtcatgctgcagcgccgcagagatcatggctgtcctctttttccacaccatgcgctacaagtcccaggacccccggaatccgcacaatgaccgctttgtgctctccaagggccatgcagctcccatcctctacgcggtctgggctgaagctggtttcctggccgaggcggagctgctgaacctgaggaagatcagctccgacttggacgggcacccggtcccgaaacaagctttcaccgacgtggccactggctccctgggccagggcctcggggccgcttgtgggatggcctacaccggcaaatacttcgacaaggccagctaccgagtctattgcttgctgggagacggggagctgtcagagggctctgtatgggaggccatggccttcgccagcatctataagctggacaaccttgtggccattctagacatcaatcgcctgggccagagtgacccggccccactgcagcaccagatggacatctaccagaagcggtgcgaggccttcggttggcatgccatcatcgtggatggacacagcgtggaggagctgtgcaaggcctttggccaggccaagcaccagccaacagccatcattgccaagaccttcaagggccgagggatcacgggggtagaagataaggagtcttggcatgggaagcccctccccaaaaacatggctgagcagatcatccaggagatctacagccagatccagagcaaaaagaagatcctggcaacccctccacaggaggacgcaccctcagtggacattgccaacatccgcatgcccagcctgcccagctacaaagttggggacaagatagccacccgcaaggcctacgggcaggcactggccaagctgggccatgccagtgaccgcatcatcgccctggatggggacaccaaaaattccaccttctcggagatcttcaaaaaggagcacccggaccgcttcatcgagtgctacattgctgagcagaacatggtgagcatcgcggtgggctgtgccacccgcaacaggacggtgcccttctgcagcacttttgcagccttcttcacgcgggcctttgaccagattcgcatggccgccatctccgagagcaacatcaacctctgcggctcccactgcggcgtttccatcggggaagacgggccctcccagatggccctagaagatctggctatgtttcggtcagtccccacatcaactgtcttttacccaagtgatggcgttgctacagagaaggcagtggaactagccgccaatacaaagggtatctgcttcatccggaccagccgcccagaaaatgccatcatctataacaacaatgaggacttccaggtcggacaagccaaggtggtcctgaagagcaaggatgaccaggtgaccgttatcggggctggggtgaccctgcacgaggccttggccgctgccgaactgctgaagaaagaaaagatcaacatccgcgtgctggaccccttcaccatcaagcccctggacagaaaactcattctcgacagcgctcgtgccaccaagggcaggatcctcaccgtggaggaccattattatgaaggtggcattggtgaggctgtgtccagtgcagtagtgggcgagcctggcatcactgtcacccacctggcagttaaccgggtaccaagaagtgggaagccggctgagctgctgaagatgtttggtatcgacagggatgccattgcacaagctgtgaggggcctcatcaccaaggcctagggcgggtatgaagtgtggggcgggggtctatacattcctgagattctgggaaaggtgctcaaagatgtactgagaggaggggtaaatatatgttttgagaaaaatgaattggccctgaaatgttttcttttttgatgtgtttgcagccagtgcaggttctggggaagaagcgtggagggtgcgctagggaggctggtgtccttggtcctgggccaggacctgggtgtcccaagtccccttggaatcacctgcaactgccctcaacctccagaactatcgctgcctcccattcatcaccaggtgacatttgactgcaacctgccttctagctgagaggctgagacctacatccctcattgtgacctcagtccacctggccctgagcgggctggggaactgcctcagtctggaagctgaccaggcactctcagggccgccccacctcccccaagtccccacagccttgcagtcaggtctcctgggatagggaggttcacttgcttgttgtccctcgtccttgtcatatccttttaactaggcatctcagagaagcagagacagggcagccttcgtcctgggggaaaagggaccctcaggatggcatgagaggtcctcaatcccaagtgtggaactgtccccctcaacttgttaaaatgcagatttctgggtcttgccaatggggcctgggactccatgtgacaactggcccaggagcttctgatgtcacacagaattctgcagtcccaagctccagccccgacctgctctgctgttcctaggtgactgccctcacactgctgaccacagtggatttctccccctgctgctcgggctcagctggggtcagccctgcttataaggtcaactgtgcaaaaccttatactggccaagaacaaactagtgctgggggaggagggctgggtgccccggccactggtggagtccccaggaaatcctcagagctgttgcgaggatgagacacatttgtggacacgtccacctgtcctcctgaccgtctggagagaataaacctgtcaaagccaaggtca

SEQ ID NO: 192870 - DNA, 1871 bp, Homo sapiens
  Payload ID: 18069
  Gene Name: transketolase
  ENST ID: ENST00000469678
  CDS Start-End: 33-1037
cgcgtgtgcgcccggtccccgcctgccgcaccatggagagctaccacaagcctgaccagcagaagctgcaggccttgaaggacacggccaaccgcctacgtatcagctccatccaggccaccactgcggcgggctctggccaccccacgtcatgctgcagcgccgcagagatcatggctgtcctctttttccacaccatgcgctacaagtcccaggacccccggaatccgcacaatgaccgctttgtgctctccaagggccatgcagctcccatcctctacgcggtctgggctgaagctggtttcctggccgaggcggagctgctgaacctgaggaagatcagctccgacttggacgggcacccggtcccgaaacaagctttcaccgacgtggccactggctccctgggccagggcctcggggccgcttgtgggatggcctacaccggcaaatacttcgacaaggccagctaccgagtctattgcttgctgggagacggggagctgtcagagggctctgtatgggaggccatggccttcgccagcatctataagctggacaaccttgtggccattctagacatcaatcgcctgggccagagtgacccggccccactgcagcaccagatggacatctaccagaagcggtgcgaggccttcggttggcatgccatcatcgtggatggacacagcgtggaggagctgtgcaaggcctttggccaggccaagcaccagccaacagccatcattgccaagaccttcaagggccgagggatcacgggggtagaagataaggagtcttggcatgggaagcccctccccaaaaacatggctgagcagatcatccaggagatctacagccagatccagagcaaaaagaagatcctggcaacccctccacaggaggacgcaccctcagtggacattgccaacatccgcatgcccagcctgcccagctacaaagttggggacaaggtacaaaatagccacccgcaaggcctacgggcaggcactggccaagctgggccatgccagtgaccgcatcatcgccctggatggggacaccaaaaattccaccttctcggagatcttcaaaaaggagcacccggaccgcttcatcgagtgctacattgctgagcagaacatggtgagcatcgcggtgggctgtgccacccgcaacaggacggtgcccttctgcagcacttttgcagccttcttcacgcgggcctttgaccagattcgcatggccgccatctccgagagcaacatcaacctctgcggctcccactgcggcgtttccatcggggaagacgggccctcccagatggccctagaagatctggctatgtttcggtcagtccccacatcaactgtcttttacccaagtgatggcgttgctacagagaaggcagtggaactagccgccaatacaaagggtatctgcttcatccggaccagccgcccagaaaatgccatcatctataacaacaatgaggacttccaggtcggacaagccaagaaaagatcaacatccgcgtgctggaccccttcaccatcaagcccctggacagaaaactcattctcgacagcgctcgtgccaccaagggcaggatcctcaccgtggaggaccattattatgaaggtggcattggtgaggctgtgtccagtgcagtagtgggcgagcctggcatcactgtcacccacctggcagttaaccgggtaccaagaagtgggaagccggctgagctgctgaagatgtttggtatcgacagggatgccattgcacaagctgtgaggggcctcatcaccaaggcctagggcgggtatgaagtgtggggcgggggtctatacattcctgagattctgggaaag

SEQ ID NO: 192871 - DNA, 2566 bp, Homo sapiens
  Payload ID: 18070
  Gene Name: transketolase-like 1
  Uniprot ID: P51854
  ENST ID: ENST00000369912
  CDS Start-End: 282-1904
aaacttgccccgagtccacggtgctctgcggttaggagctggcctcactgtgcacagggggaggggtggtgagcttaccgggctttaaagcgcccttccaacctgtgagccctgcattccttacccttggttggattcttcccgggctgggagaaatgaccgcttctatgaggagaccatgtgccgaggtcgtgtgctaggaagccagttgctgtgagaaatgaccagtgtcatgtctgtctttcagccaccctacatcatgtagcagttcttctgagatcatgtctgtgctgttcttctacatcatgaggtacaagcagtcagatccagagaatccggacaacgaccgatttgtcctcgcaaagagactgtcgtttgtggatgtggcaacaggatggctcggacaaggactgggagttgcatgtggaatggcatatactggcaagtacttcgacagggccagctaccgggtgttctgcctcatgagtgatggcgagtcctcagaaggctctgtctgggaggcaatggcctttgcttcctactacagtctggacaatcttgtggcaatctttgatgtgaaccgcctgggacacagtggtgcattgcccgccgagcactgcataaacatctatcagaggcgctgcgaagcctttgggtggaacacttatgtggtggacggccgggacgtggaggcactgtgccaggtattctggcaggcttctcaggtgaagcacaagcccactgctgtggtggccaagaccttcaagggccggggcaccccaagtattgaggatgcagaaagttggcatgcaaagccaatgccgagagaaagagcagatgccattatcaaattaattgagagccagatacagaccagcaggaatcttgacccacagccccccattgaggactcacctgaagtcaacatcacagatgtaaggatgacctctccacctgattacagagttggtgacaagatagctactcggaaagcatgcggtctggctctggctaagctgggctacgcgaacaacagagtcgttgtgctggatggtgacaccaggtactctactttctctgagatattcaacaaggagtaccctgagcgcttcatcgagtgctttatggctgaacaaaacatggtgagcgtggctctgggctgtgcctcccgtggacggaccattgcttttgctagcacctttgctgcctttctgactcgagcatttgatcacatccggataggaggcctcgctgagagcaacatcaacattattggttcccactgtggggtatctgttggtgacgatggtgcttcccagatggccctggaggatatagccatgttccgaaccattcccaagtgcacgatcttctacccaactgatgccgtctccacggagcatgctgttgctctggcagccaatgccaaggggatgtgcttcattcggaccacccgaccagaaactatggttatttacaccccacaagaacgctttgagatcggacaggccaaggtcctccgccactgtgtcagtgacaaggtcacagttattggagctggaattactgtgtatgaagccttagcagctgctgatgagctttcgaaacaagatatttttatccgtgtcatcgacctgtttaccattaaacctctggatgtcgccaccatcgtctccagtgcaaaagccacagagggccggatcattacagtggaggatcactacccgcaaggtggcatcggggaagctgtctgcgcagccgtctccatggatcctgacattcaggttcattcgctggcagtgtcgggagtgccccagagtgggaagtccgaggaattgctggatatgtatggaattagtgccagacatatcatagtggccgtgaaatgcatgttgctgaactaaaatagctgttagctttggtcttttggcctctttaccctgtgtttatgtttgttccaaaaccatcatttaaatctctactgtcacattttgtttcttaaaagcaaagccagctaacaccttcattcatccctagttcggaaattcaagctaactacttaccctttaaactgtcactgcatatgcaagtaccgctctaatttttggatcattaaagggagttacacaacttttaagtgaaaaaaataggtaacaaaacaaccacctgatagtaagttttctgataagactatagataagtggtagaggtaatcaattcttccgaagtgtttccttcgtgaataactggtagaggtaatagttttttcaatgtatttccttcatgagtaaagaaaatgtggattgaagtatagattccagtagcctagtttccacagcacgataacaccatgacgcctactgctgttcccaccttgggattctgtgtgctgccatcccacctgcagctgccctggaattcccttcgctgtttgccttcatctccctccacgtttgagaggctgtcaggcagcagcgaaagcttgttaggatgtcctgtgctgcttgtgatgagagcctccacactgtactgttcaagtcaatgttaataaagcatttcaaaacca

SEQ ID NO: 192872 - DNA, 2642 bp, Homo sapiens
  Payload ID: 18070
  Gene Name: transketolase-like 1
  Uniprot ID: P51854
  ENST ID: ENST00000369915
  CDS Start-End: 190-1980
agatcccttgacttgcttgcggagggagcggccggcggagggagcggcaggtggagggagtggcacgaggcatgcggagggagctgcaccgacatcacataaacgcactgggcagctcgcaggcgccattcgctcttcagacgccggagacgtaggagtgggtcttcagactccaaaggggttggactaatggcggatgctgaggcgagggctgagttcccggaggaggccagacctgacaggggcaccttgcaggtgttgcaagatatggccagccgcttgcgaatccattccatcagggccacatgctccacgagctccggccaccctacatcatgtagcagttcttctgagatcatgtctgtgctgttcttctacatcatgaggtacaagcagtcagatccagagaatccggacaacgaccgatttgtcctcgcaaagagactgtcgtttgtggatgtggcaacaggatggctcggacaaggactgggagttgcatgtggaatggcatatactggcaagtacttcgacagggccagctaccgggtgttctgcctcatgagtgatggcgagtcctcagaaggctctgtctgggaggcaatggcctttgcttcctactacagtctggacaatcttgtggcaatctttgatgtgaaccgcctgggacacagtggtgcattgcccgccgagcactgcataaacatctatcagaggcgctgcgaagcctttgggtggaacacttatgtggtggacggccgggacgtggaggcactgtgccaggtattctggcaggcttctcaggtgaagcacaagcccactgctgtggtggccaagaccttcaagggccggggcaccccaagtattgaggatgcagaaagttggcatgcaaagccaatgccgagagaaagagcagatgccattatcaaattaattgagagccagatacagaccagcaggaatcttgacccacagccccccattgaggactcacctgaagtcaacatcacagatgtaaggatgacctctccacctgattacagagttggtgacaagatagctactcggaaagcatgcggtctggctctggctaagctgggctacgcgaacaacagagtcgttgtgctggatggtgacaccaggtactctactttctctgagatattcaacaaggagtaccctgagcgcttcatcgagtgctttatggctgaacaaaacatggtgagcgtggctctgggctgtgcctcccgtggacggaccattgcttttgctagcacctttgctgcctttctgactcgagcatttgatcacatccggataggaggcctcgctgagagcaacatcaacattattggttcccactgtggggtatctgttggtgacgatggtgcttcccagatggccctggaggatatagccatgttccgaaccattcccaagtgcacgatcttctacccaactgatgccgtctccacggagcatgctgttgctctggcagccaatgccaaggggatgtgcttcattcggaccacccgaccagaaactatggttatttacaccccacaagaacgctttgagatcggacaggccaaggtcctccgccactgtgtcagtgacaaggtcacagttattggagctggaattactgtgtatgaagccttagcagctgctgatgagctttcgaaacaagatatttttatccgtgtcatcgacctgtttaccattaaacctctggatgtcgccaccatcgtctccagtgcaaaagccacagagggccggatcattacagtggaggatcactacccgcaaggtggcatcggggaagctgtctgcgcagccgtctccatggatcctgacattcaggttcattcgctggcagtgtcgggagtgccccagagtgggaagtccgaggaattgctggatatgtatggaattagtgccagacatatcatagtggccgtgaaatgcatgttgctgaactaaaatagctgttagctttggtcttttggcctctttaccctgtgtttatgtttgttccaaaaccatcatttaaatctctactgtcacattttgtttcttaaaagcaaagccagctaacaccttcattcatccctagttcggaaattcaagctaactacttaccctttaaactgtcactgcatatgcaagtaccgctctaatttttggatcattaaagggagttacacaacttttaagtgaaaaaaataggtaacaaaacaaccacctgatagtaagttttctgataagactatagataagtggtagaggtaatcaattcttccgaagtgtttccttcgtgaataactggtagaggtaatagttttttcaatgtatttccttcatgagtaaagaaaatgtggattgaagtatagattccagtagcctagtttccacagcacgataacaccatgacgcctactgctgttcccaccttgggattctgtgtgctgccatcccacctgcagctgccctggaattcccttcgctgtttgccttcatctccctccacgtttgagaggctgtcaggcagcagcgaaagcttgttaggatgtcctgtgctgcttgtgatgagagcctccacactgtactgttcaagtcaatgttaataaagcatttcaaaacca

SEQ ID NO: 192873 - DNA, 560 bp, Homo sapiens
  Payload ID: 18070
  Gene Name: transketolase-like 1
  ENST ID: ENST00000439635
  CDS Start-End: 62-445
ttcgctcttcagacgccggagacgtaggagtgggtcttcagactccaaaggggttggactaatggcggatgctgaggcgagggctgagttcccggaggaggccagacctgacaggggcaccttgcaggtgttgcaagatatggccagccgcttgcgaatccattccatcagggccacatgctccacgagctccggccaccctacatcatgtagcagttcttctgagatcatgtctgtgctgttcttctacatcatgaggtacaagcagtcagatccagagaatccggacaacgaccgatttgtcctcgcaaagagactgtcgtttgtggatgtggcaacaggatggctcggacaaggactgggagttgcatgtggaacacttatgtggtggacggccgggacgtggaggcactgtgccaggtattctggcaggcttctcaggtgaagcacaagcccactgctgtggtggccaagaccttcaagggccggggcaccccaagtattgaggatgcagaaagttggcatgcaaagccaatgccgagagaaagagcagatgccat

SEQ ID NO: 192874 - DNA, 622 bp, Homo sapiens
  Payload ID: 18070
  Gene Name: transketolase-like 1
  ENST ID: ENST00000426989
  CDS Start-End: 31-622
attcattgtagaaggtagaatgggatcttcatggcatttctgattcacaatgctcctgaaagttcctcggcatgtggaaaggccacagatgaatttaagcatgtgaaagaatactcatgtcagaggcacaaaggaaacttgccccgagtccacggtgctctgcgccaccctacatcatgtagcagttcttctgagatcatgtctgtgctgttcttctacatcatgaggtacaagcagtcagatccagagaatccggacaacgaccgatttgtcctcgcaaagagactgtcgtttgtggatgtggcaacaggatggctcggacaaggactgggagttgcatgtggaatggcatatactggcaagtacttcgacagggccagctaccgggtgttctgcctcatgagtgatggcgagtcctcagaaggctctgtctgggaggcaatggcctttgcttcctactacagtctggacaatcttgtggcaatctttgatgtgaaccgcctgggacacagtggtgcattgcccgccgagcactgcataaacatctatcagaggcgctgcgaagcctttgggtggaacacttatgtggtggacggccgggacgtggaggcactgtgccagg

SEQ ID NO: 192875 - DNA, 525 bp, Homo sapiens
  Payload ID: 18070
  Gene Name: transketolase-like 1
  ENST ID: ENST00000426203
  CDS Start-End: 1-525
agaggcacaaaggaaacttgccccgagtccacggtgctctgcggttaggagctggcctcactgtgcacagggggaggggtgccaccctacatcatgtagcagttcttctgagatcatgtctgtgctgttcttctacatcatgaggtacaagcagtcagatccagagaatccggacaacgaccgatttgtcctcgcaaagagactgtcgtttgtggatgtggcaacaggatggctcggacaaggactgggagttgcatgtggaatggcatatactggcaagtacttcgacagggccagctaccgggtgttctgcctcatgagtgatggcgagtcctcagaaggctctgtctgggaggcaatggcctttgcttcctactacagtctggacaatcttgtggcaatctttgatgtgaaccgcctgggacacagtggtgcattgcccgccgagcactgcataaacatctatcagaggcgctgcgaagcctttgggtggaacacttatgtggtggacggccgggacgtgga

SEQ ID NO: 192876 - DNA, 2654 bp, Homo sapiens
  Payload ID: 18071
  Gene Name: transketolase-like 2
  Uniprot ID: Q9H0I9
  ENST ID: ENST00000280605
  CDS Start-End: 13-1893
gacaaaagagagatgatggccaacgacgccaagcccgacgtgaagaccgtgcaggtgctgcgggacacagccaaccgcctgcggatccattccatcagggccacgtgtgcctctggttctggccagctcacgtcgtgctgcagtgcagcggaggtcgtgtctgtcctcttcttccacacgatgaagtataaacagacagacccagaacacccggacaacgaccggttcatcctctccaggggacatgctgctcctatcctctatgctgcttgggtggaggtgggtgacatcagtgaatctgacttgctgaacctgaggaaacttcacagcgacttggagagacaccctaccccccgattgccgtttgttgacgtggcaacagggtccctaggtcagggattaggtactgcatgtggaatggcttatactggcaagtaccttgacaaggccagctaccgggtgttctgccttatgggagatggcgaatcctcagaaggctctgtgtgggaggcttttgcttttgcctcccactacaacttggacaatctcgtggcggtcttcgacgtgaaccgcttgggacaaagtggccctgcaccccttgagcatggcgcagacatctaccagaattgctgtgaagcctttggatggaatacttacttagtggatggccatgatgtggaggccttgtgccaagcattttggcaagcaagtcaagtgaagaacaagcctactgctatagttgccaagaccttcaaaggtcggggtattccaaatattgaggatgcagaaaattggcatggaaagccagtgccaaaagaaagagcagatgcaattgtcaaattaattgagagtcagatacagaccaatgagaatctcataccaaaatcgcctgtggaagactcacctcaaataagcatcacagatataaaaatgacctccccacctgcttacaaagttggtgacaagatagctactcagaaaacatatggtttggctctggctaaactgggccgtgcaaatgaaagagttattgttctgagtggtgacacgatgaactccaccttttctgagatattcaggaaagaacaccctgagcgtttcatagagtgtattattgctgaacaaaacatggtaagtgtggcactaggctgtgctacacgtggtcgaaccattgcttttgctggtgcttttgctgccttttttactagagcattcgatcagctccgaatgggagccatttctcaagccaatatcaaccttattggttcccactgtggggtatccactggagaagatggagtctcccagatggccctggaggatctagccatgttccgaagcattcccaattgtactgttttctatccaagtgatgccatctcgacagagcatgctatttatctagccgccaataccaagggaatgtgcttcattcgaaccagccaaccagaaactgcagttatttataccccacaagaaaattttgagattggccaggccaaggtggtccgccacggtgtcaatgataaagtcacagtaattggagctggagttactctccatgaagccttagaagctgctgaccatctttctcaacaaggtatttctgtccgtgtcatcgacccatttaccattaaacccctggatgccgccaccatcatctccagtgcaaaagccacaggcggccgagttatcacagtggaggatcactacagggaaggtggcattggagaagctgtttgtgcagctgtctccagggagcctgatatccttgttcatcaactggcagtgtcaggagtgcctcaacgtgggaaaactagtgaattgctggatatgtttggaatcagtaccagacacattatagcagccgtaacacttactttaatgaagtaaactaggcttatttctaaaaagtcaagtctattggctttggcccaaaagcactggtatctttgtattaaattcatgtttattgtcacaaaaccattatttatacctatacagttgtactgtttcttttaaagcaaagccatttaacatctttcttcattcctaatttggaaattaaagtttacctttctgttaatctatgtataaatgttactctgagttattaatgtggattttaaaattgtaagcaatagaataggaaataaaacaactacctaatacaaatatttctgataagactacaaatatctgactgagctggggattaaagtagaggtaactgtatcttaaatgagtatgatttccttgtaagttaaaaaaattgaaatttaattgtagacttcaatagtccaagttttgaaggatgtttgagcttttgtataatgccatttatacctgcagttttacagataatgtttgactgcagttgccttggaaattcctccaaagtttgccttcatctctcctctacagtttggaggtgatggtgcagcagtggaacatctcttgatgcaccacactacttgtgttctgtgaagtgatgaaagtataactggttctagtttgcacactacacacatagttttgtgaagcttcagaaatgttttttcttttccttgtggccaaaccagtttgttaatctgattatattcatctgctaatgatactaaagttaatgtaataaagcatttaaaaatcagata

SEQ ID NO: 192877 - DNA, 1978 bp, Homo sapiens
  Payload ID: 18072
  Gene Name: translation machinery associated 16 homolog
  Uniprot ID: Q96EY4
  ENST ID: ENST00000358572
  CDS Start-End: 342-953
tctccacccgggctccaatccccagcctcgcactcagcaccaggcagagttcagcctcccgccgcaagctcccttccgccgctcccggcgagcacgcaggtctggctgtccgttgggctagagcttaaaagcccaacacgggcgaaaaagacgcggtctcagttaacggggacgctttagagaaacgcactcgcctctcctgttccggttgggtcggcgcgggcttctcaggcgccacgtgggattcggcccgggtgctcttgtgagctgctgctcctgcggttggtgagattacctgggtctagagtgcggagctgctccgtggccacgaggacgtcaccatgcccaaagcaccaaagggaaaaagtgcaggacgggaaaaaaaagtcatccatccatatagtagaaaagcagctcaaattacgagagaggcccacaaacaagaaaaaaaggaaaaattgaagaatgaaaaggccttgcgtctcaaccttgttggtgaaaaactgcaatggtttcaaaatcatcttgatccccaaaaaaagagatattcaaagaaagatgcttgtgaactaattgaaaggtacttaaatcgattcagcagtgagctggagcagattgagttacataacagtatcagggacaggcaggggaggcggcactgttcccgggagaccgtcatcaagcagacgatggagcgggagcgacagcagtttgagggatatggccttgagattccagacattctaaatgcaagtaatctgaaaacatttagggaatgggactttgatctgaagaaattaccaaacattaaaatgagaaaaatttgcgctaatgatgcaattcccaagacgtgcaagaggaaaactattataactgtagaccaagatttgggggaattggaactaaacgatgaatcaagtgattcagatgaggaaatgactgcagtggcctaattgtcttcacttgaattgaaaataaataatttgagagcttcaaattatattcattgattatggtacctaattgtcatgatacaaaaatttgatactgacattctcttatatgatgagagtttcatttgcgtttcaaaaatggtgttatgatacttattttaaaatgaagattgcttttcatttccattaagttgctaaaatagatagatgtgatctgcagaagttgtttagtcttcatctgaatttcaggctgggagggagcaatataactaaggacaaaaaatgttttgtttttcttgtgtatttatgatcacctaatttcacgttttgtgaaatggacagtaacctgtttcctgaaagattcctgtgggtactttttgagctgtgataatagcaaaattgtttttcggtaataatatcacactaatgcttcttttaaacattaaacctattttccttttttacagaataagggaaaatgtgataagaagtttgtatacatttctggattatagattattatttatcttttgaaccagagctaaatggtaaaagaaaaaaaatcagtgatgattgttatgttgatctcccacaattaatttatcttttgacaaaggggataaagagtttcagtttagctccttttgattgtatattattttttgcttttttattgtgaaaagaggtaggttttatttgtggagagagagttgaagattagggaaccagtgattttaattatgctactttttcttctaagagataaattgatatatcattcagtgtcatgaaaaacatgaatgttgtacaattttcttcctcaaaaaactttttaaatgtaagtatccttattttttttttaaaagagcacaatgtaggtgtatttgagtattttcaagaaaagaataaaaacattaatgcagtattaggttaactggatatcaactaagccttgttaacagttaaagtattataactttttttacttctgaaaattaaaaataaaatttatttctgcaatttca

SEQ ID NO: 192878 - DNA, 608 bp, Homo sapiens
  Payload ID: 18072
  Gene Name: translation machinery associated 16 homolog
  ENST ID: ENST00000508268
  CDS Start-End: 95-529
ggcccgggtgctcttgtgagctgctgctcctgcggttggtgagattacctgggtctagagtgcggagctgctccgtggccacgaggacgtcaccatgcccaaagcaccaaagggaaaaagtgcaggacgggaaaaaaaagtcatccatccatatagtagaaaagcagctcaaattacgagagaggcccacaaacaagaaaaaaaggaaaaattgaagaatgaaaaggccttgcgtctcaaccttgttggtgaaaaactgcaatggtttcaaaatcatcttgatccccaaaaaaagagatattcaaagaaagatgcttgtgaactaattgaaaggtacttaaatcgattcagcagtgagctggagcagattgagttacataacagtatcagggacaggcaggggaggcggcactgttcccgggagaccgtcatcaagcagacgatggagcgggagcgacagcagtttgagggatatggccttgagattccagacattctaaatgcaagtaatctgaaaacatttaggtgagtctgtcttgtattgttcccctgaagctgtgtgtaaagtacctgacaggtgaactttcttcccctttgagtctagccgg

SEQ ID NO: 192879 - DNA, 747 bp, Homo sapiens
  Payload ID: 18072
  Gene Name: translation machinery associated 16 homolog
  ENST ID: ENST00000513134
  CDS Start-End: 115-420
tcaggcgccacgtgggattcggcccgggtgctcttgtgagctgctgctcctgcggttggtgagattacctgggtctagagtgcggagctgctccgtggccacgaggacgtcaccatgcccaaagcaccaaagggaaaaagtgcaggacgggaaaaaaaagtcatccatccatatagtagaaaagcagctcaaattacgagagaggcccacaaacaagaaaaaaaggaaaaattgaagaatgaaaaggccttgcgtctcaaccttgttggtgaaaaactgcaatggtttcaaaatcatcttgatccccaaaaaaagagatattcaaagaaagatgcttgtgaactaattgaaagaataagggaaaatgtgataagaagtttgtatacatttctggattatagattattatttatcttttgaaccagagctaaatggtaaaagaaaaaaaatcagtgatgattgttatgttgatctcccacaattaatttatcttttgacaaaggggataaagagtttcagtttagctccttttgattgtatattattttttgcttttttattgtgaaaagaggtaggttttatttgtggagagagagttgaagattagggaaccagtgattttaattatgctactttttcttctaagagataaattgatatatcattcagtgtcatgaaaaacatgaatgttgtacaattttcttcctcaaaaaactttttaaatgtaagtatccttatttttttttt

SEQ ID NO: 192880 - DNA, 933 bp, Homo sapiens
  Payload ID: 18072
  Gene Name: translation machinery associated 16 homolog
  ENST ID: ENST00000509657
  CDS Start-End: 1-727
gggccggaagcgtgtagcgtctccacccgggctccaatccccagcctcgcactcagcaccaggcagagttcagcctcccgccgcaagctcccttccgccgctcccggcgagcacgcagcccaaagcaccaaagggaaaaagtgcaggacgggaaaaaaaagtcatccatccatatagtagaaaagcagctcaaattacgagagaggcccacaaacaagaaaaaaaggaaaaattgaagaatgaaaaggccttgcgtctcaaccttgttggtgaaaaactgcaatggtttcaaaatcatcttgatccccaaaaaaagagatattcaaagaaagatgcttgtgaactaattgaaaggtacttaaatcgattcagcagtgagctggagcagattgagttacataacagtatcagggacaggcaggggaggcggcactgttcccgggagaccgtcatcaagcagacgatggagcgggagcgacagcagtttgagggatatggccttgagattccagacattctaaatgcaagtaatctgaaaacatttagggaatgggactttgatctgaagaaattaccaaacattaaaatgagaaaaatttgcgctaatgatgcaattcccaagacgtgcaagaggaaaactattataactgtagaccaagatttgggggaattggaactaaacgatgaatcaagtgattcagatgaggaaatgactgcagtggcctaattgtcttcacttgaattgaaaataaataatttgagagcttcaaattatattcattgattatggtacctaattgtcatgatacaaaaatttgatactgacattctcttatatgatgagagtttcatttgcgtttcaaaaatggtgttatgatacttattttaaaatgaagattgcttttcatttccattaagttgctaaaatagata

SEQ ID NO: 192881 - DNA, 803 bp, Homo sapiens
  Payload ID: 18072
  Gene Name: translation machinery associated 16 homolog
  ENST ID: ENST00000513272
  CDS Start-End: 136-402
ggttgggtcggcgcgggcttctcaggcgccacgtgggattcggcccgggtgctcttgtgagctgctgctcctgcggttggtgagattacctgggtctagagtgcggagctgctccgtggccacgaggacgtcaccatgcccaaagcaccaaagggaaaaagtgcaggacgggaaaaaaaagtcatccatccatatagtagaaaagcagctcaaattacgagagaggcccacaaacaagaaaaaaaggaaaaattgaagaatgaaaaggccttgcgtctcaaccttgttggtgaaaaactgcaatggtttcaaaatcatcttgatccccaaaaaaagagatattcaaagaaagatgcttgtgaactaattgaaagagattccagacattctaaatgcaagtaatctgaaaacatttagggaatgggactttgatctgaagaaattaccaaacattaaaatgagaaaaatttgcgctaatgatgcaattcccaagacgtgcaagaggaaaactattataactgtagaccaagatttgggggaattggaactaaacgatgaatcaagtgattcagatgaggaaatgactgcagtggcctaattgtcttcacttgaattgaaaataaataatttgagagcttcaaattatattcattgattatggtacctaattgtcatgatacaaaaatttgatactgacattctcttatatgatgagagtttcatttgcgtttcaaaaatggtgttatgatacttattttaaaatgaagattgcttttcatttccattaagttgctaaaatagat

SEQ ID NO: 192882 - DNA, 561 bp, Homo sapiens
  Payload ID: 18073
  Gene Name: translation machinery associated 7 homolog
  Uniprot ID: Q9Y2S6
  ENST ID: ENST00000438607
  CDS Start-End: 41-235
gtttccggtggcagggtctggggaagcggcggcaggcgccatgtccggccgcgaaggtggcaagaagaagccactgaaacagcccaagaagcaggccaaggagatggacgaggaagataaggctttcaagcagaaacaaaaagaggagcagaagaaactcgaggagctaaaagcgaaggccgcggggaaggggcccttggccacaggtggaattaagaaatctggcaaaaagtaagctgttccttgtgcctgaggagatggtgaccctttatttcatctgtatttaaacctctctattccctgccataacatcttttgccacgtatagctggaattaagtgttgtcttggagctgttgtacatttaagaataaacttttgtaaaaaaagaaaaatcttacagtggctcatcatctctttagttgttttcactaagtcgttcctaccataactgtgaatttaaagtaaaaccagctcagaatcttgccagagtctgttctttggtccttgttctaccctaaactttgtatcacctgaaattaaaccaactcatttgaaagga

SEQ ID NO: 192883 - DNA, 1469 bp, Homo sapiens
  Payload ID: 18074
  Gene Name: translational activator of mitochondrially encoded cytochrome c oxidase I
  Uniprot ID: Q9BSH4
  ENST ID: ENST00000258975
  CDS Start-End: 213-1106
gtgctacgccatcaagggcccccagtcccgggtgccgcggggacagtgtagggtcattagctgttgagccgccccgggcgggcccaagcctttggatctcaggtgaccggcacaggcggccgcggggtccggaactgcttgttccggcagtggaagagacgcgccggcgttggccgctgctgctagcagcttgaaccccagggtcgggaccgatgtcggcttgggctgctgccagcctaagcagggccgctgcccgatgcttgctggcacgaggccccggggtcagggcggctcctccgcgcgacccccggccctcccaccccgagccccggggctgcggtgccgctccgggcaggacgctgcactttaccgcggctgtccccgccgggcacaacaagtggtccaaagtcaggcacatcaagggtccgaaggacgtcgaaaggagtcgcatcttctccaaactctgtttgaacatccgcctggcagtgaaagaaggaggccccaaccctgagcacaacagcaacctggccaatatcttagaggtgtgtcgcagcaaacatatgcccaagtcaacgattgagacagcactgaaaatggagaaatccaaggacacttatttgctgtatgagggtcgaggccctggtggctcttctctgctcatcgaggcattatctaacagtagccacaagtgccaagcagacattagacatatcctgaataagaatggaggagtgatggctgtaggagctcgtcactcttttgacaaaaagggggtgattgtggttgaagtggaggacagagagaagaaggctgtgaacctagagcgtgccctggagatggcaatcgaagcaggagctgaggatgtcaaggaaactgaagatgaagaagaaaggaacgtttttaaatttatttgtgatgcctcttcactgcaccaagtgaggaagaagctggactccctgggcctgtgttctgtgtcctgtgcactagagttcatccccaactcaaaggtgcagctggctgagcccgacctggaacaggccgcacatctcattcaggctctcagcaaccacgaggatgtgattcacgtctatgataacattgaataaccaggctacatgtgcccccgggttccttcctagaaatgtggcagcccattccagcacacaggcttctgcagcaatctctgagggtaaagccggtgggaggctcagcaggccaggaggcccaaggacaggacttgcgaccttgaagccaaaggaatctcacttgtggggcctccttgtcagctctgctgctgtctcagagccatctggatgagtgtcccgacaccctctcggatgcagggcaggaccacccagctggtcagactctgatgttgggtagctggcctctgtggggattgtaagtgccctgaggcgctctgtactagaaactgctcttaataataacggtgattattggttgctgca

SEQ ID NO: 192884 - DNA, 3420 bp, Homo sapiens
  Payload ID: 18075
  Gene Name: translin
  Uniprot ID: Q15631
  ENST ID: ENST00000389682
  CDS Start-End: 248-934
cctctcctctgccctttggacgcgcgcctcggttccgaacgcagcggacggcgcctcaggcagcgcggcggacagcccgtcctccggcgcgccgcgagcctcggaggaccctagcgacggtcgtggcgtaagaccggggggacgcggcggtagcggcggccgttgcgattgattgcgctggttgcctgcggcgtccacttccttggccgcccttgctacactggctgattgttgtgcagccggcgccatgtctgtgagcgagatcttcgtggagctgcagggctttttggctgccgagcaggacatccgagaggaaatcagaaaagttgtacagagtttagaacaaacagctcgagagattttaactctactgcaaggggtccatcagggtgctgggtttcaggacattccaaagaggtgtttgaaagctcgagaacattttggtacagtaaaaacacatctaacatctttgaagaccaaatttcctgctgaacagtattacagatttcatgagcactggaggtttgtgttgcagcgcttggtcttcttggcagcatttgttgtgtatttggaaacagaaacactagtgactcgagaagcagttacagaaattcttggcattgagccagatcgggagaaaggatttcatctggatgtagaagattatctctcaggagttctaattcttgccagtgaactgtcgaggctgtctgtcaacagcgtgactgctggagactactcccgacccctccacatctccaccttcatcaatgagctggattccggttttcgccttctcaacctgaaaaatgactccctgaggaagcgctacgacggattgaaatatgacgtgaagaaagtagaggaagtggtctatgatctctccatccggggctttaataaggagacggcagcagcttgtgttgaaaaataggaggctctccttgctcctggccttgctgacctcagcggttgccaggaaggggtgagcacagagtgcctcttacggtagttaggatgctcagttgctaaacactgcgctttattttcttaaccagttgtggtgtgagtatcagaattgaaacacttttttgggggtaaaaaatatagcctttacatggacagaattttttttgttgtttcagtgaatatgcctgtaattcagtgtatttcagttccgtcagaaagtgtaaatgttagtttcttggtaaagtccttttcttgcttaccttgactgttgatgtactgattgagaagttcattgtctcgtttgtgattcttccagatgtgatgcttgatattttctatatgcgagttagccatccacacccaggcatagcctggatacagtataaaaatagataattaaaaagatggttgccaagcaaggaaaacttattttatattttcccttccttattttaagcattgtgagtaaatcagatgttgaattcttttgccaagggaattatagctgcaggttctctctcactgccatcaaactgtaaaagattaaactgcgaagtcaagctcaacagattattttggaaagtttttgtattaagggatttagtaacatcattttgttttccaccaggcagggagtagggcttagtgttttaaaacacctctgctttctgatgttgccttaatattctgctattgcagcaattaaaaattgtcttcatgtacatttggaactaacacgtgatgtgatatattcctaaactatgaaacctttttcctagtagtcagctagatcatttgttctgggagtataaagccacccacgtaagttaataagcaaaatcctgactattatgttgttagagaaaaatgctttgctttgtctggaagaaagataaaatagtgaattataaataagtcaggccgggcgtggtggctcacacctgtaatcccagcacactgggaggccgaggcagggggactgcttgagctcaggagttcgagaccagcctgggcaacaaagtgagactccatctctatataaaaacaaaaaccacgaaagcacacacaaaataaatcagtgggatttggtaatgtgttttagagtaagaaatttcaggttgttggtgactatcccaacagtcatgttttaaatgtacagtttggggcaagtcatgtaaatactgttggtggtcttccccacacgccccaattttcaggtagtactaagagtatgtgccaggaaactcttgctattgaattgagatgattaaaatggtgacttaatccgtagttattttgcacccactgaaaggaaagtgctttccagaataatatgaagtatctaaaagtgtcaccttttcttgcctgatcaacaatttgggcttcctgtttgtacaaggggccatttggcatacctttcacagcttttatcaggccaagttaaaggctgactacattttttcatcatgaggaaagcagttgaaatgaggcatgagttactgtgcattgggattttagaacaattttcttgtgacagctctttttgtgaagttaggttcttaaaagtgcccatgatggtcacttaaaatgtgcagtaatagcactgccaggatcaagcatgaaaggcttttaaattagatcatcccacagacaatacgtttgataatagttttttcttttaacctctttaagtattgattctgcttgagaatattgaagtacttgccagaagttgtggatttcagttttaacaaatgctattaaagtggagaagcacactctggtcttggaattccatttgaggatttagaagtgtcatgtttataactattcagttgtgtttgttgctggcttgttgtaaagcaataaaatttttttggtctttttgtaagtgagtgtgctgctgtaagaaatctcccatgtgcataacaaattctgaatattttttgaggctaaagaagaccggggtgacaagcagatactgctgtgtaatggttacactaaccaaaagacaccagccactcagagttctatactgtaaagcgcagataacatttgtgtgttataccttgattggggaattaaaagtcatttaactgaagatgttgagaaacctgggctctggttttagtataccggaattacttttttccaattttagaaaatcaagcaggttagagaaaatagagatgaattaggggacactgtcttatggattcatttataagaagagaaccagccatatacacttggggagatttgccacatcttaaacttgaataatagtatgagtaatgcttaagggagtttaatagagaaggaaagctttggcagtgttttgagaacttaagtggctaaagagatgagacaaacatgcaggtcgctactggcatagtttcataattgtgtactcggaaattaaagtttgcttgtttcttggtctggattaaa

SEQ ID NO: 192885 - DNA, 1436 bp, Homo sapiens
  Payload ID: 18075
  Gene Name: translin
  ENST ID: ENST00000409193
  CDS Start-End: 471-1142
ttaaaagcacatgtgatctgcttaaaactctcctgtgatttcctatgccacacaggataaaaaatcagactctactgtggctcacatggtttctcttcaatctcgtttatgctctctgtctttgtgtatgatgttcactttacctcttctagtgccccaaatagcttcctgcctgtttgcttttcctggaatttgcttctttcccgttcttttcctgattgtctcgtatttatctcattggcgtcacagtctaagcgatctatttcctgttatgttttctagtagcacattaactttttttaatgtgtgtaatattgattattttaaaaaaatcttctccctcattgtatgttaaaccgccagagggaagggattgtgtgcttggttccccggtatttacacagtgcctcgcacataagtatgctcagtgaatattttaaaaatgaattagaggcggggagcggcgcctcatgcctgtaattccagcattttgggaggccgaggcggccagatcacctgaggaaatcagaaaagttgtacagagtttagaacaaacagctcgagagattttaactctactgcaaggggtccatcagggtgctgggtttcaggacattccaaagaggtgtttgaaagctcgagaacattttggtacagtaaaaacacatctaacatctttgaagaccaaatttcctgctgaacagtattacagatttcatgagcactggaggtttgtgttgcagcgcttggtcttcttggcagcatttgttgtgtatttggaaacagaaacactagtgactcgagaagcagttacagaaattcttggcattgagccagatcgggagaaaggatttcatctggatgtagaagattatctctcaggagttctaattcttgccagtgaactgtcgaggctgtctgtcaacagcgtgactgctggagactactcccgacccctccacatctccaccttcatcaatgagctggattccggttttcgccttctcaacctgaaaaatgactccctgaggaagcgctacgacggattgaaatatgacgtgaagaaagtagaggaagtggtctatgatctctccatccggggctttaataaggagacggcagcagcttgtgttgaaaaataggaggctctccttgctcctggccttgctgacctcagcggttgccaggaaggggtgagcacagagtgcctcttacggtagttaggatgctcagttgctaaacactgcgctttattttcttaaccagttgtggtgtgagtatcagaattgaaacacttttttgggggtaaaaaatatagcctttacatggacagaattttttttgttgtttcagtgaatatgcctgtaattcagtgtatttcagttccgtcagaaagtgtaaatgttagtttcttggtaaagtccttttcttgctta

SEQ ID NO: 192886 - DNA, 555 bp, Homo sapiens
  Payload ID: 18075
  Gene Name: translin
  ENST ID: ENST00000455432
  CDS Start-End: 1-555
acgaggtcgtgccgagagactgggagaggcgtgagtcgcgcggaggcgcgacatggggcgtgacgaggagcggagggcggggcgaaatcagaaaagttgtacagagtttagaacaaacagctcgagagattttaactctactgcaaggggtccatcagggtgctgggtttcaggacattccaaagaggtgtttgaaagctcgagaacattttggtacagtaaaaacacatctaacatctttgaagaccaaatttcctgctgaacagtattacagatttcatgagcactggaggtttgtgttgcagcgcttggtcttcttggcagcatttgttgtgtatttggaaacagaaacactagtgactcgagaagcagttacagaaattcttggcattgagccagatcgggagaaaggatttcatctggatgtagaagattatctctcaggagttctaattcttgccagtgaactgtcgaggctgtctgtcaacagcgtgactgctggagactactcccgacccctccacatctccaccttcatcaatgagctggattccg

SEQ ID NO: 192887 - DNA, 3328 bp, Homo sapiens
  Payload ID: 18075
  Gene Name: translin
  Uniprot ID: Q15631
  ENST ID: ENST00000536142
  CDS Start-End: 236-682
cctttggacgcgcgcctcggttccgaacgcagcggacggcgcctcaggcagcgcggcggacagcccgtcctccggcgcgccgcgagcctcggaggaccctagcgacggtcgtggcgtaagaccggggggacgcggcggtagcggcggccgttgcgattgattgcgctggttgcctgcggcgtccacttccttggccgcccttgctacactggctgattgttgtgcagccggcgccatgtctgtgagcgagatcttcgtggagctgcagggctttttggctgccgagcaggacatccgagaggaaatcagaaaagttgtacagagtttagaacaaacagctcgagagattttaactctactgcaaggggtccatcagggtgctgggtttcaggacattccaaagaggtgtttgaaagctcgagaacattttggtacagtaaaaacacatctaacatctttgaagaccaaatttcctgctgaacagtattacagatttcatgagcactggaggtttgtgttgcagcgcttggtcttcttggcagcatttgttgtgtatttggaaacagaaacactagtgactcgagaagcagttacagaaattcttggcatcgaggctgtctgtcaacagcgtgactgctggagactactcccgacccctccacatctccaccttcatcaatgagctggattccggttttcgccttctcaacctgaaaaatgactccctgaggaagcgctacgacggattgaaatatgacgtgaagaaagtagaggaagtggtctatgatctctccatccggggctttaataaggagacggcagcagcttgtgttgaaaaataggaggctctccttgctcctggccttgctgacctcagcggttgccaggaaggggtgagcacagagtgcctcttacggtagttaggatgctcagttgctaaacactgcgctttattttcttaaccagttgtggtgtgagtatcagaattgaaacacttttttgggggtaaaaaatatagcctttacatggacagaattttttttgttgtttcagtgaatatgcctgtaattcagtgtatttcagttccgtcagaaagtgtaaatgttagtttcttggtaaagtccttttcttgcttaccttgactgttgatgtactgattgagaagttcattgtctcgtttgtgattcttccagatgtgatgcttgatattttctatatgcgagttagccatccacacccaggcatagcctggatacagtataaaaatagataattaaaaagatggttgccaagcaaggaaaacttattttatattttcccttccttattttaagcattgtgagtaaatcagatgttgaattcttttgccaagggaattatagctgcaggttctctctcactgccatcaaactgtaaaagattaaactgcgaagtcaagctcaacagattattttggaaagtttttgtattaagggatttagtaacatcattttgttttccaccaggcagggagtagggcttagtgttttaaaacacctctgctttctgatgttgccttaatattctgctattgcagcaattaaaaattgtcttcatgtacatttggaactaacacgtgatgtgatatattcctaaactatgaaacctttttcctagtagtcagctagatcatttgttctgggagtataaagccacccacgtaagttaataagcaaaatcctgactattatgttgttagagaaaaatgctttgctttgtctggaagaaagataaaatagtgaattataaataagtcaggccgggcgtggtggctcacacctgtaatcccagcacactgggaggccgaggcagggggactgcttgagctcaggagttcgagaccagcctgggcaacaaagtgagactccatctctatataaaaacaaaaaccacgaaagcacacacaaaataaatcagtgggatttggtaatgtgttttagagtaagaaatttcaggttgttggtgactatcccaacagtcatgttttaaatgtacagtttggggcaagtcatgtaaatactgttggtggtcttccccacacgccccaattttcaggtagtactaagagtatgtgccaggaaactcttgctattgaattgagatgattaaaatggtgacttaatccgtagttattttgcacccactgaaaggaaagtgctttccagaataatatgaagtatctaaaagtgtcaccttttcttgcctgatcaacaatttgggcttcctgtttgtacaaggggccatttggcatacctttcacagcttttatcaggccaagttaaaggctgactacattttttcatcatgaggaaagcagttgaaatgaggcatgagttactgtgcattgggattttagaacaattttcttgtgacagctctttttgtgaagttaggttcttaaaagtgcccatgatggtcacttaaaatgtgcagtaatagcactgccaggatcaagcatgaaaggcttttaaattagatcatcccacagacaatacgtttgataatagttttttcttttaacctctttaagtattgattctgcttgagaatattgaagtacttgccagaagttgtggatttcagttttaacaaatgctattaaagtggagaagcacactctggtcttggaattccatttgaggatttagaagtgtcatgtttataactattcagttgtgtttgttgctggcttgttgtaaagcaataaaatttttttggtctttttgtaagtgagtgtgctgctgtaagaaatctcccatgtgcataacaaattctgaatattttttgaggctaaagaagaccggggtgacaagcagatactgctgtgtaatggttacactaaccaaaagacaccagccactcagagttctatactgtaaagcgcagataacatttgtgtgttataccttgattggggaattaaaagtcatttaactgaagatgttgagaaacctgggctctggttttagtataccggaattacttttttccaattttagaaaatcaagcaggttagagaaaatagagatgaattaggggacactgtcttatggattcatttataagaagagaaccagccatatacacttggggagatttgccacatcttaaacttgaataatagtatgagtaatgcttaagggagtttaatagagaaggaaagctttggcagtgttttgagaacttaagtggctaaagagatgagacaaacatgcaggtcgctactggcatagtttcataattgtgtactcggaaattaaagtttgcttgtttcttggtctggattaaa

SEQ ID NO: 192888 - DNA, 2717 bp, Homo sapiens
  Payload ID: 18075
  Gene Name: translin
  ENST ID: ENST00000490104
  CDS Start-End: 118-396
agaccggggggacgcggcggtagcggcggccgttgcgattgattgcgctggttgcctgcggcgtccacttccttggccgcccttgctacactggctgattgttgtgcagccggcgccatgtctgtgagcgagatcttcgtggagctgcagggctttttggctgccgagcaggacatccgagaggaaatcagaaaagttgtacagagtttagaacaaacagctcgagagattttaactctactgcaaggggtccatcagggtgctgggtttcaggacagtaagttctttgttttgtatccaattatcagtctcttatttagagggagagtttctatccagaagacattttataatgaaaaatggctatcatgctttatgttccaaagaggtgtttgaaagctcgagaacattttggtacagtaaaaacacatctaacatctttgaagaccaaatttcctgctgaacagtattacagatttcatgagcactggaggtttgtgttgcagcgcttggtcttcttggcagcatttgttgtgtatttggaaacagaaacactagtgactcgagaagcagttacagaaattcttggcattgagccagatcgggagaaaggatttcatctggatgtagaagattatctctcaggagttctaattcttgccagtgaactgtcgaggctgtctgtcaacagcgtgactgctggagactactcccgacccctccacatctccaccttcatcaatgagctggattccggttttcgccttctcaacctgaaaaatgactccctgaggaagcgctacgacggattgaaatatgacgtgaagaaagtagaggaagtggtctatgatctctccatccggggctttaataaggagacggcagcagcttgtgttgaaaaataggaggctctccttgctcctggccttgctgacctcagcggttgccaggaaggggtgagcacagagtgcctcttacggtagttaggatgctcagttgctaaacactgcgctttattttcttaaccagttgtggtgtgagtatcagaattgaaacacttttttgggggtaaaaaatatagcctttacatggacagaattttttttgttgtttcagtgaatatgcctgtaattcagtgtatttcagttccgtcagaaagtgtaaatgttagtttcttggtaaagtccttttcttgcttaccttgactgttgatgtactgattgagaagttcattgtctcgtttgtgattcttccagatgtgatgcttgatattttctatatgcgagttagccatccacacccaggcatagcctggatacagtataaaaatagataattaaaaagatggttgccaagcaaggaaaacttattttatattttcccttccttattttaagcattgtgagtaaatcagatgttgaattcttttgccaagggaattatagctgcaggttctctctcactgccatcaaactgtaaaagattaaactgcgaagtcaagctcaacagattattttggaaagtttttgtattaagggatttagtaacatcattttgttttccaccaggcagggagtagggcttagtgttttaaaacacctctgctttctgatgttgccttaatattctgctattgcagcaattaaaaattgtcttcatgtacatttggaactaacacgtgatgtgatatattcctaaactatgaaacctttttcctagtagtcagctagatcatttgttctgggagtataaagccacccacgtaagttaataagcaaaatcctgactattatgttgttagagaaaaatgctttgctttgtctggaagaaagataaaatagtgaattataaataagtcaggccgggcgtggtggctcacacctgtaatcccagcacactgggaggccgaggcagggggactgcttgagctcaggagttcgagaccagcctgggcaacaaagtgagactccatctctatataaaaacaaaaaccacgaaagcacacacaaaataaatcagtgggatttggtaatgtgttttagagtaagaaatttcaggttgttggtgactatcccaacagtcatgttttaaatgtacagtttggggcaagtcatgtaaatactgttggtggtcttccccacacgccccaattttcaggtagtactaagagtatgtgccaggaaactcttgctattgaattgagatgattaaaatggtgacttaatccgtagttattttgcacccactgaaaggaaagtgctttccagaataatatgaagtatctaaaagtgtcaccttttcttgcctgatcaacaatttgggcttcctgtttgtacaaggggccatttggcatacctttcacagcttttatcaggccaagttaaaggctgactacattttttcatcatgaggaaagcagttgaaatgaggcatgagttactgtgcattgggattttagaacaattttcttgtgacagctctttttgtgaagttaggttcttaaaagtgcccatgatggtcacttaaaatgtgcagtaatagcactgccaggatcaagcatgaaaggcttttaaattagatcatcccacagacaatacgtttgataatagttttttcttttaacctctttaagtattgattctgcttgagaatattgaagtacttgccagaagttgtggatttcagttttaacaaatgctattaaagtggagaagcac

SEQ ID NO: 192889 - DNA, 2843 bp, Homo sapiens
  Payload ID: 18075
  Gene Name: translin
  ENST ID: ENST00000467324
  CDS Start-End: 122-232
cgtaagaccggggggacgcggcggtagcggcggccgttgcgattgattgcgctggttgcctgcggcgtccacttccttggccgcccttgctacactggctgattgttgtgcagccggcgccatgtctgtgagcgagatcttcgtggagctgcagggctttttggctgccgagcaggacatccgagaggcgagccccctcccttccccattccctttgcctttccatgcctagttgggccacttcgcccggccctcctctgtcgctcagtctcgggcggtggggacgcctccgagggaaatcagaaaagttgtacagagtttagaacaaacagctcgagagattttaactctactgcaaggggtccatcagggtgctgggtttcaggacattccaaagaggtgtttgaaagctcgagaacattttggtacagtaaaaacacatctaacatctttgaagaccaaatttcctgctgaacagtattacagatttcatgagcactggaggtttgtgttgcagcgcttggtcttcttggcagcatttgttgtgtatttggaaacagaaacactagtgactcgagaagcagttacagaaattcttggcattgagccagatcgggagaaaggatttcatctggatgtagaagattatctctcaggagttctaattcttgccagtgaactgtcgaggctgtctgtcaacagcgtgactgctggagactactcccgacccctccacatctccaccttcatcaatgagctggattccggttttcgccttctcaacctgaaaaatgactccctgaggaagcgctacgacggattgaaatatgacgtgaagaaagtagaggaagtggtctatgatctctccatccggggctttaataaggagacggcagcagcttgtgttgaaaaataggaggctctccttgctcctggccttgctgacctcagcggttgccaggaaggggtgagcacagagtgcctcttacggtagttaggatgctcagttgctaaacactgcgctttattttcttaaccagttgtggtgtgagtatcagaattgaaacacttttttgggggtaaaaaatatagcctttacatggacagaattttttttgttgtttcagtgaatatgcctgtaattcagtgtatttcagttccgtcagaaagtgtaaatgttagtttcttggtaaagtccttttcttgcttaccttgactgttgatgtactgattgagaagttcattgtctcgtttgtgattcttccagatgtgatgcttgatattttctatatgcgagttagccatccacacccaggcatagcctggatacagtataaaaatagataattaaaaagatggttgccaagcaaggaaaacttattttatattttcccttccttattttaagcattgtgagtaaatcagatgttgaattcttttgccaagggaattatagctgcaggttctctctcactgccatcaaactgtaaaagattaaactgcgaagtcaagctcaacagattattttggaaagtttttgtattaagggatttagtaacatcattttgttttccaccaggcagggagtagggcttagtgttttaaaacacctctgctttctgatgttgccttaatattctgctattgcagcaattaaaaattgtcttcatgtacatttggaactaacacgtgatgtgatatattcctaaactatgaaacctttttcctagtagtcagctagatcatttgttctgggagtataaagccacccacgtaagttaataagcaaaatcctgactattatgttgttagagaaaaatgctttgctttgtctggaagaaagataaaatagtgaattataaataagtcaggccgggcgtggtggctcacacctgtaatcccagcacactgggaggccgaggcagggggactgcttgagctcaggagttcgagaccagcctgggcaacaaagtgagactccatctctatataaaaacaaaaaccacgaaagcacacacaaaataaatcagtgggatttggtaatgtgttttagagtaagaaatttcaggttgttggtgactatcccaacagtcatgttttaaatgtacagtttggggcaagtcatgtaaatactgttggtggtcttccccacacgccccaattttcaggtagtactaagagtatgtgccaggaaactcttgctattgaattgagatgattaaaatggtgacttaatccgtagttattttgcacccactgaaaggaaagtgctttccagaataatatgaagtatctaaaagtgtcaccttttcttgcctgatcaacaatttgggcttcctgtttgtacaaggggccatttggcatacctttcacagcttttatcaggccaagttaaaggctgactacattttttcatcatgaggaaagcagttgaaatgaggcatgagttactgtgcattgggattttagaacaattttcttgtgacagctctttttgtgaagttaggttcttaaaagtgcccatgatggtcacttaaaatgtgcagtaatagcactgccaggatcaagcatgaaaggcttttaaattagatcatcccacagacaatacgtttgataatagttttttcttttaacctctttaagtattgattctgcttgagaatattgaagtacttgccagaagttgtggatttcagttttaacaaatgctattaaagtggagaagcacactctggtcttggaattccatttgaggatttagaagtgtcatgtttataactattcagttgtgtttgttgctggcttgttgtaaagcaataaaatttttttggtctttttgtaag

SEQ ID NO: 192890 - DNA, 560 bp, Homo sapiens
  Payload ID: 18075
  Gene Name: translin
  ENST ID: ENST00000490717
  CDS Start-End: 121-231
gtaagaccggggggacgcggcggtagcggcggccgttgcgattgattgcgctggttgcctgcggcgtccacttccttggccgcccttgctacactggctgattgttgtgcagccggcgccatgtctgtgagcgagatcttcgtggagctgcagggctttttggctgccgagcaggacatccgagaggcgagccccctcccttccccattccctttgcctttccatgcctagttgggccacttcgcccggccctcctctgtcgctcagtctcgggcggtggggacgcctccgaggttccaaagaggtgtttgaaagctcgagaacattttggtacagtaaaaacacatctaacatctttgaagaccaaatttcctgctgaacagtattacagatttcatgagcactggaggtttgtgttgcagcgcttggtcttcttggcagcatttgttgtgtatttggaaacagaaacactagtgactcgagaagcagttacagaaattcttggcattgagccagatcgggagaaaggatttcatctggatgtagaagattatctctca

SEQ ID NO: 192891 - DNA, 578 bp, Homo sapiens
  Payload ID: 18075
  Gene Name: translin
  ENST ID: ENST00000478165
  CDS Start-End: 121-231
gtaagaccggggggacgcggcggtagcggcggccgttgcgattgattgcgctggttgcctgcggcgtccacttccttggccgcccttgctacactggctgattgttgtgcagccggcgccatgtctgtgagcgagatcttcgtggagctgcagggctttttggctgccgagcaggacatccgagaggcgagccccctcccttccccattccctttgcctttccatgcctagttgggccacttcgcccggccctcctctgtcgctcagtctcgggcggtggggacgcctccgaggatttcatgagcactggaggtttgtgttgcagcgcttggtcttcttggcagcatttgttgtgtatttggaaacagaaacactagtgactcgagaagcagttacagaaattcttggcattgagccagatcgggagaaaggatttcatctggatgtagaagattatctctcaggagttctaattcttgccagtgaactgtcgaggctgtctgtcaacagcgtgactgctggagactactcccgacccctccacatctccaccttcatcaatgagctggattccggtt

SEQ ID NO: 192892 - DNA, 2650 bp, Homo sapiens
  Payload ID: 18076
  Gene Name: translin-associated factor X
  Uniprot ID: Q99598
  ENST ID: ENST00000366639
  CDS Start-End: 159-1031
acgtgagaggagacttccggccactgcgttgtagtcggcccggctgcaaagcgtttttctgcaggctgttttcccaggttccctcggcctgtacctcgcgcactcctcttgctccaggtccttcagtctccgctcgtctcaccgtaggctgtgacgacatgagcaacaaagaaggatcaggagggttcaggaaaaggaagcatgacaatttcccacataaccaaagaagagaagggaaggatgttaattcatcttcacccgtgatgttggcctttaaatcatttcagcaggaacttgatgcaaggcatgacaaatatgagagacttgtgaaacttagtcgggatataactgttgaaagtaaaaggacaatttttctcctccataggattacaagtgctcctgatatggaagatatattgactgaatcagaaattaaattggatggtgtcagacaaaagatattccaggtagcccaagagctatcaggggaagatatgcatcagttccatcgagccattactacaggactacaggaatatgtggaagctgtctcttttcaacacttcatcaaaacacgatcattaattagtatggatgaaattaataaacaattgatatttacgactgaagacaatgggaaagaaaataaaactccctcctctgatgcacaggataagcagtttggtacttggagactgagagtcacacctgtcgattaccttctgggagtggctgacttaactggagaattgatgcggatgtgtattaacagtgtggggaatggggacattgataccccctttgaagtgagccagtttttacgtcaggtttatgatgggttttcattcattggcaacactggaccttacgaggtttctaagaagctgtataccttgaaacaaagtttggccaaagtggagaatgcttgttatgccttgaaagtcagagggtcagaaattccaaaacatatgttggcagatgtgttttcagttaaaacagaaatgatagatcaagaagagggcatttcttagaatctaacgttactcagttactaattcttttgagaactcctaagagaccaatttgtaagacttatttagtatttcatttaactttattgtggcttttacatagaaacatattcagttgtacttgttttaaattgtatacaagctgtacataaaattagccaaatgaatcatttcttatatcttattcatgaaagtttgcatacagatgtttgcatatatgcctttttgaatttttgctggttaacctttatcatttatctttgtaatgtgaacatgcttcagagtgtaccttttgccataacctattttaatttactttttctgaagtttggagtgataatttttagtggaagcaatttgtaatttaagttggtagttatattatatatagaaaagattttttagttaaacttctggacatgagcgtcctgtttaaatttcttgttaatatcgtgccaagcctcaaaaataggcttattccatggaacaagaattaaaaatgaataagctatcaatatataatttaagtacaagtttaggctgggcgtggtggctcacgcctgtaatcccagcactttgggaggccgaggtaggcagatcacgaggtcaagagatcaagaccagcctgaccaacgtggcgaaacctcgtctctactagaaatacaaaaattagctggatatggtggtatgtgcctgtaatcccagctacttgggaggctgaggcaggagactcgcttgaacctgggaggcagaggttgcagtgagccgagattgcgccactgcactccagcctgggtaacagagcaagactccatctcaaaaaaagaaagaaagaaaaaagaaagtacaagtttataaagtattatagtgaaaaattcgcattctggctgattttaagccatttaaaatttatataaaacaaccttccataaaaatttgacaggtgcccagatgttgctttctccatttattttttgtttttttttaatcacagtaggtctgatagagaattggagctaaattataatatttttgttggtaaagttgagttatatacttgtacatacaatggaaatgcttttagtagtgattatttagcaatttttgtttttgttatattaggcatgtttggaggctttcctattctagcatttaaatttaaattttattaaaattaaataatttaaatctagcatttaaatttaaataatttaagtctagcatttacttttaaataattataatgaagttttgaaatactaagttaatccagacctttagttgtcccatggtgttaataaagttgccaaagaagatgtattatgaacaattcagcaataagacaattgtcaacacagttgagaataacaatggtaatcgttagtaatatttagaattggaatttgcctactgaaatagttatagatgattacttgtgatgtgaaactgaattgagcatgacaaccagacatttccagttggttttgtaagttttgagaatctagatactgggttttattttttgaaagattagctctgtttgtaagggctgattccttgaaaatgtaattttccagaaaaacacctaaagaaaataaaacatggacatgcctagtaaa

SEQ ID NO: 192893 - DNA, 646 bp, Homo sapiens
  Payload ID: 18076
  Gene Name: translin-associated factor X
  ENST ID: ENST00000413309
  CDS Start-End: 157-646
gtgagaggagacttccggccactgcgttgtagtcggcccggctgcaaagcgtttttctgcaggctgttttcccaggttccctcggcctgtacctcgcgcactcctcttgctccaggtccttcagtctccgctcgtctcaccgtaggctgtgacgacatgagcaacaaagaaggatcaggagggttcaggaaaaggaagcatgacaatttcccacataaccaaagaagagaagggaaggatgttaattcatcttcacccgtgatgttggcctttaaatcatttcagcaggaacttgatgcaaggcatgacaaatatgagagacttgtgaaacttagtcgggatataactgttgaaagtaaaaggacaatttttctcctccataggattacaagttcccaatatcttgatcatagtgctcctgatatggaagatatattgactgaatcagaaattaaattggatggtgtcagacaaaagatattccaggtagcccaagagctatcaggggaagatatgcatcagttccatcgagccattactacaggactacaggaatatgtggaagctgtctcttttcaacacttcatcaaaacacgatcattaattagtatggatgaaattaataaacaattgatatttacgactg

SEQ ID NO: 192894 - DNA, 2429 bp, Homo sapiens
  Payload ID: 18077
  Gene Name: translin-associated factor X interacting protein 1
  Uniprot ID: Q2TAA8
  ENST ID: ENST00000388833
  CDS Start-End: 378-2354
gctgattgcccgcctgcccgtgggtcatggcctgccagcagtcgcggtaccacagcttctcgtccgcgtcgaggtaggcgctggcagggatgagggcagagatgagggtttgagtacttctagagagggaaatggcacttgatccggacctctgcacctcctgctggcctctgaccattgatctagggctccagcaccacagagtcaatggttagaatcgggctgatttagcccagtgaagacgttacgtgctagcaaaacgattacagccacggccttcaggagtgaccatagacgaatcctttctcacagaagacaagagcacccagaatcgcaagcttcttcagaaacgaaggacgctgactggtcagttctccatgggtgggcacctgtccccatggcccacatacaccagtggccagaccattttgcaaaatcgaaaaccctgttcagatgactaccggaagcgagtagggagctgccagcagcacccctttcgcactgccaagccccagtacttggaggaactggaaaactacctacgcaaggagctcctcctgctggacctgggcacagattccacccaggaactaaggctgcagccttacagagagatctttgagttcttcatagaggacttcaaaacgtacaagccattactatcctccatcaagaatgcgtatgaggggatgctggcccaccaaagggagaagattcgggctctggagcccctgaaggccaagcttgtcactgtgaatgaggactgcaatgagaggatcctggccatgagagctgaggagaaatatgaaatctccctgctcaagaaagagaagatgaacttgctaaaactcatcgacaaaaagaatgaggagaagatttcattgcagagcgaggtgaccaaactgaggaagaacttggctgaggagtacctgcactacctcagtgagcgagatgcctgtaagatcctcatcgcagacctgaatgagctgcggtaccagcgggaggacatgtcattagcccagtcgccaggcatctggggggaggaccctgtgaagttaaccctggctcttaagatgacccggcaagacctgacccgcacgcagatggaactcaacaacatgaaggccaactttggagatgtggtccccaggagggactttgaaatgcaggagaagaccaacaaggatcttcaggagcagctggacaccctgagagccagctacgaggaggttcgcaaggagcatgagatcctcatgcagctgcacatgagcacgctgaaggaacgggaccaattcttctctgagctgcaggagatccagcgcacttccacgccgcggcctgactggaccaagtgcaaagatgtggtggctgggggcccagagcgctggcagatgctggctgagggcaagaacagcgaccagctggtggacgtgctcctggaagagattggttcggggctgctgcgggagaaagacttcttccctggtctgggctatggggaagccatccctgcttttcttcggtttgatggcctcgtggagaacaagaagccaagcaagaaggacgtggtcaacctcctcaaggatgcctggaaggaacgtcttgctgaggagcagaaagagacgttcccagatttcttcttcaatttcctggagcatcgctttgggcccagtgatgccatggcctgggcttatactatttttgaaaatatcaagatcttccactccaacgaggttatgagtcagttctatgcagtcttgatgggaaagcggagtgagaatgtgtatgtcacccagaaggagacagtagcccagctgctgaaggagatgacaaatgctgacagtcagaacgaggggctactaaccatggagcagttcaacactgtcctcaagagtaccttccctctcaagacagaagagcaaatccaggagctgatggaggcagggggctggcatcccagcagcagcaatgcagacttgctcaactaccgctcactgtttatggaggatgaggagggccagagtgagccctttgtgcaaaaactctgggaacaatacatggatgagaaggacgagtacttacagcagctaaagcaggagcttggcatagaactccatgaggaagtgactctgcccaagctgcgagggggcctgatgaccatcgaccccagcctggacaagcagacagtgaacacctacatgagccaggccttccagctccctgagtcggaaatgccagaggagggtgacgagaaggaagaagccgtggtggaaatcctccagactgccctggagcggcttcaggtgattgacatcaggcgtgtgggacctcgagagccagagcctgcaagctaggaacttgtgggcagcctgcgtactccagtcctgctaacccctagcttttaatataaaagtgtttgtctgaatcca

SEQ ID NO: 192895 - DNA, 1284 bp, Homo sapiens
  Payload ID: 18077
  Gene Name: translin-associated factor X interacting protein 1
  ENST ID: ENST00000431934
  CDS Start-End: 1-1284
cggtaccacagcttctcgtccgcgtcgagattacagccacggccttcaggagtgaccatagacgaatcctttctcacagaagacaagagcacccagaatcgcaagcttcttcagaaacgaaggacgctggtgaccaaactgaggaagaacttggctgaggagtacctgcactacctcagtgagcgagatgcctgtaagatcctcatcgcagacctgaatgagctgcggtaccagcgggaggacatgtcattagcccagtcgccaggcatctggggggaggaccctgtgaagttaaccctggctcttaagatgacccggcaagacctgacccgcacgcagatggaactcaacaacatgaaggccaactttggagatgtggtccccaggagggactttgaaatgcaggagaagaccaacaaggatcttcaggagcagctggacaccctgagagccagctacgaggaggttcgcaaggagcatgagatcctcatgcagctgcacatgagcacgctgaaggaacgggaccaattcttctctgagctgcaggagatccagcgcacttccacgccgcggcctgactggaccaagtgcaaagatgtggtggctgggggcccagagcgctggcagatgctggctgagggcaagaacagcgaccagctggtggacgtgctcctggaagagattggttcggggctgctgcgggagaaagacttcttccctggtctgggctatggggaagccatccctgcttttcttcggtttgatggcctcgtggagaacaagaagccaagcaagaaggacgtggtcaacctcctcaaggatgcctggaaggaacgtcttgctgaggagcagaaagagacgttcccagatttcttcttcaatttcctggagcatcgctttgggcccagtgatgccatggcctgggcttatactatttttgaaaatatcaagatcttccactccaacgaggttatgagtcagttctatgcagtcttgatgggaaagcggagtgagaatgtgtatgtcacccagaaggagacagtagcccagctgctgaaggagatgacaaatgctgacagtcagaacgaggggctactaaccatggagcagttcaacactgtcctcaagagtaccttccctctcaagacagaagagcaaatccaggagctgatggaggcagggggctggcatcccagcagcagcaatgcagacttgctcaactaccgctcactgtttatggaggatgaggagggccagagtgagccctttgtgcaaaaactctgg

SEQ ID NO: 192896 - DNA, 2338 bp, Homo sapiens
  Payload ID: 18077
  Gene Name: translin-associated factor X interacting protein 1
  ENST ID: ENST00000415766
  CDS Start-End: 386-2317
gtagtataaccgtcctcagccataagcctgtcccatcgagacgtcgggacaccgaaaactaccattcccgccggcaaagcggctccggcctctcagcacacttccctccccatggcctctgttcatccccctgcctcagttctggtacctggggtcaaatcggctgtagtggttgactctcagggcacccgctgccgggtcccagtccacctttgctactttgtcctactcccagcccgcgggcgctaggctcgggggcgtggcgcatccctgactccgcccccgccgcgggggggcctctggggcctggtcgccatggcgaccggctgtacgctaccacagcttcccaggccgcgggtgctgattgcccgcctgcccgtgggtcatggcctgccagcagtcgcggtaccacagcttctcgtccgcgtcgagattacagccacggccttcaggagtgaccatagacgaatcctttctcacagaagacaagagcacccagaatcgcaagcttcttcagaaacgaaggacgctggagctgccagcagcacccctttcgcactgccaagccccagtacttggaggaactggaaaactacctacgcaaggagctcctcctgctggacctgggcacagattccacccaggaactaaggctgcagcccaccaaagggagaagattcgggctctggagcccctgaaggccaagcttgtcactgtgaatgaggactgcaatgagaggatcctggccatgagagctgaggagaaatatgaaatctccctgctcaagaaagagaagatgaacttgctaaaactcatcgacaaaaagaatgaggagaagatttcattgcagagcgaggtgaccaaactgaggaagaacttggctgaggagtacctgcactacctcagtgagcgagatgcctgtaagatcctcatcgcagacctgaatgagctgcggtaccagcgggaggacatgtcattagcccagtcgccaggcatctggggggaggaccctgtgaagttaaccctggctcttaagatgacccggcaagacctgacccgcacgcagatggaactcaacaacatgaaggccaactttggagatgtggtccccaggagggactttgaaatgcaggagaagaccaacaaggatcttcaggagcagctggacaccctgagagccagctacgaggaggttcgcaaggagcatgagatcctcatgcagctgcacatgagcacgctgaaggaacgggaccaattcttctctgagctgcaggagatccagcgcacttccacgccgcggcctgactggaccaagtgcaaagatgtggtggctgggggcccagagcgctggcagatgctggctgagggcaagaacagcgaccagctggtggacgtgctcctggaagagattggttcggggctgctgcgggagaaagacttcttccctggtctgggctatggggaagccatccctgcttttcttcggtttgatggcctcgtggagaacaagaagccaagcaagaaggacgtggtcaacctcctcaaggatgcctggaaggaacgtcttgctgaggagcagaaagagacgttcccagatttcttcttcaatttcctggagcatcgctttgggcccagtgatgccatggcctgggcttatactatttttgaaaatatcaagatcttccactccaacgaggttatgagtcagttctatgcagtcttgatgggaaagcggagtgagaatgtgtatgtcacccagaaggagacagtagcccagctgctgaaggagatgacaaatgctgacagtcagaacgaggggctactaaccatggagcagttcaacactgtcctcaagagtaccttccctctcaagacagaagagcaaatccaggagctgatggaggcagggggctggcatcccagcagcagcaatgcagacttgctcaactaccgctcactgtttatggaggatgaggagggccagagtgagccctttgtgcaaaaactctgggaacaatacatggatgagaaggacgagtacttacagcagctaaagcaggagcttggcatagaactccatgaggaagtgactctgcccaagctgcgagggggcctgatgaccatcgaccccagcctggacaagcagacagtgaacacctacatgagccaggccttccagctccctgagtcggaaatgccagaggagggtgacgagaaggaagaagccgtggtggaaatcctccagactgccctggagcggcttcaggtgattgacatcaggcgtgtgggacctcgagagccagagcctgcaagctaggaacttgtgggcagcctgcgt

SEQ ID NO: 192897 - DNA, 555 bp, Homo sapiens
  Payload ID: 18077
  Gene Name: translin-associated factor X interacting protein 1
  ENST ID: ENST00000565148
  CDS Start-End: 43-555
ttcccaggccgcgggtgctgattgcccgcctgcccgtgggtcatggcctgccagcagtcgcggtaccacagcttctcgtccgcgtcgagattacagccacggccttcaggagtgaccatagacgaatcctttctcacagaagacaagagcacccagaatcgcaagcttcttcagaaacgaaggacgctgactggtcagttctccatgggtgggcacctgtccccatggcccacatacaccagtggccagaccattttgcaaaatcgaaaaccctgttcagatgactaccggaagcgagtagggagctgccagcagcacccctttcgcactgccaagccccagtacttggaggaactggaaaactacctacgcaaggagctcctcctgctggacctgggcacagattccacccaggaactaaggctgcaggtgaccaaactgaggaagaacttggctgaggagtacctgcactacctcagtgagcgagatgcctgtaagatcctcatcgcagacctgaatgagctgcggtaccagcgggaggacatgtcattagcc

SEQ ID NO: 192898 - DNA, 619 bp, Homo sapiens
  Payload ID: 18077
  Gene Name: translin-associated factor X interacting protein 1
  ENST ID: ENST00000563363
  CDS Start-End: 51-344
accacagcttcccaggccgcgggtgctgattgcccgcctgcccgtgggtcatggcctgccagcagtcgcggtaccacagcttctcgtccgcgtcgagattacagccacggccttcaggagtgaccatagacgaatcctttctcacagaagacaagagcacccagaatcgcaagcttcttcagaaacgaaggacgctggagctgccagcagcacccctttcgcactgccaagccccagtacttggaggaactggaaaactacctacgcaaggagctcctcctgctggacctgggcacagattccacccaggaactaaggctgcagccttacagagagatctttgagttcttcatagaggacttcaaaacgtacaagccattactatcctccatcaagaatgcgtatgaggggatgctggcccaccaaagggagaagattcgggctctggagcccctgaaggccaagcttgtcactgtgaatgaggactgcaatgagaggatcctggccatgagagctgaggagaaatatgaaatctccctgctcaagaaagagaagatgaacttgctaaaactcatcgacaaaaagaatgaggagaagatttcattgcagagcgaggtga

SEQ ID NO: 192899 - DNA, 2517 bp, Homo sapiens
  Payload ID: 18077
  Gene Name: translin-associated factor X interacting protein 1
  ENST ID: ENST00000568990
  CDS Start-End: 243-668
ggtacctggggtcaaatcggctgtagtggttgactctcagggcacccgctgccgggtcccagtccacctttgctactttgtcctactcccagcccgcgggcgctaggctcgggggcgtggcgcatccctgactccgcccccgccgcgggggggcctctggggcctggtcgccatggcgaccggctgtacgctaccacagcttcccaggccgcgggtgctgattgcccgcctgcccgtgggtcatggcctgccagcagtcgcggtaccacagcttctcgtccgcgtcgagattacagccacggccttcaggagtgaccatagacgaatcctttctcacagaagacaagagcacccagaatcgcaagcttcttcagaaacgaaggacgctgactggtcagttctccatgggtgggcacctgtccccatggcccacatacaccagtggccagaccattttgcaaaatcgaaaaccctgttcagatgactaccggaagcgagtagggagctgccagcagcacccctttcgcactgccaagccccagtacttggaggaactggaaaactacctacgcaaggagctcctcctgctggacctgggcacagattccacccaggaactaaggctgcagcccaccaaagggagaagattcgggctctggagcccctgaaggccaagcttgtcactgtgaatgaggactgcaatgagaggatcctggccatgagagctgaggagaaatatgaaatctccctgctcaagaaagagaagatgaacttgctaaaactcatcgacaaaaagaatgaggagaagatttcattgcagagcgaggtgaccaaactgaggaagaacttggctgaggagtacctgcactacctcagtgagcgagatgcctgtaagatcctcatcgcagacctgaatgagctgcggtaccagcgggaggacatgtcattagcccagtcgccaggcatctggggggaggaccctgtgaagttaaccctggctcttaagatgacccggcaagacctgacccgcacgcagatggaactcaacaacatgaaggccaactttggagatgtggtccccaggagggactttgaaatgcaggagaagaccaacaaggatcttcaggagcaggtgctggcaggcaggcagggccaggagggtaggacggggtctcacaggtggggggccagggccaatgtccttgcccacagctggacaccctgagagccagctacgaggaggttcgcaaggagcatgagatcctcatgcagctgcacatgagcacgctgaaggaacgggaccaattcttctctgagctgcaggagatccagcgcacttccacgccgcggcctgactggaccaagtgcaaaggtgagggcagccggcagggccccaggtcctgcttacatgtgggcccagactccagctccctctccccacatgcagatgtggtggctgggggcccagagcgctggcagatgctggctgagggcaagaacagcgaccagctggtggacgtgctcctggaagagattggttcggggctgctgcgggagaaagacttcttccctggtctgggctatggggaagccatccctgcttttcttcggtttgatggcctcgtggagaacaagaagccaagcaagaaggacgtggtcaacctcctcaaggatgcctggaaggaacgtcttgctgaggagcagaaagagacgttcccagatttcttcttcaatttcctggagcatcgctttgggcccagtgatgccatggcctgggcttatactatttttgaaaatatcaagatcttccactccaacgaggttatgagtcagttctatgcagtcttgatgggaaagcggagtgagaatgtgtatgtcacccagaaggagacagtagcccagctgctgaaggagatgacaaatgctgacagtcagaacgaggggctactaaccatggagcagttcaacactgtcctcaagagtaccttccctctcaagacagaagagcaaatccaggagctgatggaggcagggggctggcatcccagcagcagcaatgcagacttgctcaactaccgctcactgtttatggaggatgaggagggccagagtgagccctttgtgcaaaaactctgggaacaatacatggatgagaaggacgagtacttacagcagctaaagcaggagcttggcatagaactccatgaggaagtgactctgcccaagctgcgagggggcctgatgaccatcgaccccagcctggacaagcagacagtgaacacctacatgagccaggccttccagctccctgagtcggaaatgccagaggagggtgacgagaaggaagaagccgtggtggaaatcctccagactgccctggagcggcttcaggtgattgacatcaggcgtgtgggacctcgagagccagagcctgcaagctaggaacttgtgggcagcctgcgtactccagtcctgctaacccctagcttttaatataaaagtgtttgtctgaatcca

SEQ ID NO: 192900 - DNA, 2258 bp, Homo sapiens
  Payload ID: 18077
  Gene Name: translin-associated factor X interacting protein 1
  ENST ID: ENST00000561639
  CDS Start-End: 46-2184
agcttcccaggccgcgggtgctgattgcccgcctgcccgtgggtcatggcctgccagcagtcgcggtaccacagcttctcgtccgcgtcgagattacagccacggccttcaggagtgaccatagacgaatcctttctcacagaagacaagagcacccagaatcgcaagcttcttcagaaacgaaggacgctgactggtcagttctccatgggtgggcacctgtccccatggcccacatacaccagtggccagaccattttgcaaaatcgaaaaccctgttcagatgactaccggaagcgagtagggagctgccagcagcacccctttcgcactgccaagccccagtacttggaggaactggaaaactacctacgcaaggagctcctcctgctggacctgggcacagattccacccaggaactaaggctgcagccttacagagagatctttgagttcttcatagaggacttcaaaacgtacaagccattactatcctccatcaagaatgcgtatgaggggatgctggcccaccaaagggagaagattcgggctctggagcccctgaaggccaagcttgtcactgtgaatgaggactgcaatgagaggatcctggccatgagagctgaggagaaatatgaaatctccctgctcaagaaagagaagatgaacttgctaaaactcatcgacaaaaagaatgaggagaagatttcattgcagagcgaggtgaccaaactgaggaagaacttggctgaggagtacctgcactacctcagtgagcgagatgcctgtaagatcctcatcgcagacctgaatgagctgcggtaccagcgggaggacatgtcattagcccagtcgccaggcatctggggggaggaccctgtgaagttaaccctggctcttaagatgacccggcaagacctgacccgcacgcagatggaactcaacaacatgaaggccaactttggagatgtggtccccaggagggactttgaaatgcaggagaagaccaacaaggatcttcaggagcagctggacaccctgagagccagctacgaggaggttcgcaaggagcatgagatcctcatgcagctgcacatgagcacgctgaaggaacgggaccaattcttctctgagctgcaggagatccagcgcacttccacgccgcggcctgactggaccaagtgcaaagatgtggtggctgggggcccagagcgctggcagatgctggctgagggcaagaacagcgaccagctggtggacgtgctcctggaagagattggttcggggctgctgcgggagaaagacttcttccctggtctgggctatggggaagccatccctgcttttcttcggtttgatggcctcgtggagaacaagaagccaagcaagaaggacgtggtcaacctcctcaaggatgcctggaaggaacgtcttgctgaggagcagaaagagacgttcccagatttcttcttcaatttcctggagcatcgctttgggcccagtgatgccatggcctgggcttatactatttttgaaaatatcaagatcttccactccaacgaggttatgagtcagttctatgcagtcttgatgggaaagcggagtgagaatgtgtatgtcacccagaaggagacagtagcccagctgctgaaggagatgacaaatgctgacagtcagaacgaggggctactaaccatggagcagttcaacactgtcctcaagagtaccttccctctcaagacagaagagcaaatccaggagctgatggaggcagggggctggcatcccagcagcagcaatgcagacttgctcaactaccgctcactgtttatggaggatgaggagggccagagtgagccctttgtgcaaaaactctgggaacaatacatggatgagaaggacgagtacttacagcagctaaagcaggagcttggcatagaactccatgaggaagtgactctgcccaagctgcgagggggcctgatgaccatcgaccccagcctggacaagcagacagtgaacacctacatgagccaggccttccagctccctgagtcggaaatgccagaggagggtgacgagaaggaagaagccgtggtggaaatcctccagactgccctggagcggcttcaggtgattgacatcaggcgtgtgggacctcgagagccagagcctgcaagctaggaacttgtgggcagcctgcgtactccagtcctgctaacccctagcttttaatataaaagtgtttgtctgaatcc

SEQ ID NO: 192901 - DNA, 2228 bp, Homo sapiens
  Payload ID: 18077
  Gene Name: translin-associated factor X interacting protein 1
  ENST ID: ENST00000466164
  CDS Start-End: 273-458
ggcctctgttcatccccctgcctcagttctggtacctggggtcaaatcggctgtagtggttgactctcagggcacccgctgccgggtcccagtccacctttgctactttgtcctactcccagcccgcgggcgctaggctcgggggcgtggcgcatccctgactccgcccccgccgcgggggggcctctggggcctggtcgccatggcgaccggctgtacgctaccacagcttcccaggccgcgggtgctgattgcccgcctgcccgtgggtcatggcctgccagcagtcgcggtaccacagcttctcgtccgcgtcgagattacagccacggccttcaggagtgaccatagacgaatcctttctcacagaagacaagagcacccagaatcgcaagcttcttcagaaacgaaggacgctgcccaccaaagggagaagattcgggctctggagcccctgaaggccaagcttgtcactgtgaatgaggactgcaatgagaggatcctggccatgagagctgaggagaaatatgaaatctccctgctcaagaaagagaagatgaacttgctaaaactcatcgacaaaaagaatgaggagaagatttcattgcagagcgaggtgaccaaactgaggaagaacttggctgaggagtacctgcactacctcagtgagcgagatgcctgtaagatcctcatcgcagacctgaatgagctgcggtaccagcgggaggacatgtcattagcccagtcgccaggcatctggggggaggaccctgtgaagttaaccctggctcttaagatgacccggcaagacctgacccgcacgcagatggaactcaacaacatgaaggccaactttggagatgtggtccccaggagggactttgaaatgcaggagaagaccaacaaggatcttcaggagcaggtgctggcaggcaggcagggccaggagggtaggacggggtctcacaggtggggggccagggccaatgtccttgcccacagctggacaccctgagagccagctacgaggaggttcgcaaggagcatgagatcctcatgcagctgcacatgagcacgctgaaggaacgggaccaattcttctctgagctgcaggagatccagcgcacttccacgccgcggcctgactggaccaagtgcaaagatgtggtggctgggggcccagagcgctggcagatgctggctgagggcaagaacagcgaccagctggtggacgtgctcctggaagagattggttcggggctgctgcgggagaaagacttcttccctggtctgggctatggggaagccatccctgcttttcttcggtttgatggcctcgtggagaacaagaagccaagcaagaaggacgtggtcaacctcctcaaggatgcctggaaggaacgtcttgctgaggagcagaaagagacgttcccagatttcttcttcaatttcctggagcatcgctttgggcccagtgatgccatggcctgggcttatactatttttgaaaatatcaagatcttccactccaacgaggttatgagtcagttctatgcagtcttgatgggaaagcggagtgagaatgtgtatgtcacccagaaggagacagtagcccagctgctgaaggagatgacaaatgctgacagtcagaacgaggggctactaaccatggagcagttcaacactgtcctcaagagtaccttccctctcaagacagaagagcaaatccaggagctgatggaggcagggggctggcatcccagcagcagcaatgcagacttgctcaactaccgctcactgtttatggaggatgaggagggccagagtgagccctttgtgcaaaaactctgggaacaatacatggatgagaaggacgagtacttacagcagctaaagcaggagcttggcatagaactccatgaggaagtgactctgcccaagctgcgagggggcctgatgaccatcgaccccagcctggacaagcagacagtgaacacctacatgagccaggccttccagctccctgagtcggaaatgccagaggagggtgacgagaaggaagaagccgtggtggaaatcctccagactgccctggagcggcttcaggtgattgacatcaggcgtgtgggacctcgagagccagagcctgcaagctaggaacttgtgggcagcctgcgtactccagtcctgctaacccctagcttttaatataaaagtgtttgtctgaa

SEQ ID NO: 192902 - DNA, 834 bp, Homo sapiens
  Payload ID: 18077
  Gene Name: translin-associated factor X interacting protein 1
  ENST ID: ENST00000567852
  CDS Start-End: 596-834
cttcccaggccgcgggtgctgattgcccgcctgcccgtgggtcatggcctgccagcagtcgcggtaccacagcttctcgtccgcgtcgaggtaggcgctggcagggatgagggcagagatgagggtttgagtacttctagagagggaaatggcacttgatccggacctctgcacctcctgctggcctctgaccattgatctagggctccagcaccacagagtcaatggttagaatcgggctgatttagcccagtgaagacgttacgtgctagcaaaacgattacagccacggccttcaggagtgaccatagacgaatcctttctcacagaagacaagagcacccagaatcgcaagcttcttcagaaacgaaggacgctggagctgccagcagcacccctttcgcactgccaagccccagtacttggaggaactggaaaactacctacgcaaggagctcctcctgctggacctgggcacagattccacccaggaactaaggctgcagcccaccaaagggagaagattcgggctctggagcccctgaaggccaagcttgtcactgtgaatgaggactgcaatgagaggatcctggccatgagagctgaggagaaatatgaaatctccctgctcaagaaagagaagatgaacttgctaaaactcatcgacaaaaagaatgaggagaagatttcattgcagagcgaggtgaccaaactgaggaagaacttggctgaggagtacctgcactacctcagtgagcgagatgcctgtaagatcctcatcgcagacctgaatgagctgcggtaccagcgggaggacatgtcattagcccagtc

SEQ ID NO: 192903 - DNA, 816 bp, Homo sapiens
  Payload ID: 18077
  Gene Name: translin-associated factor X interacting protein 1
  ENST ID: ENST00000565558
  CDS Start-End: 1-370
gcagctaaagcaggagcttggcatagaactccatgaggaagtgactctgcccaagctgcgagggggcctgatgaccatcgaccccagcctggacaagcagacagtgaacacctacatgagccaggccttccagctccctgagtcggaaatgccagaggagggtgacgagaaggaagaagccgtggtggaaatcctccagactgccctggagcggcttcagcggggagagctttccccaaaggccagcaggggaaaacccaaccttacttggaggagccagggaagtatctcgcagatcccgcaaaaaggcacccacgtctacagctcggcgggctggaggtctgcgggccaagccaggcctctgcactgactgtggctgaagaggtgtggcaaaggtcaggttgagggatctggtgaggtggggaggcacagaggaaagtcaggtacctgagacccagtttgcccacagatccctccatctgccctggggctctcatctcttagaacagatgctgtgaggctaaaactggtaggaagtagtatgggcagattccatcccaggcagcacctccctccccaagtctctcctccacccactcccagaacaggaaacacccagagcagcacctggtgagggaagaggcatcagcattcccttgaggctctgtcagcaaccggcaagagaatgtaaaagaagaaaaccatgggttggaccgcctgcggtgctggcactggcttcactaccgactcaggcatcaggatggaagattctggggctgcagaaacaccaaggagagggtggggctgacagaacag

SEQ ID NO: 192904 - DNA, 547 bp, Homo sapiens
  Payload ID: 18077
  Gene Name: translin-associated factor X interacting protein 1
  ENST ID: ENST00000561654
  CDS Start-End: 448-547
attgcccgcctgcccgtgggtcatggcctgccagcagtcgcggtaccacagcttctcgtccgcgtcgaggtaggcgctggcagggatgagggcagagatgagggtttgagtacttctagagagggaaatggcacttgatccggacctctgcacctcctgctggcctctgaccattgatctagggctccagcaccacagagtcaatggttagaatcgggctgatttagcccagtgaagacgttacgtgctagcaaaacgattacagccacggccttcaggagtgaccatagacgaatcctttctcacagaagacaagagcacccagaatcgcaagcttcttcagaaacgaaggacgctgcccaccaaagggagaagattcgggctctggagcccctgaaggccaagcttgtcactgtgaatgaggactgcaatgagaggatcctggccatgagagctgaggagaaatatgaaatctccctgctcaagaaagagaagatgaacttgctaaaactcatcgacaaaaagaatgaggagaagatttcattgc

SEQ ID NO: 192905 - DNA, 680 bp, Homo sapiens
  Payload ID: 18078
  Gene Name: translocase of inner mitochondrial membrane 10 homolog (yeast)
  Uniprot ID: P62072
  ENST ID: ENST00000257245
  CDS Start-End: 154-426
ggaagtaacccacgtgcttccgctggagcctctcgggaggcgggtaacgttatagtatttgtcagaagttggggtctccgtgggcattgtgatccgtcccaggcagtggattaggaggccagaaggagatcccttccacggtgctaggctgagatggatcctctcagggcccaacagctggctgcggagctggaggtggagatgatggccgatatgtacaacagaatgaccagtgcctgccaccggaagtgtgtgcctcctcactacaaggaagcagagctctccaagggcgagtctgtgtgcctggaccgatgtgtctctaagtacctggacatccatgagcggatgggcaaaaagttgacagagttgtctatgcaggatgaagagctgatgaagagggtgcagcagagctctgggcctgcatgaggtccctgtcagtatacaccctggggtgtaccccaccccttcccactttaataaacgtgctccctgttgggtgtcatctgtgaagactgccaggcctaggctctctgtagagagtcttcaagatcccggagtggtagcgctgtctcctggtgaaggagtatttgtcacactggaatgtgactgtgtgtgtatgtatgtgtatatatatatatatatatatatatatatatataaacaagtttgttgacacctac

SEQ ID NO: 192906 - DNA, 530 bp, Homo sapiens
  Payload ID: 18078
  Gene Name: translocase of inner mitochondrial membrane 10 homolog (yeast)
  Uniprot ID: P62072
  ENST ID: ENST00000525158
  CDS Start-End: 182-454
ctcgggaggcgggtaacgttatagtatttgtcagaagttggggtctccgtgggcattgtgatccgtcccaggcagtgccccaggggtaggagagtgaacggcggcggtgggtgctgatggtgatgtctgctcccaggattaggaggccagaaggagatcccttccacggtgctaggctgagatggatcctctcagggcccaacagctggctgcggagctggaggtggagatgatggccgatatgtacaacagaatgaccagtgcctgccaccggaagtgtgtgcctcctcactacaaggaagcagagctctccaagggcgagtctgtgtgcctggaccgatgtgtctctaagtacctggacatccatgagcggatgggcaaaaagttgacagagttgtctatgcaggatgaagagctgatgaagagggtgcagcagagctctgggcctgcatgaggtccctgtcagtatacaccctggggtgtaccccaccccttcccactttaataaacgtgctccctgttgggtgtca

SEQ ID NO: 192907 - DNA, 486 bp, Homo sapiens
  Payload ID: 18078
  Gene Name: translocase of inner mitochondrial membrane 10 homolog (yeast)
  Uniprot ID: P62072
  ENST ID: ENST00000525587
  CDS Start-End: 123-395
gcgagtttgaatcaaagaagaggcgggactttcctcccggaagtaacccacgtgcttccgctggagcctctcgggaggattaggaggccagaaggagatcccttccacggtgctaggctgagatggatcctctcagggcccaacagctggctgcggagctggaggtggagatgatggccgatatgtacaacagaatgaccagtgcctgccaccggaagtgtgtgcctcctcactacaaggaagcagagctctccaagggcgagtctgtgtgcctggaccgatgtgtctctaagtacctggacatccatgagcggatgggcaaaaagttgacagagttgtctatgcaggatgaagagctgatgaagagggtgcagcagagctctgggcctgcatgaggtccctgtcagtatacaccctggggtgtaccccaccccttcccactttaataaacgtgctccctgttgggtgtcatctgtgaagactgcc

SEQ ID NO: 192908 - DNA, 2840 bp, Homo sapiens
  Payload ID: 18079
  Gene Name: translocase of inner mitochondrial membrane 10 homolog B (yeast)
  Uniprot ID: Q9Y5J6
  ENST ID: ENST00000254616
  CDS Start-End: 71-382
gagaggttacttccggggcggcaccgagaagctgaaacggaagtggcgtacggcatgcgccggtggcgtgatggagcggcagcagcagcagcaacagcaactgcgaaacctgcgtgacttcctgttggtctacaatcggatgacagaactctgcttccagcgctgtgtgcccagcttgcaccaccgagctctggacgctgaggaggaggcctgtctgcacagctgtgctgggaagctgatccattccaaccaccgcctcatggccgcttacgtgcagctcatgcctgccctggtacagcgccgcatcgcagactacgaggctgcctcggctgtgccaggcgttgctgctgaacagcctggggtctctccatcaggcagctagccatacccaaccccaggaaggaaggccttggatggaccctcagattgaaggacccggtggaccttggggttggtgaatcctaaacagagagaattcgaggttgcctgaaagctgggtgtccttgctccttttcctggagccaatatacccagtttttactcagtttgatttatattctgggcaaggaagctttgcctactttattggcacaatccgttgttctgtcgtttagtgcatatctgctggcttcagccctggcagctgagaaattgttttctatatgtagaaggaaaacctgagcatttgcaggcatctggttaaagcagggtctgtgtgtacaattttaaaacgggtaatatgtcatgctcttagttcatcttcacaacaaaactatgagtaagcggtattagcctcacttaacagatgaggaagcaagattccagaaagtaccagaaggtcattttatacaacaggagattggttcctgcccagatgacagaaaatgggagctctgtctagttgtccttaagtctgactgacttcagtggctcataaccgtgagccaagtatttgttggttcataactgttgttttgtgaactatgtcttacatgtctagagttctgctggatctagggaaaggaggagctatcgaagtacaacggatcaaaaaaccacagggcttttgggcactgcctccttgggaagttagtggccacagaagagagatgaaacctgtaagaagtctggagtcttttggaacttcagccatttccccaggttgttactttcttagtatgtacagtcttctcaggatgagcagtaaaacctttgaacaaaggtctgtgtggttgtcttcacgggcaatcaggaagggagagagctggggaccatattctgcaatgcagccaaatccgaggaagagaaactgaagggagaagtagatggcaatggttatgataaaaagggataaaactaaatcttcgggacttctttaatgctacgttaatgtttcactgctcgtctagaaactcctaaatccagctttctatcatctgccccacattggtcccattgagtacattctgtgatttctaattccagcctctccattcttttctcattattgcctcccccgccccccaactttgtgtaatttacttctgtattcagcagcctggatagcatatcattccatcaccccattttcttgccaccattggccatctttttgtatcattccacttattctgtcttttccattccttcattcaaactgctagagaaaaacagttgtgtaatgaatgccactaaatattcaaggcctccaacctcagccaagtcctcacaccaacacgcagtcacaccaacacacacctttatgggttcctggtccatttccttctctaattaccatggcagttattttacacctctactgctgtccttaatcccataccccaccctcatcaggtgaccctgtttccttttttagagaaattgaagctcttagacattggtttccacagtaataattttaaaacttcttacaactacctacaaagcagatgttctatcctatctacagagcagaaaattgaaattctcaagtagcagacccggtattaaagtgcagatctgactttaaagtccatgttcattttacacagcaggctgcctcttaagatagtatttattgagcacacactttgtgtaggttctgattttggtagatgtcatgctttatattaatctttacaacaactataagtaagaggtattaacctcacttaacagatgaggaagcaagaatccagaatgtgccagaaggcacattctgcagatttcgtgcaaacatttatacacagcttcttttttttttttttgagacagagtctcgctctgtcacccaggctggagtgcagtggagcgatctaggctcactgcaacctccgccacccgggttcaagcagttctcctgcctcagcctctcgagtagctgggattacaggcatgcgccaccacgcccagctaattttgtttttgtattttaagtagagacggggtttcactgtattggtcaggctggtcttgaactcctgaccttgtgatccgcccgcctcggcctccaaaagtgctgggattacaggtgtgagccaccacggccggcctatacaaagtttcttattgagaaaagtggttccaatcatgttttttgccccctttagctgctatctcttgaacagaaaagtttgttaggaaggtaaaagttgctgactaggaccttacccacagggtggcactctgtccttgggaaatataaatgcaagtaaaacaggtttgaacttcttaacttccagaagataggaggatgggacctgtgatactgtgctgctggtgggaggacccttccacatcaacatttgtgtgtatccttgcaataaacttccattgtgaat

SEQ ID NO: 192909 - DNA, 516 bp, Homo sapiens
  Payload ID: 18079
  Gene Name: translocase of inner mitochondrial membrane 10 homolog B (yeast)
  ENST ID: ENST00000531462
  CDS Start-End: 12-227
ccggtggcgtgatggagcggcagcagcagcagcaacagcaactgcgaaacgaggcctgtctgcacagctgtgctgggaagctgatccattccaaccaccgcctcatggccgcttacgtgcagctcatgcctgccctggtacagcgccgcatcgcagactacgaggctgcctcggctgtgccaggcgttgctgctgaacagcctggggtctctccatcaggcagctagccatacccaaccccaggaaggaaggccttggatggaccctcagattgaaggacccggtggaccttgggagttctgctggatctagggaaaggaggagctatcgaagtacaacggatcaaaaaaccacagggcttttgggcactgcctccttgggaagttagtggccacagaagagagatgaaacctgtaagaagtctggagtcttttggaacttcagccatttccccaggttgttactttcttagtatgtacagtcttctcaggatgagcagtaaaacctttgaacaaa

SEQ ID NO: 192910 - DNA, 809 bp, Homo sapiens
  Payload ID: 18079
  Gene Name: translocase of inner mitochondrial membrane 10 homolog B (yeast)
  ENST ID: ENST00000530751
  CDS Start-End: 17-232
atgcgccggtggcgtgatggagcggcagcagcagcagcaacagcaactgcgaaacgaggcctgtctgcacagctgtgctgggaagctgatccattccaaccaccgcctcatggccgcttacgtgcagctcatgcctgccctggtacagcgccgcatcgcagactacgaggctgcctcggctgtgccaggcgttgctgctgaacagcctggggtctctccatcaggcagctagccatacccaaccccaggaaggaaggccttggatggaccctcagattgaaggacccggtggaccttggggttggtgaatcctaaacagagagaattcgaggttgcctgaaagctgggtgtccttgctccttttcctggagccaatatacccagtttttactcagtttgatttatattctgggcaaggaagctttgcctactttattggcacaatccgttgttctgtcgtttagtgcatatctgctggcttcagccctggcagctgagaaattgttttctatatgtagaaggaaaacctgagcatttgcaggcatctggttaaagcagggtctgtgtgtacaattttaaaacgggtaatatgtcatgctcttagttcatcttcacaacaaaactatgagtaagcggtattagcctcacttaacagatgaggaagcaagattccagaaagtaccagaaggtcattttatacaacaggagattggttcctgcccagatgacagaaaatgggagctctgtctagttgtccttaagtctgactgacttcagtggctcataaccgtgagccaagtatttgttgg

SEQ ID NO: 192911 - DNA, 608 bp, Homo sapiens
  Payload ID: 18079
  Gene Name: translocase of inner mitochondrial membrane 10 homolog B (yeast)
  Uniprot ID: Q9Y5J6
  ENST ID: ENST00000533379
  CDS Start-End: 10-321
ggtggcgtgatggagcggcagcagcagcagcaacagcaactgcgaaacctgcgtgacttcctgttggtctacaatcggatgacagaactctgcttccagcgctgtgtgcccagcttgcaccaccgagctctggacgctgaggaggaggcctgtctgcacagctgtgctgggaagctgatccattccaaccaccgcctcatggccgcttacgtgcagctcatgcctgccctggtacagcgccgcatcgcagactacgaggctgcctcggctgtgccaggcgttgctgctgaacagcctggggtctctccatcaggcagctagccatacccaaccccaggaaggaaggccttggatggaccctcagattgaaggacccggtggaccttgggagttctgctggatctagggaaaggaggagctatcgaagtacaacggatcaaaaaaccacagggcttttgggcactgcctccttgggaagttagtggccacagaagagagatgaaacctgtaagaagtctggagtcttttggaacttcagccatttccccaggttgttactttcttagtatgtacagtcttctcaggatgagcagtaaaacctttgaaca

SEQ ID NO: 192912 - DNA, 1973 bp, Homo sapiens
  Payload ID: 18080
  Gene Name: translocase of inner mitochondrial membrane 13 homolog (yeast)
  Uniprot ID: Q9Y5L4
  ENST ID: ENST00000215570
  CDS Start-End: 362-649
gtgcgcatgcgcggcaggcccttcgggacgagctggaggcagagcgtgagtacaaagtgatcggcctcggccgcacgtagtagcccccctactccccggccaagtcagggcctccctcttcccgcggagtcgcaaccacgggtagctcgtgtaggtaacggcaggtccaggcctccgcatgagcggagggccccccgcgcgaccttgaatggcccgggcgcgcgcggtcgtgtgggagttgtagtcctccgtccccgtccgcgcggactccgtttcccgtggtgccccgggcggcccgcttccggcgcagttagttacgagtcggcgcacgcggcctcggtccggttgactttgcggagccatggagggcggcttcggctccgatttcgggggctccggcagcgggaagctggacccagggctcataatggagcaggtgaaagtgcagatcgccgtggccaacgcgcaggagctgctgcagaggatgacggacaagtgtttccggaagtgtatagggaaacctgggggctccctggacaactccgagcagaagtgcatcgccatgtgcatggaccgctacatggacgcctggaacaccgtgtctcgcgcctacaactcgcggctgcagcgggaacgagccaacatgtgaccggcgagcgcgggccaccccaccctgttcatttccataaacgtgctttgagaggcggggtccgcatgtacgtactgcctgcccggggcttaggagggtggcaccggtgctgggacacacgggactgtgtcctcgccaccccccgccctgccccctgccagccagtgcagcttggatctcgggggtgtggggccctgtgccttcctgaagtgctggcagcccagtggcacctccttcaggcctttggggtattcccctagtgtgcccaagtcagcctcatattctgggcggacagcttgtctggacttcggagttgggggtggtcagacaccacaggagctgtcacctcctgcggatgggcaaataaattggtggaggacggagagaaacctctttatttccctcctgaggggtctctgggaagaggtgacgcgtgtccctggaaccccagctcggagggtctcagcctcccctgggttgggagaagtccatctttccccttagtgccaccgggctgctgagtcacgaggaatgtgttgctgctgccacccctgccccaaaggctaagggggacagccttccccttgtcagggcttgctttgaccctgcttcgttccaccccgggtcctggtggagcaccaggcaggtggtcctcgctgtgacactgaggtgctgagccagtgagctagggtggaggggctgtgtttattggaacaaagggtggtaccaaaatgcatccccatgacccacagcccccccacacccgtccttgggtagggtacggtggggtggggtgttgggtggcctgctgctcctgttgctttcacgtagagtctcggcctgggcagtcacgtggtggtcactcctggatgtgctgtcctatccagcctctcacagctgccacccgggtatagacacctgggaagtggggccggccacagccatagccccagctagtgaccccagttagcacccaccgtccagagggctccctgcaggccaggggtcccccagcgtcaccctgttggggagagaagaaagggggttcagaggccggtacctcccctacagcagcccttgggtcattggcccctctaggagtgaccctagtgacttcccctgggagccgcattttcactatctggaaaatgggctcaatgcaaaggtggcagacatttatggacacccgccacgtggtcccggagtggaacggtgcctcccactgcagcctctgcctgctctgccgccgaggcccggggatgggatgcggtgggttgcccaataaacggctgtggagtggaaattcctccagagccaaaaaggc

SEQ ID NO: 192913 - DNA, 631 bp, Homo sapiens
  Payload ID: 18080
  Gene Name: translocase of inner mitochondrial membrane 13 homolog (yeast)
  ENST ID: ENST00000591871
  CDS Start-End: 6-248
gagccatggagggcggcttcggctccgatttcgggggctccggcagcgggaagctggacccagggctcataatggagcagaggatgacggacaagtgtttccggaagtgtatagggaaacctgggggctccctggacaactccgagcagaagtgcatcgccatgtgcatggaccgctacatggacgcctggaacaccgtgtctcgcgcctacaactcgcggctgcagcgggaacgagccaacatgtgaccggcgagcgcgggccaccccaccctgttcatttccataaacgtgctttgagaggcggggtccgcatgtacgtactgcctgcccggggcttaggagggtggcaccggtgctgggacacacgggactgtgtcctcgccaccccccgccctgccccctgccagccagtgcagcttggatctcgggggtgtggggccctgtgccttcctgaagtgctggcagcccagtggcacctccttcaggcctttggggtattcccctagtgtgcccaagtcagcctcatattctgggcggacagcttgtctggacttcggagttgggggtggtcagacaccacaggagctgtcacctcctgcggatgggcaaataaattggtggaggacgga

SEQ ID NO: 192914 - DNA, 1659 bp, Homo sapiens
  Payload ID: 18081
  Gene Name: translocase of inner mitochondrial membrane 17 homolog A (yeast)
  Uniprot ID: Q99595
  ENST ID: ENST00000367287
  CDS Start-End: 37-552
agcttgcccggcatcactcgcggcattggagtcaagatggaggagtacgcgcgagagccttgcccatggcgaattgtggatgactgtggtggggcctttacgatgggtaccattggtggtggtatctttcaagcaatcaaaggttttcgcaattctccagtgggagtaaaccacagactacgagggagtttgacagctattaaaaccagggctccacagttaggaggtagctttgcagtttggggagggctgttttccatgattgactgtagtatggttcaagtcagaggaaaggaagatccctggaactccatcacaagtggtgccttaacgggagccatactggcagcaagaaatggaccagtggccatggttgggtcagccgcaatgggtggcattctcctagctttaattgaaggagctggtatcttgttgacaagatttgcctctgcacagtttcccaatggtcctcagtttgcagaagacccctcccagttgccttcaactcagttaccttcctcaccttttggagactatcgacaatatcagtaggacttctttcctaggatttctttaacagaacgagttgtggttcgagaaggatttcagaagatcaagttacagtctgtttttaaaaccataggtgggacagctatggccaataggctataaagagacatttagcacttttttctatttaaaggaacaagcggggaagggtgctaaaagataatacgtttatttattcacacttgaattgcatttgtgatcaaaataaatgtttaaatcgctaaaggaaaatacagtaagtgcttgaaagatgaaggaccaaaaggccaaaaaacagtgaaatatgatcatcatctccttgcggacttctctgcctggttttgtgtgttctgttattcaaacaataaaaagctggtggaacttactctttcttttaagataagttgtagacttcgatgtttcatgctcatgtacttcaaataatgcatgttttatagttagtccctcatcacttgaagtgacttctgagaattatgcagagtcaacatggatcatttcacagtgagatgctttatggattgaaggatatggtaaaatgtttatagtttactttgaaagtaaaatatactatgtcttggttttgaggatattggatacaaaactctcttcctttagggctactgagtcttgattcctgatcatcagaaatttcaccagaaacaacttgcttccaatatacccaattctatatgaagaattcatggagagtgtactggcactggaagagtttagtgtttcttgtatgcttgaaaataaagtatgtactgttttgaatgtgttccaagtcctctgcataaacgatgtattttggggtctggttgggcctggaaaatggatgagcacttcagaacaggtcattttcctgatattggaagtgacatgtggccctataggaggcatgatgttagttaattacacatttgcctacatctgtgggaaatggagaacaaagccatgtgggtactgtaaacacacgtttatcttttggcccaatgccatacatatggtaggcatttaattactgattgtgtttggataatttgggaattttcgactgtggtaaaatatacataaaataatacttattaa

SEQ ID NO: 192915 - DNA, 950 bp, Homo sapiens
  Payload ID: 18082
  Gene Name: translocase of inner mitochondrial membrane 17 homolog B (yeast)
  Uniprot ID: O60830
  ENST ID: ENST00000376582
  CDS Start-End: 150-668
tgggggagcagagggcagcacttcctccagctccaaaagagtgcacccaccccaacgttaccaatacactcgtgcaggcggaaagctccgacgccggtgtgcgtctacgctgggggcgtggcctgactgcgcggccagacgccagcgccatggaggagtacgctcgggagccctgcccatggcgaattgtggatgattgcggtggagccttcactatgggtgtcatcggtggcggagtcttccaggccatcaagggtttccgcaatgcccctgttggaattcggcaccggttgagaggtagtgccaatgctgtgaggatccgagccccccagattggaggtagcttcgcagtgtgggggggcctgttctccaccatcgactgtggcctggtgcggcttcggggcaaggaggatccctggaactctatcaccagtggagcattgaccggggctgtgctggctgcccgcagtggcccactggccatggtgggctcagcaatgatggggggcatcctgttggccctcattgagggcgttggcatcctcctcactcgctacacagcccagcagttccgaaatgcgcccccattcctggaggaccccagccagctgccccctaaggatggcaccccggccccaggctaccccagctatcagcagtaccactgaggaagccactgccaccatgggagctacttctcggttccctccccgatggtctacctcgaagggagggctggctcccagttagccctgggaccctccagagagggtttctactctgctccctagtcccagggtgggggtggggcaccccagctgccctgacagatgggtcccctttttctctctcagggcaccccagccccacactcacatgtacgaagttctcaccccagctcctttgtgtggcaccctgatgagtatttaaagcccgttttgaaatgccta

SEQ ID NO: 192916 - DNA, 1099 bp, Homo sapiens
  Payload ID: 18082
  Gene Name: translocase of inner mitochondrial membrane 17 homolog B (yeast)
  Uniprot ID: O60830
  ENST ID: ENST00000396779
  CDS Start-End: 150-818
tgggggagcagagggcagcacttcctccagctccaaaagagtgcacccaccccaacgttaccaatacactcgtgcaggcggaaagctccgacgccggtgtgcgtctacgctgggggcgtggcctgactgcgcggccagacgccagcgccatggaggagtacgctcgggagccctgcccatggcgaattgtggatgattgcggtggagccttcactatgggtgtcatcggtggcggagtcttccaggccatcaagggtttccgcaatgcccctgtttgcagattgctgtctgaagctcccttgtttatctactcttgctcaagatctgtgtctcccaccgttaatgtgagctctgagagggcagagagcagacctaccttgttcatggctgtatccctgcatatggcatggtgcttggcacatataggaattcggcaccggttgagaggtagtgccaatgctgtgaggatccgagccccccagattggaggtagcttcgcagtgtgggggggcctgttctccaccatcgactgtggcctggtgcggcttcggggcaaggaggatccctggaactctatcaccagtggagcattgaccggggctgtgctggctgcccgcagtggcccactggccatggtgggctcagcaatgatggggggcatcctgttggccctcattgagggcgttggcatcctcctcactcgctacacagcccagcagttccgaaatgcgcccccattcctggaggaccccagccagctgccccctaaggatggcaccccggccccaggctaccccagctatcagcagtaccactgaggaagccactgccaccatgggagctacttctcggttccctccccgatggtctacctcgaagggagggctggctcccagttagccctgggaccctccagagagggtttctactctgctccctagtcccagggtgggggtggggcaccccagctgccctgacagatgggtcccctttttctctctcagggcaccccagccccacactcacatgtacgaagttctcaccccagctcctttgtgtggcaccctgatgagtatttaaagcccgttttgaaatgcct

SEQ ID NO: 192917 - DNA, 1528 bp, Homo sapiens
  Payload ID: 18082
  Gene Name: translocase of inner mitochondrial membrane 17 homolog B (yeast)
  ENST ID: ENST00000466995
  CDS Start-End: 23-193
tgcgcggccagacgccagcgccatggaggagtacgctcgggagccctgcccatggcgaattgtggatgattgcggtggagccttcactatgggtgtcatcggtggcggagtcttccaggccatcaagggtttccgcaatgcccctgttagacggggtttcaacgtgttgcttaggctggtctctaattcctgaactcaagtgatccacccacctcagcctcccaaagtgctgggattacaggtgttagccactgcgcattttacctagaggcagattctggctcagaaacccggatagaggaaaatgacaggaatttaattggcagacggaagacagccttgaagttgagagaattcttttaacataattctttttctctgaccacctcccctcccagaagatcgcaaatgccatgactttaaatgccatctattagccaaggtctctgcaatttatatatgtagccccgtccctcccctagactcctggaactctcctccctggatctttgcccaagtttgtcatcctcaaggtctcagcacagattccccctccttcaagaggcctttcctgacccctcagccccagtcatatttcttcatggcatttcctctacagtgcagattgctgtctgaagctcccttgtttatctactcttgctcaagatctgtgtctcccaccgttaatgtgagctctgagagggcagagagcagacctaccttgttcatggctgtatccctgcatatggcatggtgcttggcacatataggaattcggcaccggttgagaggtagtgccaatgctgtgaggatccgagccccccagattggaggtagcttcgcagtgtgggggggcctgttctccaccatcgactgtggcctggtgcggcttcggggcaaggaggatccctggaactctatcaccagtggagcattgaccggggctgtgctggctgcccgcagtgagtgacccctggccctggccccagccccttccaccctgttctgcctgctctcacctctgtttctctgcctccaactcccccaggtggcccactggccatggtgggctcagcaatgatggggggcatcctgttggccctcattgagggcgttggcatcctcctcactcgctacacagcccagcagttccgaaatgcgcccccattcctggaggaccccagccagctgccccctaaggatggcaccccggccccaggctaccccagctatcagcagtaccactgaggaagccactgccaccatgggagctacttctcggttccctccccgatggtctacctcgaagggagggctggctcccagttagccctgggaccctccagagagggtttctactctgctccctagtcccagggtgggggtggggcaccccagctgccctgacagatgggtcccctttttctctctcagggcaccccagccccacactcacatgtacgaagttctcaccccagctcctttgtgtggcaccctgatgagtatttaaagcccgttttgaaatgcc

SEQ ID NO: 192918 - DNA, 939 bp, Homo sapiens
  Payload ID: 18082
  Gene Name: translocase of inner mitochondrial membrane 17 homolog B (yeast)
  ENST ID: ENST00000495490
  CDS Start-End: 85-663
gctgggggcgtggcctgactgcgcggccagacgccagcgccatggaggagtacgctcgggagccctgcccatggcgaattgtggatgattgcggtggagccttcactatgggtgtcatcggtggcggagtcttccaggccatcaagggtttccgcaatgcccctgttatctgtgtctcccaccgttaatgtgagctctgagagggcagagagcagacctaccttgttcatggctgtatccctgcatatggcatggtgcttggcacatataggaattcggcaccggttgagaggtagtgccaatgctgtgaggatccgagccccccagattggaggtagcttcgcagtgtgggggggcctgttctccaccatcgactgtggcctggtgcggcttcggggcaaggaggatccctggaactctatcaccagtggagcattgaccggggctgtgctggctgcccgcagtggcccactggccatggtgggctcagcaatgatggggggcatcctgttggccctcattgagggcgttggcatcctcctcactcgctacacagcccagcagttccgaaatgcgcccccattcctggaggaccccagccagctgccccctaaggatggcaccccggccccaggctaccccagctatcagcagtaccactgaggaagccactgccaccatgggagctacttctcggttccctccccgatggtctacctcgaagggagggctggctcccagttagccctgggaccctccagagagggtttctactctgctccctagtcccagggtgggggtggggcaccccagctgccctgacagatgggtcccctttttctctctcagggcaccccagccccacactcacatgtacgaagttctcaccccagctcctttgtgtggcaccctgatgagtatttaaagcccgttttgaaa

SEQ ID NO: 192919 - DNA, 964 bp, Homo sapiens
  Payload ID: 18082
  Gene Name: translocase of inner mitochondrial membrane 17 homolog B (yeast)
  Uniprot ID: O60830
  ENST ID: ENST00000465150
  CDS Start-End: 14-682
agacgccagcgccatggaggagtacgctcgggagccctgcccatggcgaattgtggatgattgcggtggagccttcactatgggtgtcatcggtggcggagtcttccaggccatcaagggtttccgcaatgcccctgtttgcagattgctgtctgaagctcccttgtttatctactcttgctcaagatctgtgtctcccaccgttaatgtgagctctgagagggcagagagcagacctaccttgttcatggctgtatccctgcatatggcatggtgcttggcacatataggaattcggcaccggttgagaggtagtgccaatgctgtgaggatccgagccccccagattggaggtagcttcgcagtgtgggggggcctgttctccaccatcgactgtggcctggtgcggcttcggggcaaggaggatccctggaactctatcaccagtggagcattgaccggggctgtgctggctgcccgcagtggcccactggccatggtgggctcagcaatgatggggggcatcctgttggccctcattgagggcgttggcatcctcctcactcgctacacagcccagcagttccgaaatgcgcccccattcctggaggaccccagccagctgccccctaaggatggcaccccggccccaggctaccccagctatcagcagtaccactgaggaagccactgccaccatgggagctacttctcggttccctccccgatggtctacctcgaagggagggctggctcccagttagccctgggaccctccagagagggtttctactctgctccctagtcccagggtgggggtggggcaccccagctgccctgacagatgggtcccctttttctctctcagggcaccccagccccacactcacatgtacgaagttctcaccccagctcctttgtgtggcaccctgatgagtatttaaagcccgttttgaaatgccta

SEQ ID NO: 192920 - DNA, 666 bp, Homo sapiens
  Payload ID: 18082
  Gene Name: translocase of inner mitochondrial membrane 17 homolog B (yeast)
  ENST ID: ENST00000490755
  CDS Start-End: 190-666
ggaggagtacgctcgggagccctggtacggcaatgggcacaggcatccggaatattgctgcgacgccaaggccagccgtgggggtcgggcgggggaggcatcggccgcacagagccatgtaccagactcgggggactcttaacgtatctcccgctacccccactcggttcctgtcattcgggctccgttatgaggggccacaaccagagaagcccatggcgaattgtggatgattgcggtggagccttcactatgggtgtcatcggtggcggagtcttccaggccatcaagggtttccgcaatgcccctgtttgcagattgctgtctgaagctcccttgtttatctactcttgctcaagatctgtgtctcccaccgttaatgtgagctctgagagggcagagagcagacctaccttgttcatggctgtatccctgcatatggcatggtgcttggcacatataggaattcggcaccggttgagaggtagtgccaatgctgtgaggatccgagccccccagattggaggtagcttcgcagtgtgggggggcctgttctccaccatcgactgtggcctggtgcggcttcggggcaaggaggatccctggaactctatcaccagtggagcattgaccggggctgtgctggctgcccgcagtggcccactg

SEQ ID NO: 192921 - DNA, 3095 bp, Homo sapiens
  Payload ID: 18083
  Gene Name: translocase of inner mitochondrial membrane 21 homolog (yeast)
  Uniprot ID: Q9BVV7
  ENST ID: ENST00000169551
  CDS Start-End: 299-1045
cgggggtttcccaggtgactttgcgaaggcatggcggggacactgtgaatgtcagcccagaaggtgatcagagcctgttaattaaaatggaaagaagacagaagggaaggtagacatcaggttctccctggagacttttcgttttcatttacgctgcggaaactgacgtttttgcctaacaccccatgtaatgtaaacgtataggcttgagtacgtgtccggccgcatgtgtagtgaaccctaaagctttcctaattgtagttagcatcgtccctaagcggaacgattttccgtgaacatgatttgtacttttctacgagccgtacagtatacggagaagctgcacaggtcctcggcaaagcgattgcttttgccatacatcgtgcttaacaaagcgtgcttgaagactgagcccagtttgagatgtgggcttcaatatcaaaagaaaacgctgcgacctagatgtattcttggagtcacccagaaaaccatctggacgcagggaccgagcccccgaaaagcaaaggaggatggcagcaaacaagtgtctgtgcacaggagtcagagagggggaaccgccgtcccaacatcacaaaaagtgaaagaagccggaagagattttacctatttaatagtggtgctttttggaatcagcattacaggtggcttgttttacacgattttcaaagaacttttttcttcatccagtcctagcaagatatatgggagagccttagaaaaatgcagatcacatcctgaggtgatcggtgtctttggtgagtctgttaaaggctatggggaggtgacaaggcggggtcgccggcagcatgtcaggttcactgaatatgtaaaagatgggctgaaacacacgtgtgtgaaattctacattgagggctctgagccagggaagcaaggaacggtgtatgcgcaagtgaaagagaacccaggaagtggtgaatatgattttcgatatatatttgtagaaattgaatcttatcctagaagaactattatcattgaagataatcgatcccaagatgattaaaatagggtttctgatggatgttgaatggcgtggactcgctactccgttcttcacagctgccttccagaatgtgttcaaaagaaagacaagaaggagtgtatggcttataaagtgaatctaatacagtatttgttgcatttaaacaaactagacattttcttacggaaaaattatgaaatacagcatattttatgttctcccattgactcaatcatgacaatatttctgctttaacaccatctttcatgattagaaatgtttgttattggaaatgttacaccatgtaaataaaggaaatagattttagtattgtattcattttatattatagaactgcataatgtctgcagaataaaattaaaactaacaaatatgtcattagcagctgccctccgcatactttggaatctgacttgagataagcatgtgaaaatggttgagggccatagggaaccagatggtaaatacattcttcaaaattgtgtgagttttaggaatctgtctcatatttcgcgcttcatgaattaagggcctagtacatagcgggaaaagtacacactcccaagttgggtagacctgggcacccaccccaccttttctagcaggtgcgtggtcaagtgtccctgttgtgtgggttgttaggatggcagtgtgatgagaggtacaagcctggaccatagaaggcagccatgaagtgccctcatcccctttagaacttacttgcactgatacttctgactgccaaaagaacatgggagtgaatgagagacattcaaatacgtgtgtgaggccccttaaagaaaaaaaaaaaaaaaaaggaaattctattttatttgaaatatttgctggggatttggaaaaaagtgaccttcacttacaagatcctgattccatatctatgtaagtgctatgtgcattgggaggggtctagaaccatgtttatctgcggtggcttcagtgtgaggtatcccctctgatgtgtttgttccttctccccgagaactgtctgtagaggaatttctgatgtgttcttgaaattttgggatattcaggatagagagacctccaggcaatctatctcccctttttactttatctccctgcttaatttagttagtttcttggtttgactgcttgttttagatgtttttaattataaaaatttccaacatttaaggagtatagaaaatataacagacactcgtctccctgacgtaacacactttgactgaatgaggccttaacttaggctttctctcctaatcgttttttcctttgctatagaatgttcagtttcaggattcactgaaatgtcaacatttaacaggctgagaagttccacttgctatcctaaactcaaaaaagcagccctgctcttcaaacaacctgctcaaactgtagcttgctgaagaagcccggcatctgagctcaggtggggatttagccaccctccatggccctgtcatttgacttaagactgtttgctttttctgtattcatttttatgcacctgccattttacaatatgctcatgcccctttaagatctgagcttttggccaggcgaggtggctcatgcctataatcccagcactttgggaggctgaggcaggtcaatcactggaggtcaggagttcaagaccagcctggccaacatggtgaaaccctatctactaaaaattcaaaaaaaaaaaaattaaccaggcacgttgacacactcctgtaatctcatctactcaggagacaggagaagcgcttgaacccaggaggcagaggttgcagtgagccaagatcatgtcactgcactccagcatgagtgacggagtgtgacttcgtctcaaaaaaaaaaaacaaaaaacagatctgagcttttataattagaaataaaactaaattactttttcaaaaggaaaaactctgtaccaataagagattcttctgtatagccacaggaaaatgtgatgtgtaactctctagatctctgttttcattccctctgatgtaccctactaaatgttaaaatttctgtgttttaagaccctctttaatcc

SEQ ID NO: 192922 - DNA, 2524 bp, Homo sapiens
  Payload ID: 18083
  Gene Name: translocase of inner mitochondrial membrane 21 homolog (yeast)
  ENST ID: ENST00000580087
  CDS Start-End: 287-805
aggtgactttgcgaaggcatggcggggacactgtgaatgtcagcccagaaggtgatcagagcctgttaattaaaatggaaagaagacagaagggaaggtagacatcaggttctccctggagacttttcgttttcatttacgctgcggaaactgacgtttttgcctaacaccccatgtaatgtaaacgtataggcttgagtacgtgtccggccgcatgtgtagtgaaccctaaagctttcctaattgtagttagcatcgtccctaagcggaacgattttccgtgaacatgatttgtacttttctacgagccgtacagtatacggagaagctgcacaggtcctcggcaaagcgattgcttttgccatacatcgtgcttaacaaagcgtgcttgaagactgagcccagtttgagatgtgggcttcaatatcaaaagaaaacgctgcgacctagatgtattcttggagtcacccagaaaaccatctggacgcagggaccgagcccccgaaaagcaaaggaggatggcagcaaacaagtgtctgtgcacaggagtcagagagggggaaccgccgtcccaacatcacaaaaagtgaaagaagccggaagagattttacctatttaatagtggtgctttttggaatcagcattacaggtggcttgttttacacgattttcaaagaacttttttcttcatccagtcctagcaagatatatgggagagccttagaaaaatgcagatcacatcctgagggctgttcttcacacagaccaaggagtaatgtcatagctcgcatttgcagcccctgaagaggagaaagatttcaatccacagcgtgctcagtatagagcccggtgctgatcttccctggggccccggctctgaatgttctaccagttttctaatcatgtcagggtggaaacctcagaagctaacgatctctggcatctttccttttaaatccactgatttctcttcattgagctctggacagccagtggtaaccatggagaaaggcagggaggataaagtatctcagaggtgaaaaccaggaaataaggaaggttcgttcccataatagttactgggaatccaaattttatctgacaagaaacattctttacagactccggaaatacctgtgggtggtaacctcattaaatgttaggacgcatctctggaaagagatgaagagttgctgttttattcgcaaactcagcctttcgtagatttttcagcattttgaacaaaaaactccacaagaatatacaaaagtgggatattattgaagtcgtaacttcatttgctgcctgaaaaaactctacaaataataattaaactttaacaattttgtcaacattttttaaggggtacccttctctttgctgggtactgtgtctgcttgaaaaacaaaatcttgatggatgttgatatttatatgtttaatagattaaagtaaattgttctatttgtttgtgctatacaattctgcaatatcatcttacatattacttctttttatcctggaaaatgtgatactgaagatactccacaaacagacaaaataagataaatttcgtagagttgagggtcaaacttttttagtttaatatcaaatttatattttttagagggttccacagtatttgcattttgaattcaataaaaactacatttctacttcatgtggattttctcattagaaatagtagattcacacctgtagctctgatttattttaaatgtcattatctgttttctttttcctcactgtgtttggtaactttaaaaattttttgatctcatagttttagtattagatgctattaattaattacatttcattaaaaatgttcatacattttatcttcaaaccataaggggttagtagagaaacatctgaactctgtgttgttatgtttgttttctgtaagaggagcaggaactgcgtcatgtcaacctacattgctttgaaactacaagtcacaccataaagctacctattttaatctttgtgcatgaaatatttgtttaaattatttatgggatgatttttgtataataacccttttttcagttttcttattggagtggtcatttttttatttgtttgtttgtttgtttgttttgagacggagtctcgctctgtcacccaggctggagttcagtggcacgatcttggctcactgcagcctctgcctactgggttcaagcgattctcctgcctcagcttcctgagtagctgggactacagatgcgcatcaccatgcccagctgatttttatattttttagtagagacggggtttcacctagttggccaggctagtcttgaactcctgaccttgtgatccacccatcttggcctcccagattgctgggattataggcgtgagccaggagtggtcatttttgaaaaggtcctaagcttactgatttttttttcctaaaatcatctggtttgttaaaaattatttctttagaagcttaaaaaaataacacaaaataaagcactgtccttgttctgca

SEQ ID NO: 192923 - DNA, 821 bp, Homo sapiens
  Payload ID: 18083
  Gene Name: translocase of inner mitochondrial membrane 21 homolog (yeast)
  ENST ID: ENST00000579071
  CDS Start-End: 1-383
taatagtggtgctttttggaatcagcattacaggtggcttgttttacacgattttcaaagaacttttttcttcatccagtcctagcaagatatatgggagagccttagaaaaatgcagatcacatcctgaggtgatcggtgtctttggtgagtctgttaaaggctatggggaggtgacaaggcggggtcgccggcagcatgtcaggttcactgaatatgtaaaagatgggctgaaacacacgtgtgtgaaattctacattgagggctctgagccagggaagcaaggaacggtgtatgcgcaagtgaaagaggtgtgggaatcatgggatgtggggtcagaggttctgagcgcggtgttatttaagttctggaaaggaaaataatacctggaaacactacatttttttcagaacccaggaagtggtgaatatgattttcgatatatatttgtagaaattgaatcttatcctagaagaactattatcattgaagataatcgatcccaagatgattaaaatagggtttctgatggatgttgaatggcgtggactcgctactccgttcttcacagctgccttccagaatgtgttcaaaagaaagacaagaaggagtgtatggcttataaagtgaatctaatacagtatttgttgcatttaaacaaactagacattttcttacggaaaaattatgaaatacagcatattttatgttctcccattgactcaatcatgacaatatttctgctttaacaccatctttcatgattagaaatgtttgttattggaaatgttacaccatgtaaataaaggaaatagatttta

SEQ ID NO: 192924 - DNA, 3194 bp, Homo sapiens
  Payload ID: 18084
  Gene Name: translocase of inner mitochondrial membrane 22 homolog (yeast)
  Uniprot ID: Q9Y584
  ENST ID: ENST00000327158
  CDS Start-End: 27-611
cgagggttgcttgggcagcgactgtcatggcggcggccgcccccaatgccggaggctcggcccctgagacagcgggttccgccgaagctccgctgcagtacagcctgctcctgcagtacctggtgggtgacaagcgtcagccccggctcctggagcctgggagcctgggcgggatcccaagtccagccaagagtgaggagcagaagatgatcgagaaggcgatggaaagctgcgctttcaaggctgcgctggcctgcgtgggaggatttgtcttaggaggtgcatttggggtgtttaccgctggcatcgataccaacgtgggctttgaccctaaggatccttaccgtacaccgactgcaaaagaagtgctgaaagacatggggcagagaggaatgtcctatgccaaaaatttcgccattgtgggagccatgttttcttgtactgagtgtttgatagaatcttaccggggaacatcagactggaagaacagtgtcatcagtggctgcatcacgggaggagctattggtttcagagctggcttaaaggctggggccattggttgtggaggttttgctgctttctctgctgcgattgattattacctccggtgagagtaattgcctgcagggaaggatgatgccagccccggatccgggctgctctctggaggacagtttctgtaccacaccagggccttgcttcagggcctgaagacattcattttccctcatgtcgttggtattctgagggagctgcctggcttctctgcctccagcctttggggtagccacactttgctgctcctggactccagccagccttcacagaggacgtcccgtgccagattctctcacagcagatcgggagacaggatgttgacatataggaattcagctccacaaagcttcaggcctgaccacagctggccctctaggttgtttggtgttgtgggcacagaggtgacagtgtctctgcaggcactcaggaagctgttctaccttggaactccatgcaactatccgtctcgaataccagggcagggcaaggcggactgatgccgtccaaccaattatctcacttgttttgtgttctgtcatccttgttttttttttaaaaatacactcccctcccccaccgccacacaccttacagttcaaaaggttggtttatttgtattttattttcaaattccctattccaaaaatagtgccgggtggcccaaagataacatctgaagggaaagaatgagaaagctcccagggaagcgggggatggggcgctgaggcagggttgttagaggactgtgtcatcctcaccaagctcattacatctgccagggcctgcctcaagaagcccagcccagccttttcctgggatgcagtgaaatcccatccatgaactcgatgggcccctcctgtgccggccgagaggcacacactgccttcacgacgtgactgctggacctggccgagcttgaggccacatgtgaagggtcctgctgtggtcatcttggtgactcggtcacagcagctactggccaagatcagacgtcgctgaggggctgttcaccaccatcctcgttctccagggtcaaggaagtgttttaacatgtcgtgttttcgacttgaccttgtggtatttttcttggcctagttgtgtgccatggatattaaaaaaaaaaaaaaaaaaatccgtctacagttgggcttcagcactggtgctgctttaccctggtgctctgtggggggatgacactgctggagtcaggcctttgctcttgggtggggcacaggcaggtcgcttggtgggggccacacagtgctgggcaccttcagccagtggtgatgagtctcctttttcctataatacggtaattcctctatcctttccttttttgccttcttcctcatctgccctgtcttctggcccacacactcttaaccagcgttcacactcagtgtacatggcctggaggcccgagtgtttgtacatgagtgatgatgtcaaacccagctggtaacaccttccttgggtcatgtttgccattttcttggaatgaatgtgagttcctgctcagggctcatgtccttttacagtgaattctatataacgcccctcccagtctcacagctaggaggcttcatcactgctaggccagttggagcgttccctagagctcagaacaaattgtttcctctgctgtccctaaatataggacacctacaagcactctgaagcaagggcagacattcccacctggtacctgtcaaagtcctaggatgcctgggatcttccatctttcagtctagcacgtgggaccaaatacaagagatgctgccctcacaacagccttggaaaagatgagcgccagggctgtcagtacccatcggttcagtaagcgaggcattgtccacgctgcctattcactcgagagatgaatagtttcctgttttcgatggctggggagccagtatgagctcataaaccaaacagcaattttcagagacatctgttcctgatcttcagaataaactcagtgtccagttgcttcggctggtgggagccaatattcacgccactgactctctcaaagggagggtgggccctcggagacccagcttctctgacaagcagattagaccaaaaggctgcctcaaagatatgccactttgaaggaaagcgtagagaagcgtttacataaaagaagacgcttcctgttcagtggacaacttcatgccactttcaaggcacaccgatggccaggtgggacatttgtactgtagcagcacatggcaaaggtgagccagaagcagcctggatgctggctgatccggaggcctttgtgaagagcaaggagagggctccagcccacctccccgcagctctgccccagcccccgtgggccacagggaggctcaaggggagtgaactaggtaaacagattcctggaaactcacatctggatgcagctggaagagttaaatatttacattggtggcttccctggaccaccgcgaacacaaacatccacaccacagggctgagttttgtgcaaatgatggggctttgcattttttattaacattttcctctcacgtggtttacatcaatttataataatctacataagttgaaacagaacatagacaaaaaaatatatccttaccaacttattaaagtcagatattcatgaa

SEQ ID NO: 192925 - DNA, 3194 bp, Homo sapiens; identical to SEQ ID NO: 192924
  Payload ID: 18084
  Gene Name: translocase of inner mitochondrial membrane 22 homolog (yeast)
  Uniprot ID: Q9Y584
  ENST ID: ENST00000617832
  CDS Start-End: 27-611

SEQ ID NO: 192926 - DNA, 3194 bp, Homo sapiens; identical to SEQ ID NO: 192924
  Payload ID: 18084
  Gene Name: translocase of inner mitochondrial membrane 22 homolog (yeast)
  Uniprot ID: Q9Y584
  ENST ID: ENST00000613269
  CDS Start-End: 27-611

SEQ ID NO: 192927 - DNA, 1222 bp, Homo sapiens
  Payload ID: 18085
  Gene Name: translocase of inner mitochondrial membrane 23 homolog (yeast)
  Uniprot ID: O14925
  ENST ID: ENST00000580018
  CDS Start-End: 177-806
gcgcacattgccgcaaagcggaagtgtggcgcttaacgggaaccggcgcccggaaggtcagcgtgtgaagtaggcgctggcaacgcggggttacccgctgttattgaggagtaacggcccagcggaccacccaggcttgaggcagcggcgggaaccactcggtttgctgcgataccatggaaggaggcgggggaagcggcaacaaaaccacagggggattggccggctttttcggagccggcggagcaggttactcgcacgcggatttggctggcgtcccgctaactggtatgaaccctctgtctccttatttaaatgtggatccacgatacctcgtgcaggatacagatgagtttattttacctaccggagctaataaaacccggggcagatttgagctggccttctttacgattggaggatgttgcatgacaggggctgcgtttggtgcaatgaatggtcttcggctaggattgaaggaaacccagaacatggcctggtccaaaccaagaaatgtacagattttgaatatggtgactaggcaaggggcactttgggctaatactctaggttctctggctttgctctatagtgcatttggtgtcatcattgagaaaacacgaggtgcagaagatgaccttaacacagtagcagctggaaccatgacaggcatgttgtataaatgtacaggtggtcttcgagggatagcacgaggtggtctgacaggactaacacttaccagcctctatgcactatataataactgggagcacatgaaaggctccttgctccaacagtcactctgaagattttgccaactcatgaatggaggacacttcagtagtcatctagatccttttataagacagtttggagttattctctctcttctacctacaattagtttgaaaaattggagattttgatttgctgtgatgaaaatcctggatggctgaccaagactggcacttgttccagccattagtgagttgaagccaaagccctttggtgactcactgagtaccatggttctgttctcctctggagatcttgcacgtatctgttttcctcccccatgaactagaaaaccacttactcccagaattcaggtcgtgcttgttagtactatatcaccaagtccattcatttaatgatccaaaactgtaatgttgcactgtattccaaataaagggtaaaaacagaaccaaagttataactccaa

SEQ ID NO: 192928 - DNA, 1142 bp, Homo sapiens
  Payload ID: 18086
  Gene Name: translocase of inner mitochondrial membrane 23 homolog B (yeast)
  Uniprot ID: Q5SRD1
  ENST ID: ENST00000374098
  CDS Start-End: 163-729
aaagcggaagtgtggcgcttaacgggaaccggcgcccggaatgtcagcgtgtgaagtaggcgctggcaacgcggggttacccgctgttattgaggagtaacggcccagcggaccacccaggcttgaggcagcggcgggaaccactcggtttgctgcgataccatggaaggaggcgggggaagcggcgacaaaaccacaggggtattggccggctttttcggagccggcgaagcaggttactcgcacgcggatttggctggcgtcccgctaactggtatgaaccctctgtgtccttatttaaatgtggatccacgatacctcgtgcaggatacagatgagttcattttacctaccggagctaataaaacctggggcagatttgagctggccttctttacgattggagggtgttgcatgacaggggctgcgtttggggcaatgaatggtcttcggctaggattgaaggaaacccagaacatggcctggtccaaaccaggaaatgtacagattttgaatatggtgactaggcaaggggcactttgggctaatactctaggttctctggcgttgctctatagtgcatttggtgtcatcattgagaaaacacgaggtgcagaagatgaccttaacacagtagcagctggaaccatgacaggcatgttgtataaatgtacagtgtcagagatggctttggattccccgttctgtgtgctgctgtctggctcctgaacccagctgtagaggtgtgtgtcaatcccaactggtgaagtactgagaagaagctacacaaaaggcagcaaagtattagtaagtgtacctctgacattttaaccacctctgacttttccatggaatggacaagtagtagtctctgtcagagctacattttaaaggagaaaaagaaacgtgaagtcatgaactgtttatttatgctgttatttttgtgtttactcacctcatttatattgacttgtaaattagtaatttctgaactattatttatcaattcattgcctacatgtcagcaaacaaattttcttcttaataaagaatccagttgctgggcacaatggttcacacctgtaatctcagcacgtttggagggcaaggcaggaggattccttggggctaggagttcaaga

SEQ ID NO: 192929 - DNA, 1152 bp, Homo sapiens
  Payload ID: 18086
  Gene Name: translocase of inner mitochondrial membrane 23 homolog B (yeast)
  ENST ID: ENST00000451577
  CDS Start-End: 115-537
gtgtgaagtaggcgctggcaacgcggggttacccgctgttattgaggagtaacggcccagcggaccacccaggcttgaggcagcggcgggaaccactcggtttgctgcgataccatggaaggaggcgggggaagcggcgacaaaaccacaggggtattggccggctttttcggagccggcgaagcaggttactcgcacgcggatttggctggcgtcccgctaactggtatgaaccctctgtgtccttatttaaatgtggatccacgatacctcgtgcaggatacagatgagttcattttacctaccggagctaataaaacctggggcagatttgagctggccttctttacgattggagggtgttgcatgacagcgttgctctatagtgcatttggtgtcatcattgagaaaacacgaggtgcagaagatgaccttaacacagtagcagctggaaccatgacaggcatgttgtataaatgtacagtgtcagagatggctttggattccccgttctgtgtgctgctgtctggctcctgaacccagctgtagaggtgtgtgtcaatcccaactggtgaagtactgagaagaagctacacaaaaggcagcaaagtattagtaagtgtacctctgacattttaaccacctctgacttttccatggaatggacaagtagtagtctctgtcagagctacattttaaaggagaaaaagaaacgtgaagtcatgaactgtttatttatgctgttatttttgtgtttactcacctcatttatattgacttgtaaattagtaatttctgaactattatttatcaattcattgcctacatgtcagcaaacaaattttcttcttaataaagaatccagttgctgggcacaatggttcacacctgtaatctcagcacgtttggagggcaaggcaggaggattccttggggctaggagttcaagaccagcctgggcaatatagcaagatttcatctctacaaaaaaatgaaaacattggctgggcatggtggctcattcctatagttcaggctactgaggagcctgatgtaggaggatcacgtgaccccagtagtttgaggctgcagtgagctatgatcctaacactgctctccagcctgggtgacacaccaagttgccatctcttc

SEQ ID NO: 192930 - DNA, 1156 bp, Homo sapiens
  Payload ID: 18086
  Gene Name: translocase of inner mitochondrial membrane 23 homolog B (yeast)
  ENST ID: ENST00000483296
  CDS Start-End: 115-231
gtgtgaagtaggcgctggcaacgcggggttacccgctgttattgaggagtaacggcccagcggaccacccaggcttgaggcagcggcgggaaccactcggtttgctgcgataccatggaaggaggcgggggaagcggcgacaaaaccacaggggtattggccggctttttcggagccggcgaagcaggttactcgcacgcggatttggctggcgtcccgcgatacagatgagttcattttacctaccggagctaataaaacctggggcagatttgagctggccttctttacgattggagggtgttgcatgacaggggctgcgtttggggcaatgaatggtcttcggctaggattgaaggaaacccagaacatggcctggtccaaaccaggaaatgtacagattttgaatatggtgactaggcaaggggcactttgggctaatactctaggttctctggcgttgctctatagtgcatttggtgtcatcattgagaaaacacgaggtgcagaagatgaccttaacacagtagcagctggaaccatgacaggcatgttgtataaatgtacagcctcggcctcccgaggtgccgggattgcagatggagtctcgttcactcagtgctcaatgttgcccaggctggagtgcagtggcgtgatctcggctagctacaacctccacctcccagccgcctgccttggcctcccaaagtgccgagattgcagcctctgcccggctgccaccccgtctgggaagtgaggagcgtctctgcctggccgcccatcgtctgggatgtgaggagcccctctgcccgggctgcccagtctgggaagtgaggagcgccttttcccggctgccatcccgtctaggaagtgaggagcgtctcggcccggccacccatcgtctgagatgaggggagcgcctctgccccgccgccccgtctgggatgtgaggagcgcctctgcctggccgcgaccccgtctgggagtgtcagagatggctttggattccccgttctgtgtgctgctgtctggctcctgaacccagctgtagaggtgtgtgtcaatcccaactggtgaagtactgagaagaagctacacaaaaggcagcaaagtattagtaagtgtacctctgacattttaaccacctctgactttt

SEQ ID NO: 192931 - DNA, 2623 bp, Homo sapiens
  Payload ID: 18086
  Gene Name: translocase of inner mitochondrial membrane 23 homolog B (yeast)
  ENST ID: ENST00000478381
  CDS Start-End: 147-446
gcttaacgggaaccggcgcccggaatgtcagcgtgtgaagtaggcgctggcaacgcggggttacccgctgttattgaggagtaacggcccagcggaccacccaggcttgaggcagcggcgggaaccactcggtttgctgcgataccatggaaggaggcgggggaagcggcgacaaaaccacaggggtattggccggctttttcggagccggcgaagcaggttactcgcacgcggatttggctggcgtcccgcagtcaggacctcgttctgtcacccatgttggggtgcggtggcatgattatagttcactgaagcctggcactcctgagctcaaacaatcctcccctctaagcctcctaagtagctgggaatctagtaactggtatgaaccctctgtgtccttatttaaatgtggatccacgatacctcgtgcaggatacagatgagttcattttacctaccggagctaataaaacctggggcagatttgagctggccttctttacgattggagggtgttgcatgacaggggctgcgtttggggcaatgaatggtcttcggctaggattgaaggaaacccagaacatggcctggtccaaaccaggaaatgtacagattttgaatatggtgactaggcaaggggcactttgggctaatactctaggttctctggcgttgctctatagtgcatttggtgtcatcattgagaaaacacgaggtgcagaagatgaccttaacacagtagcagctggaaccatgacaggcatgttgtataaatgtacagtgtcagagatggctttggattccccgttctgtgtgctgctgtctggctcctgaacccagctgtagaggtgtgtgtcaatcccaactggtgaagtactgagaagaagctacacaaaaggcagcaaagtattagtaagtgtacctctgacattttaaccacctctgacttttccatggaatggacaagtagtagtctctgtcagagctacattttaaaggagaaaaagaaacgtgaagtcatgaactgtttatttatgctgttatttttgtgtttactcacctcatttatattgacttgtaaattagtaatttctgaactattatttatcaattcattgcctacatgtcagcaaacaaattttcttcttaataaagaatccagttgctgggcacaatggttcacacctgtaatctcagcacgtttggagggcaaggcaggaggattccttggggctaggagttcaagaccagcctgggcaatatagcaagatttcatctctacaaaaaaatgaaaacattggctgggcatggtggctcattcctatagttcaggctactgaggagcctgatgtaggaggatcacgtgaccccagtagtttgaggctgcagtgagctatgatcctaacactgctctccagcctgggtgacacaccaagttgccatctcttcaaaaaaggaatctagagacatcagtgtgtgcacaagcatggtttgtgaatttggaagtgtgtatgtgcatagttgtgctcaagaatgtgttgatgattataccttctcagaatgaaggtaattttttttttttctttttttttgagatggagtcttgctctgttgccaggctggagtgcagtggtgctctcagctcactgcaacctctgcctcccggcttcaagcagttctcctgcctcagcctcccaagtagctgggactacaggcacacaccaccactcccggctaattttttgtgttttagtagagacggggttttaccatgttggccaggatggtctcgatcccccgaccttgtgatccacccaccttggcctcccaaagtgttgggattacaggtgtgagccaccgtgcctggcctgaaggtcatttttataaagatctctccacgtcttagatttgattcttcctttaaatatttttctcattgacatttgaaagcacctgaccttatataaaatgaacaattttcataactccataaaaggagaattatggcatcatctatttctttctcttgtctcataaatctaaaccatcaacctgcttatttttgtatactgtcacactgtgtattccctgcattgaatgcctgtctgttgacattatctgtaaaaattgtgggaagttttctgcaccctgaaatttctgttatgcggattaaatatccactatccatgtttttccaagtcttacagtagaaagggtaaatgcagccctcacagcagcctgttgttcgtcctgcaaatgtgtttccatcacattacacaaagcctctttgtcttcgtggttctaccctactaataagttttttaaaaaattatgtaatgtgtgtatatacaaatacctatatgtatgtgtgtacacatacagctgatatctgctgagattatgtatgcatgaactatagaattaacttgtaattttaagaaaataaattattttgtaaagataaatctcatgtttaagaagaggaattacagttgaatcatttagggatgcctcagcctaaacataatatggaaaaagccataaccaaaagtcattttagagtactgctaggttactcaacctatcatcacatttaattaaaatgtcagtttgaaccatg

SEQ ID NO: 192932 - DNA, 2075 bp, Homo sapiens
  Payload ID: 18087
  Gene Name: translocase of inner mitochondrial membrane 44 homolog (yeast)
  Uniprot ID: O43615
  ENST ID: ENST00000270538
  CDS Start-End: 270-1628
acagatctgaccctcccaggagtgccctcccccgggccacatccagtcacgggccccgtccttccaaaacactgccctatcagaggtcaagctctctaggcattccctacccttttaatgccccgccctatgacggacccaatcggagggctctccctacccgaaaccccgctcctggagcggcttttctcaggcttgcgcggctctaggccgaagcggcggatgacgcaaccgggccgcgccgcgagaaggtcacacgattctccaacatggcggcggcggccctgcggagtggctggtgccgctgtccacggagatgcctcggcagtggaatccaatttctttccagccacaacctaccccatgggtcgacctatcagatgcgccggccgggcggagagctgccactgtccaaatcatattcttctggaaacagaaaaggctttctgtccggcttgctagataatgtcaaacaagaattagccaaaaacaaagaaatgaaagaaagtataaaaaaattccgtgacgaggccagaaggctagaagaatcagacgtgctccaggaggccagaaggaaatacaaaaccatcgagtcagaaaccgtgcggacgagcgaggtgctacggaagaagcttggggagctgacgggcaccgtgaaggagagccttcacgaagtcagtaaaagtgatctcggccggaaaatcaaggagggcgtggaggaagcagccaagacggccaagcagtcggccgagtcggtatccaaaggcggggagaagctgggcaggacagcggccttcagagccctctcccagggggtggagtccgtgaagaaggaaattgacgacagcgtcctgggacagaccgggccctaccggaggccccagcgactccggaagagaacggagtttgcgggagataagttcaaggaggagaaagtgtttgagccaaacgaggaggccctgggggtcgtgctgcacaaggactccaagtggtaccagcagtggaaggacttcaaggagaacaacgtggtgtttaaccggttcttcgagatgaagatgaagtatgacgaaagcgacaacgcgttcatccgggcatcccgggcccttacggacaaggtcaccgacttgctggggggcctgttctccaagacagagatgtcggaggtgctcacggagatcctccgggtggacccggcctttgacaaggaccggtttctgaaacagtgcgagaacgacatcatccccaatgtcctggaggccatgatttctggagagcttgacattctcaaagactggtgctatgaagctacttacagccagctggcccaccccatccagcaggccaaggcactgggtctccagttccattctcgcatcctagacattgacaacgtcgacctggccatgggcaagatgatggagcaggggccggtgctgatcatcaccttccaggcacagctggtgatggtggtcaggaaccccaaaggcgaggtggtggagggtgacccggacaaggtgctgcggatgctgtacgtgtgggcgctctgccgagaccaggacgagctcaacccctacgcggcctggcggctcctggacatctcggcctccagcaccgagcagattctctgagtgtggtgccggagccaggtagccccggcctgggtcatcaggcacagaggcaccgcaacaccacctgcggcaactccagacctctgggaacaagactgcgggctctgcccccagctctgccaggacggctgcaagaccagctggcccgggaggggacaacgggctgttgcgggtgcgcggcagctggagacactcccccgcagggccaacccctgccctgttgctctgccctgcaggggtcccggcgcctggtcacctggggtgcacacaggtcacacagtgccaagaggccccagggcccagggactccccccacagcagggtgggacccgggacccgcggctcagtggcccgctagccacgtcagccaagccactttaggtccattttttaattttaacagtgctcttccatcttgtgcataagcctgagatttggaaagaataa

SEQ ID NO: 192933 - DNA, 868 bp, Homo sapiens
  Payload ID: 18087
  Gene Name: translocase of inner mitochondrial membrane 44 homolog (yeast)
  ENST ID: ENST00000595565
  CDS Start-End: 1-402
ctgttctccaagacagagatgtcggaggtgctcacggagatcctccgggtggacccggcctttgacaaggaccggtttctgaaacagtgcgagaacgacatcatccccaatgtcctggaggccatgatttctggagagcttgacattctcaaagactggtgctatgaagctctggccatgggcaagatgatggagcaggggccggtgctgatcatcaccttccaggcacagctggtgatggtggtcaggaaccccaaaggcgaggtggtggagggtgacccggacaaggtgctgcggatgctgtacgtgtgggcgctctgccgagaccaggacgagctcaacccctacgcggcctggcggctcctggacatctcggcctccagcaccgagcagattctctgagtgtggtgccggagccaggtagccccggcctgggtcatcaggcacagaggcaccgcaacaccacctgcggcaactccagacctctgggaacaagactgcgggctctgcccccagctctgccaggacggctgcaagaccagctggcccgggaggggacaacgggctgttgcgggtgcgcggcagctggagacactcccccgcagggccaacccctgccctgttgctctgccctgcaggggtcccggcgcctggtcacctggggtgcacacaggtcacacagtgccaagaggccccagggcccagggactccccccacagcagggtgggacccgggacccgcggctcagtggcccgctagccacgtcagccaagccactttaggtccattttttaattttaacagtgctcttccatcttgtgcataagcctgagatttggaaagaataaaacaccgaattgcagaaga

SEQ ID NO: 192934 - DNA, 819 bp, Homo sapiens
  Payload ID: 18087
  Gene Name: translocase of inner mitochondrial membrane 44 homolog (yeast)
  ENST ID: ENST00000597926
  CDS Start-End: 1-819
atggcggcggcggccctgcggagtggctggtgccgctgtccacggtccaaatcatattcttctggaaacagaaaaggctttctgtccggcttgctagataatgtcaaacaagaattagccaaaaacaaagaaatgaaagaaagtataaaaaaattccgtgacgaggccagaaggctagaagaatcagacgtgctccaggaggccagaaggaaatacaaaaccatcgagtcagaaaccgtgcggacgagcgaggtgctacggaagaagcttggggagctgacgggcaccgtgaaggagagccttcacgaagtcagtaaaagtgatctcggccggaaaatcaaggagggcgtggaggaagcagccaagacggccaagcagtcggccgagtcggtatccaaaggcggggagaagctgggcaggacagcggccttcagagccctctcccagggggtggagtccgtgaagaaggaaattgacgacagcgtcctgggacagaccgggccctaccggaggccccagcgactccggaagagaacggagtttgcgggagataagttcaaggaggagaaagtgtttgagccaaacgaggaggccctgggggtcgtgctgcacaaggactccaagtggtaccagcagtggaaggacttcaaggagaacaacgtggtgtttaaccggttcttcgagatgaagatgaagtatgacgaaagcgacaacgcgttcatccgggcatcccgggcccttacggacaaggtcaccgacttgctggggggcctgttctccaagacagagatgtcggaggtgctcacggagatcctccgg

SEQ ID NO: 192935 - DNA, 1206 bp, Homo sapiens
  Payload ID: 18087
  Gene Name: translocase of inner mitochondrial membrane 44 homolog (yeast)
  ENST ID: ENST00000595876
  CDS Start-End: 17-436
cacacgattctccaacatggcggcggcggccctgcggagtggctggtgccgctgtccacggagatgcctcggcagtggaatccaatttctttccagccacaacctaccccatgggtcgacctatcagatgcgccggccgggcggagagctgccactgtccaaatcatattcttctggaaacagaaaaggctttctgtccggcttgctagataatgtcaaacaagaattagccaaaaacaaagaaatgaaagaaagtataaaaaaattccgtgacgaggccagaaggctagaagaatcagacgtgctccaggaggccagaaggaaatacgaggaagttgcagtgagccgagagcgtgccactgtactccagcctcggcaacggagacattgtctcaaaaaaaaaaaaaaaaaaaaggacacagcgctctttacctagaaaaccatcgagtcagaaaccgtgcggacgagcgaggtgctacggaagaagcttggggagctgacgggcaccgtgaaggagagccttcacgaagtcagtaaaagtgatctcggccggaaaatcaaggagggcgtggaggaagcagccaagacggccaagcagtcggccgagtcggtatccaaaggcggggagaagctgggcaggacagcggccttcagagccctctcccagggggtggagtccgtgaagaaggaaattgacgacagcgtcctgggacagaccgggccctaccggaggccccagcgactccggaagagaacggagtttgcgggagataagttcaaggaggagaaagtgtttgagccaaacgaggaggccctgggggtcgtgctgcacaaggactccaagtggtaccagcagtggaaggacttcaaggagaacaacgtggtgtttaaccggttcttcgagatgaagatgaagtatgacgaaagcgacaacgcgttcatccgggcatcccgggcccttacggacaaggtcaccgacttgctggggggcctgttctccaagacagagatgtcggaggtgctcacggagatcctccgggtggacccggcctttgacaaggaccggtttctgaaacagtgcgagaacgacatcatccccaatgtcctggaggccatgatttctggagagcttgacattctcaaagactggtgctatgaagctacttacagccagctggcccaccccatccagcaggccaaggcact

SEQ ID NO: 192936 - DNA, 1797 bp, Homo sapiens
  Payload ID: 18087
  Gene Name: translocase of inner mitochondrial membrane 44 homolog (yeast)
  ENST ID: ENST00000595831
  CDS Start-End: 1-380
tgcggagtggctggtgccgctgtccacggagatgcctcggcagtggaatccaatttctttccagccacaacctaccccatgggtcgacctatcagatgcgccggccgggcggagagctgccactgtccaaatcatattcttctggaaacagaaaaggctttctgtccggcttgctagataatgtcaaacaagaattagccaaaaacaaagaaatgaaagaaagtataaaaaaattccgtgacgaggccagaaggctagaagaatcagacgtgctccaggaggccagaaggaaatacaaaaccatcgagtcagaaaccgtgcggacgagcgaggtgctacggaagaagcttggggagctgacgggcaccgtgaaggagtagagccttcacgaagtcagtaaaagtgatctcggccggaaaatcaaggagggcgtggaggaagcagccaagacggccaagcagtcggccgagtcggtatccaaaggcggggagaagctgggcaggacagcggccttcagagccctctcccagggggtggagtccgtgaagaaggaaattgacgacagcgtcctgggacagaccgggccctaccggaggccccagcgactccggaagagaacggagtttgcgggagataagttcaaggaggagaaagtgtttgagccaaacgaggaggccctgggggtcgtgctgcacaaggactccaagtggtaccagcagtggaaggacttcaaggagaacaacgtggtgtttaaccggttcttcgagatgaagatgaagtatgacgaaagcgacaacgcgttcatccgggcatcccgggcccttacggacaaggtcaccgacttgctggggggcctgttctccaagacagagatgtcggaggtgctcacggagatcctccgggtggacccggcctttgacaaggaccggtttctgaaacagtgcgagaacgacatcatccccaatgtcctggaggccatgatttctggagagcttgacattctcaaagactggtgctatgaagctacttacagccagctggcccaccccatccagcaggccaaggcactgggtctccagttccattctcgcatcctagacattgacaacgtcgacctggccatgggcaagatgatggagcaggggccggtgctgatcatcaccttccaggcacagctggtgatggtggtcaggaaccccaaaggcgaggtggtggagggtgacccggacaaggtgctgcggatgctgtacgtgtgggcgctctgccgagaccaggacgagctcaacccctacgcggcctggcggctcctggacatctcggcctccagcaccgagcagattctctgagtgtggtgccggagccaggtagccccggcctgggtcatcaggcacagaggcaccgcaacaccacctgcggcaactccagacctctgggaacaagactgcgggctctgcccccagctctgccaggacggctgcaagaccagctggcccgggaggggacaacgggctgttgcgggtgcgcggcagctggagacactcccccgcagggccaacccctgccctgttgctctgccctgcaggggtcccggcgcctggtcacctggggtgcacacaggtcacacagtgccaagaggccccagggcccagggactccccccacagcagggtgggacccgggacccgcggctcagtggcccgctagccacgtcagccaagccactttaggtccattttttaattttaacagtgctcttccatcttgtgcataagcctgagatttggaaagaataaaaca

SEQ ID NO: 192937 - DNA, 1612 bp, Homo sapiens
  Payload ID: 18088
  Gene Name: translocase of inner mitochondrial membrane 50 homolog (S. cerevisiae)
  Uniprot ID: Q3ZCQ8
  ENST ID: ENST00000314349
  CDS Start-End: 134-1504
acaggtgtggaggggcaacccatcccttcagacaattgggaggtgagggccgattgccttacacggtgagacaagcggcctgactcgtgactatttttttggacaaatcaggcagccactgactcccttcattatggcctcagctttatctctgggcaataagtgtgatcccttccttcgctgcgtcctttgcaggggcggtggcgctctgcaaggcccaagggggcgtggtccagatgactttgaatcccagttgtcgcccccagggtcagccaggagactagtcagaagcaaacgcgcctgcggcaatccgcccgatgcctttggtctctctcgggcttccgtccacccgcccctcccccgcgtttccattggctgtagctccggcccggggcgggcgaagagggagcgagtgggcggggccgcgtggcgtcagcgcaagatggcggcctcggcagcggtgttctcgcgcttgcgaagcgggctccggctcggctcgcggggactgtgcacgaggttggcgacgccgccccgccgggccccagatcaggccgcagagatcgggagccgcgggagcactaaggcgcaagggccacagcagcagccgggctcagagggtcccagctatgccaaaaaagttgcgctctggcttgctgggctgcttggagctggtgggactgtgagcgtcgtctatatctttggaaacaacccggtggacgaaaatggtgccaagattcctgatgagttcgacaatgatccaattctggtacagcagttgcgccggacatacaaatatttcaaagattatagacagatgatcatcgagcccaccagcccttgccttctcccagaccctctgcaggaaccgtactaccagccaccctacacgctcgttttggagctcaccggcgtcctcttgcatcctgagtggtcgctggccactggctggaggtttaagaagcgcccaggcatcgagaccttgttccagcagcttgcccctttatatgaaattgtcatctttacgtcagagactggcatgactgcgtttccactcattgatagtgtggacccccatggcttcatctcctaccgcctattccgggacgccacaagatacatggatggacaccatgtaaaggatatttcatgtctgaatcgggacccagctcgagtagtagttgtggactgcaagaaggaagccttccgcctgcagccctataacggcgttgccctgcggccctgggacggcaactctgatgaccgggtcttgttggatctgtctgccttcctcaagaccattgcactgaatggtgtggaggacgtgcgaaccgtgctggagcactatgccctggaggatgacccgctggcggctttcaaacagcggcaaagccggctagagcaggaggagcagcagcgcctggccgagctctccaagtccaacaagcagaacctcttccttggctccctcaccagccgcttgtggcctcgctccaaacagccctgaactctgggcctcctcaaactcagtgcctgggtccagggccccagtgcttccagaccaagacttgggccaccacttgtccaataaagtacatcccagacgccacacctg

SEQ ID NO: 192938 - DNA, 2572 bp, Homo sapiens
  Payload ID: 18088
  Gene Name: translocase of inner mitochondrial membrane 50 homolog (S. cerevisiae)
  Uniprot ID: Q3ZCQ8
  ENST ID: ENST00000544017
  CDS Start-End: 134-1504
acaggtgtggaggggcaacccatcccttcagacaattgggaggtgagggccgattgccttacacggtgagacaagcggcctgactcgtgactatttttttggacaaatcaggcagccactgactcccttcattatggcctcagctttatctctgggcaataagtgtgatcccttccttcgctgcgtcctttgcaggggcggtggcgctctgcaaggcccaagggggcgtggtccagatgactttgaatcccagttgtcgcccccagggtcagccaggagactagtcagaagcaaacgcgcctgcggcaatccgcccgatgcctttggtctctctcgggcttccgtccacccgcccctcccccgcgtttccattggctgtagctccggcccggggcgggcgaagagggagcgagtgggcggggccgcgtggcgtcagcgcaagatggcggcctcggcagcggtgttctcgcgcttgcgaagcgggctccggctcggctcgcggggactgtgcacgaggttggcgacgccgccccgccgggccccagatcaggccgcagagatcgggagccgcgggagcactaaggcgcaagggccacagcagcagccgggctcagagggtcccagctatgccaaaaaagttgcgctctggcttgctgggctgcttggagctggtgggactgtgagcgtcgtctatatctttggaaacaacccggtggacgaaaatggtgccaagattcctgatgagttcgacaatgatccaattctggtacagcagttgcgccggacatacaaatatttcaaagattatagacagatgatcatcgagcccaccagcccttgccttctcccagaccctctgcaggaaccgtactaccagccaccctacacgctcgttttggagctcaccggcgtcctcttgcatcctgagtggtcgctggccactggctggaggtttaagaagcgcccaggcatcgagaccttgttccagcagcttgcccctttatatgaaattgtcatctttacgtcagagactggcatgactgcgtttccactcattgatagtgtggacccccatggcttcatctcctaccgcctattccgggacgccacaagatacatggatggacaccatgtaaaggatatttcatgtctgaatcgggacccagctcgagtagtagttgtggactgcaagaaggaagccttccgcctgcagccctataacggcgttgccctgcggccctgggacggcaactctgatgaccgggtcttgttggatctgtctgccttcctcaagaccattgcactgaatggtgtggaggacgtgcgaaccgtgctggagcactatgccctggaggatgacccgctggcggctttcaaacagcggcaaagccggctagagcaggaggagcagcagcgcctggccgagctctccaagtccaacaagcagaacctcttccttggctccctcaccagccgcttgtggcctcgctccaaacagccctgaactctgggcctcctcaaactcagtgcctgggtccagggccccagtgcttccagaccaagacttgggccaccacttgtccaataaagtacatcccagacgccacacctgctgtgtcccgagagtctccagatgggggcatcagggtgaggtccgggactcttgggtcatcgtcccacagtggctgatcggctgccaagcacagtgggggtgctttgttggatcagagcagatttttcaccctggtctcggaatctaaaaaccctcgctgtgtcttcctgtgtgttgcgtgatctgtgaaaaatacatctccctctgaccacagactcctcatctgtggagaagggaagagaggatggcacttggctttaaagacaggtagctgccaggctactgtggagagaatgtgttatgggcctagtgggcctctggtggaccagagattacccctctcaacaggccagctgctggttggctccagccagtgtggccctggggtaaagggggcctggagttgcttgacacgccagttgttcaaaagaagcaagaacttgggaatattttttttttttttttgagacagggtctcactgttgcccaggctggagtgcattgatgtgatcttagcttacaacagccttgacctcccggctcaagtgatctccaagtgaccctcctgcctcagcctcctgagtaccctcctggggactacaggtgcgtgctaccatacccagctaatttaaacaaattttttttttgtagagatggggtcttggtgcccaagctggtctcaaactcctagtcttaagcaatcttcctgctttggcctcccaaagcgctaggattccaggtgtgagctactgtgcccagctaaaatagggatttttatattaaatctccctattttaaaatgttggctcctagcggggcgcagtggctcacgcctgtaatcccagcactttgggaggctgaggtgggtggatcacctgaggtcaggagttcaagaccagcctcaacatggagaaaccccatctctactaaaaatacaaaattagctgggcgtggtggagc

SEQ ID NO: 192939 - DNA, 456 bp, Homo sapiens
  Payload ID: 18088
  Gene Name: translocase of inner mitochondrial membrane 50 homolog (S. cerevisiae)
  ENST ID: ENST00000597782
  CDS Start-End: 1-335
gcttgcgaagcgggctccggctcggctcgcggggactgtgcacgaggttggcgacgccgccccgccgggccccagatcaggccgcagagatcgggagccgcgggagcactaaggcgcaagggccacagcagcagccgggctcagagggtcccagctatgccaaaaaagttgcgctctggcttgctgggctgcttggagctggtgggactgtgagcgtcgtctatatctttggaaacaacccggtggacgaaaatggtgccaagattcctgatgagttcgacaatgagacagagtttcaccatgttggccaggatggtcttgatctgacctcgtgatccgtctgcctcggcctcccaaagtgctgggattacaggcgtgagccaccgtgcccggccttatccaattctggtacagcagttgcgccggacatacaaatatttcaaagattatagacag

SEQ ID NO: 192940 - DNA, 770 bp, Homo sapiens
  Payload ID: 18088
  Gene Name: translocase of inner mitochondrial membrane 50 homolog (S. cerevisiae)
  ENST ID: ENST00000602028
  CDS Start-End: 1-770
ggcggcctcggcagcggtgttctcgcgcttgcgaagcgggctccggctcggctcgcggggactgtgcacgaggttggcgacgccgccccgccgggccccagatcaggccgcagagatcgggagccgcgggagcactaaggcgcaagggccacagcagcagccgggctcagagggtcccagctatgccaaaaaagttgcgctctggcttgctgggctgcttggagctggtgggactgtgagcgtcgtctatatctttggaaacaacccggtggacgaaaatggtgccaagatgatcatcgagcccaccagcccttgccttctcccagaccctctgcaggaaccgtactaccagccaccctacacgctcgttttggagctcaccggcgtcctcttgcatcctgagtggtcgctggccactggctggaggtttaagaagcgcccaggcatcgagaccttgttccagcagcttgcccctttatatgaaattgtcatctttacgtcagagactggcatgactgcgtttccactcattgatagtgtggacccccatggcttcatctcctaccgcctattccgggacgccacaagatacatggatggacaccatgtaaaggatatttcatgtctgaatcgggacccagctcgagtagtagttgtggactgcaagaaggaagccttccgcctgcagccctataacggcgttgccctgcggccctgggacggcaactctgatgaccgggtcttgttggatctgtctgccttcctcaaga

SEQ ID NO: 192941 - DNA, 680 bp, Homo sapiens
  Payload ID: 18088
  Gene Name: translocase of inner mitochondrial membrane 50 homolog (S. cerevisiae)
  ENST ID: ENST00000594583
  CDS Start-End: 1-680
ctcaggtgatacttgagcaggaggggcctgggacgctggagtcccagtctggccgtgggagttattttctctgtggcgttggtggtggcgaggccgcagagatcgggagccgcgggagcactaaggcgcaagggccacagcagcagccgggctcagagggtcccagctatgccaaaaaagttgcgctctggcttgctgggctgcttggagctggtgggactgtgagcgtcgtctatatctttggaaacaacccggtggacgaaaatggtgccaagattcctgatgagttcgacaatgatccaattctggtacagcagttgcgccggacatacaaatatttcaaagattatagacagatgatcatcgagcccaccagcccttgccttctcccagaccctctgcaggaaccgtactaccagccaccctacacgctcgttttggagctcaccggcgtcctcttgcatcctgagtggtcgctggccactggctggaggtttaagaagcgcccaggcatcgagaccttgttccagcagcttgcccctttatatgaaattgtcatctttacgtcagagactggcatgactgcgtttccactcattgatagtgtggacccccatggcttcatctcctaccgcctattccgggacgccacaagatacatggatggacaccatgtaaag

SEQ ID NO: 192942 - DNA, 1737 bp, Homo sapiens
  Payload ID: 18088
  Gene Name: translocase of inner mitochondrial membrane 50 homolog (S. cerevisiae)
  ENST ID: ENST00000601252
  CDS Start-End: 1-313
gaaggaagccttccgcctgcagccctataacggcgttgccctgcggccctgggacggcaactctgatgaccgggtcttgttggatctgtctgccttcctcaagaccattgcactgaatggtgtggaggacgtgcgaaccgtgctggagcactatgccctggaggatgacccgctggcggctttcaaacagcggcaaagccggctagagcaggaggagcagcagcgcctggccgagctctccaagtccaacaagcagaacctcttccttggctccctcaccagccgcttgtggcctcgctccaaacagccctgaactctgggcctcctcaaactcagtgcctgggtccagggccccagtgcttccagaccaagacttgggccaccacttgtccaataaagtacatcccagacgccacacctgctgtgtcccgagagtctccagatgggggcatcagggtgaggtccgggactcttgggtcatcgtcccacagtggctgatcggctgccaagcacagtgggggtgctttgttggatcagagcagatttttcaccctggtctcggaatctaaaaaccctcgctgtgtcttcctgtgtgttgcgtgatctgtgaaaaatacatctccctctgaccacagactcctcatctgtggagaagggaagagaggatggcacttggctttaaagacaggtagctgccaggctactgtggagagaatgtgttatgggcctagtgggcctctggtggaccagagattacccctctcaacaggccagctgctggttggctccagccagtgtggccctggggtaaagggggcctggagttgcttgacacgccagttgttcaaaagaagcaagaacttgggaatattttttttttttttttgagacagggtctcactgttgcccaggctggagcacagtggtgtaactatagctcactgcagtgttgaacttctgggctcaaacaatcttcctgccttggcctccccaaatgctgagattataggagtgagccactctgcccaactacttttaattaaatagccacatgtgtctcctgtattgacagtaccactgtgtattaagagtatgagtcccagattgtgtaagttcaaatccaagctctaccacttctcggctggcttgtgatcctgtgcaagttactttacctctcagtgcctcggtttctacatttataaaataataactgggcaggcacagtggctcatggctgtcatcccaacacttcaggaggccgaggtgggaggatcgcctgaggccaggagttggagagcagcctgggcaacatgggaagagcctgtctcttgcgggggggggagaagaaagttcttgtctcaggctagctttggggaccaaatgaagcactcccatgtaggcactcaaatggaactatgtaaaccttaggcaaggcacctctgcctcagtttcctcatctctaaaatggggtgatggtagtatgttagcagagtggttgtgaggagtgaacgggacagtccgtatgtgggttatatgtatatattcccaggtgcttgctgttaccaggccatatgggttattcacagattgaaatatcttagctgggcacggtggctcacccctataatcccagcactttgggagaccgaggcgggtggatcacctgaggtcaggagttcgagaccagcctggccaacatggtgaaaccctgtctctactaaaaaaatacaaataaat

SEQ ID NO: 192943 - DNA, 769 bp, Homo sapiens
  Payload ID: 18088
  Gene Name: translocase of inner mitochondrial membrane 50 homolog (S. cerevisiae)
  ENST ID: ENST00000601403
  CDS Start-End: 2-769
gatggcggcctcggcagcggtgttctcgcgcttgcgaagcgggctccggctcggctcgcggggactgtgcacgaggttggcgacgccgccccgccgggccccagatcaggccgcagagatcgggagccgcgggagcactaaggcgcaagggccacagcagcagccgggctcagagggtcccagctatgccaaaaaagttgcgctctggcttgctgggctgcttggagctggtgggactgtgagcgtcgtctatatctttgatccaattctggtacagcagttgcgccggacatacaaatatttcaaagattatagacagatgatcatcgagcccaccagcccttgccttctcccagaccctctgcaggaaccgtactaccagccaccctacacgctcgttttggagctcaccggcgtcctcttgcatcctgagtggtcgctggccactggctggaggtttaagaagcgcccaggcatcgagaccttgttccagcagcttgcccctttatatgaaattgtcatctttacgtcagagactggcatgactgcgtttccactcattgatagtgtggacccccatggcttcatctcctaccgcctattccgggacgccacaagatacatggatggacaccatgtaaaggatatttcatgtctgaatcgggacccagctcgagtagtagttgtggactgcaagaaggaagccttccgcctgcagccctataacggcgttgccctgcggccctgggacggcaactctgatgaccgg

SEQ ID NO: 192944 - DNA, 1481 bp, Homo sapiens
  Payload ID: 18088
  Gene Name: translocase of inner mitochondrial membrane 50 homolog (S. cerevisiae)
  ENST ID: ENST00000601358
  CDS Start-End: 371-796
aagcggcctgactcgtgactatttttttggacaaatcaggcagccactgactcccttcattatggcctcagctttatctctgggcaataagtgtgatcccttccttcgctgcgtcctttgcaggggcggtggcgctctgcaaggcccaagggggcgtggtccagatgactttgaatcccagttgtcgcccccagggtcagccaggagactagtcagaagcaaacgcgcctgcggcaatccgcccgatgcctttggtctctctcgggcttccgtccacccgcccctcccccgcgtttccattggctgtagctccggcccggggcgggcgaagagggagcgagtgggcggggccgcgtggcgtcagcgcaagatggcggcctcggcagcggtgttctcgcgcttgcgaagcgggctccggctcggctcgcggggactgtgcacgaggttggcgacgccgccccgccgggccccagatcaggccgcagagatcgggagccgcgggagcactaaggcgcaagggccacagcagcagccgggctcagagggtcccagctatgccaaaaaagttgcgctctggcttgctgggctgcttggagctggtgggactgtgagcgtcgtctatatctttggaaacaacccggtggacgaaaatggtgccaagattcctgatgagttcgacaatgatgatcatcgagcccaccagcccttgccttctcccagaccctctgcaggaaccgtactaccagccaccctacacgctcgttttggagctcaccggcgtcctcttgcatcctgagtggtcgctggccactggctggaggtttaagaagcgcccaggcatcgagaccttgttccagcagcttgcccctttatatgaaattgtcatctttacgtcagagactggcatgactgcgtttccactcattgatagtgtggacccccatggcttcatctcctaccgcctattccgggacgccacaagatacatggatggacaccatgtaaaggatatttcatgtctgaatcgggacccagctcgagtagtagttgtggactgcaagaaggaagccttccgcctgcagccctataacggcgttgccctgcggccctgggacggcaactctgatgaccgggtcttgttggatctgtctgccttcctcaagaccattgcactgaatggtgtggaggacgtgcgaaccgtgctggagcactatgccctggaggatgacccgctggcggctttcaaacagcggcaaagccggctagagcaggaggagcagcagcgcctggccgagctctccaagtccaacaagcagaacctcttccttggctccctcaccagccgcttgtggcctcgctccaaacagccctgaactctgggcctcctcaaactcagtgcctgggtccagggccccagtgcttccagaccaagacttgggccaccacttgtccaataaagtacatcccagacgccacacctg

SEQ ID NO: 192945 - DNA, 786 bp, Homo sapiens
  Payload ID: 18088
  Gene Name: translocase of inner mitochondrial membrane 50 homolog (S. cerevisiae)
  ENST ID: ENST00000599794
  CDS Start-End: 14-487
gcgtcagcgcaagatggcggcctcggcagcggtgttctcgcgcttgcgaagcgggctccggctcggctcgcggggactgtgcacgaggttggcgacgccgccccgccgggccccagatcaggatatttcatgtctgaatcgggacccagctcgagtagtagttgtggactgcaagaaggaagccttccgcctgcagccctataacggcgttgccctgcggccctgggacggcaactctgatgaccgggtcttgttggatctgtctgccttcctcaagaccattgcactgaatggtgtggaggacgtgcgaaccgtgctggagcactatgccctggaggatgacccgctggcggctttcaaacagcggcaaagccggctagagcaggaggagcagcagcgcctggccgagctctccaagtccaacaagcagaacctcttccttggctccctcaccagccgcttgtggcctcgctccaaacagccctgaactctgggcctcctcaaactcagtgcctgggtccagggccccagtgcttccagaccaagacttgggccaccacttgtccaataaagtacatcccagacgccacacctgctgtgtcccgagagtctccagatgggggcatcagggtgaggtccgggactcttgggtcatcgtcccacagtggctgatcggctgccaagcacagtgggggtgctttgttggatcagagcagatttttcaccctggtctcggaatctaaaaaccctcgctgtgtcttcctgtgtgttgcgtgatctgtgaaa

SEQ ID NO: 192946 - DNA, 604 bp, Homo sapiens
  Payload ID: 18088
  Gene Name: translocase of inner mitochondrial membrane 50 homolog (S. cerevisiae)
  ENST ID: ENST00000597666
  CDS Start-End: 5-604
caagatggcggcctcggcagcggtgttctcgcgcttgcgaagcgggctccggctcggctcgcggggactgtgcacgaggttggcgacgccgccccgccgggccccagatcaggaaacaacccggtggacgaaaatggtgccaagattcctgatgagttcgacaatgatgatcatcgagcccaccagcccttgccttctcccagaccctctgcaggaaccgtactaccagccaccctacacgctcgttttggagctcaccggcgtcctcttgcatcctgagtggtcgctggccactggctggaggtttaagaagcgcccaggcatcgagaccttgttccagcagcttgcccctttatatgaaattgtcatctttacgtcagagactggcatgactgcgtttccactcattgatagtgtggacccccatggcttcatctcctaccgcctattccgggacgccacaagatacatggatggacaccatgtaaaggatatttcatgtctgaatcgggacccagctcgagtagtagttgtggactgcaagaaggaagccttccgcctgcagccctataacggcgttgccctgcggccctgggacggcaac

SEQ ID NO: 192947 - DNA, 669 bp, Homo sapiens
  Payload ID: 18088
  Gene Name: translocase of inner mitochondrial membrane 50 homolog (S. cerevisiae)
  ENST ID: ENST00000599733
  CDS Start-End: 1-349
gttggcgacgccgccccgccgggccccagatcaggccgcagagatcgggagccgcgggagcactaaggcgcaagggccacagcagcagccgggctcagagggtcccagctatgccaaaaaagttgcgctctggcttgctgggctgcttggagctggtgggactgtgagcgtcgtctatatctttggaaacaacccggtggacgaaaatggtgccaaggtgagggggaaagagaccgaggccttgccaggagtcctagtctgtggattcctgatgagttcgacaatgatccaattctggtacagcagttgcgccggacatacaaatatttcaaagattatagacagatgatcatcgagcccaccagcccttgccttctcccagaccctctgcaggaaccgtactaccagccaccctacacgctcgttttggagctcaccggcgtcctcttgcatcctgagtggtcgctggccactggctggaggtttaagaagcgcccaggcatcgagaccttgttccagcagcttgcccctttatatgaaattgtcatctttacgtcagagactggcatgactgcgtttccactcattgatagtgtggacccccatggcttcatctcctaccgcctattccgggacgccacaagatacatggatggacaccatgtaaag

SEQ ID NO: 192948 - DNA, 786 bp, Homo sapiens
  Payload ID: 18088
  Gene Name: translocase of inner mitochondrial membrane 50 homolog (S. cerevisiae)
  ENST ID: ENST00000602265
  CDS Start-End: 1-352
gttggcgacgccgccccgccgggccccagatcaggccgcagagatcgggagccgcgggagcactaaggcgcaagggccacagcagcagccgggctcagagggtcccagctatgccaaaaaagttgcgctctggcttgctgggctgcttggagctggtgggactgtgagcgtcgtctatatctttggaaacaacccggtggacgaaaatggtgccaagattcctgatgagttcgacaatgatgatcatcgagcccaccagcccttgccttctcccagaccctctgcaggaaccgtactaccagccaccctacacgctcgttttggagctcaccggcgtcctcttgcatcctgagtggtcgctggccactggctggaggtttaagaagcgcccaggcatcgagaccttgttccagcagcttgcccctttatatgaaattgtcatctttacgtcagagactggcatgactgcgtttccactcattgatagtgtggacccccatggcttcatctcctaccgcctattccgggacgccacaagatacatggatggacaccatgtaaaggatatttcatgtctgaatcgggacccagctcgagtagtagttgtggactgcaagaaggaagccttccgcctgcagccctataacggcgttgccctgcggccctgggacggcaactctgatgaccgggtcttgttggatctgtctgccttcctcaagaccattgcactgaatggtgtggaggacgtgcgaaccgtgctggagcactatgccctggaggatgacc

SEQ ID NO: 192949 - DNA, 1338 bp, Homo sapiens
  Payload ID: 18088
  Gene Name: translocase of inner mitochondrial membrane 50 homolog (S. cerevisiae)
  Uniprot ID: Q3ZCQ8
  ENST ID: ENST00000607714
  CDS Start-End: 23-1084
ggccgcgtggcgtcagcgcaagatggcggcctcggcagcggtgttctcgcgcttgcgaagcgggctccggctcggctcgcggggactgtgcacgaggttggcgacgccgccccgccgggccccagatcaggccgcagagatcgggagccgcgggagcactaaggcgcaagggccacagcagcagccgggctcagagggtcccagctatgccaaaaaagttgcgctctggcttgctgggctgcttggagctggtgggactgtgagcgtcgtctatatctttggaaacaacccggtggacgaaaatggtgccaagattcctgatgagttcgacaatgatccaattctggtacagcagttgcgccggacatacaaatatttcaaagattatagacagatgatcatcgagcccaccagcccttgccttctcccagaccctctgcaggaaccgtactaccagccaccctacacgctcgttttggagctcaccggcgtcctcttgcatcctgagtggtcgctggccactggctggaggtttaagaagcgcccaggcatcgagaccttgttccagcagcttgcccctttatatgaaattgtcatctttacgtcagagactggcatgactgcgtttccactcattgatagtgtggacccccatggcttcatctcctaccgcctattccgggacgccacaagatacatggatggacaccatgtaaaggatatttcatgtctgaatcgggacccagctcgagtagtagttgtggactgcaagaaggaagccttccgcctgcagccctataacggcgttgccctgcggccctgggacggcaactctgatgaccgggtcttgttggatctgtctgccttcctcaagaccattgcactgaatggtgtggaggacgtgcgaaccgtgctggagcactatgccctggaggatgacccgctggcggctttcaaacagcggcaaagccggctagagcaggaggagcagcagcgcctggccgagctctccaagtccaacaagcagaacctcttccttggctccctcaccagccgcttgtggcctcgctccaaacagccctgaactctgggcctcctcaaactcagtgcctgggtccagggccccagtgcttccagaccaagacttgggccaccacttgtccaataaagtacatcccagacgccacacctgctgtgtcccgagagtctccagatgggggcatcagggtgaggtccgggactcttgggtcatcgtcccacagtggctgatcggctgccaagcacagtgggggtgctttgttggatcagagcagatttttcaccctggtctcggaatct

SEQ ID NO: 192950 - DNA, 1664 bp, Homo sapiens
  Payload ID: 18089
  Gene Name: translocase of inner mitochondrial membrane 8 homolog A (yeast)
  Uniprot ID: O60220
  ENST ID: ENST00000372902
  CDS Start-End: 533-826
ttccctacgtcgggagaggaaaactccatcaaaaaacgaaagccaggggcccaggatagccaactaatcgacccagtcaactaactgacccagtgcacaactctggtagctcagaaaacgcgggctaatttggaagtggacaggggcggagctgtggggccagcacggaatggatcacgtggtctgaagtaacttccttttctcctttcttttctttttggagtaacatctcaacggcacctcggctctgggctgtaagccctgcgatctcaaggcgcaaggctgggcgcaacggcagggttgcggggttacgggattgcggggtccggggagtggaacccgccgactccgggaacgaagcaccggcgccaaggtgtgggaggcggcggggtggagttggacgcctgcctcgcgccgacgcagtgcactcacgggggcggtcccagaggcagctagctgtggttccggttccgtcgcggagacacgtgaaggtcggtgcggagttcgtctctgcaagcttggtcgccctgggatggattcctcctcctcttcctccgcggcgggtttgggtgcagtggacccgcagttgcagcatttcatcgaggtagagactcaaaagcagcgcttccagcagctggtgcaccagatgactgaactttgttgggagaagtgcatggacaagcctgggccaaagttggacagtcgggctgaggcctgttttgtgaactgcgttgagcgcttcattgatacaagccagttcatcttgaatcgactggaacagacccagaaatccaagccagttttctcagaaagcctttctgactgatctcagcattacctctttggaaaaggaaggtagttcaagaaatgaagagctgttgatgggatgattgaagaaacagctatgagaggattggctcccatcttttgttactcttgggacatcctgtcatctgagaatgaacaaagaccaattttttgtgtgtgaagcttaagggtcatatgtttgcttgtattttttaatgctaatcttgtgaaaataattgacaggcgaaagaaaactctatttagatgcatattactgtacatgggactatgcttttctcaaagccccattaactgcttcctataattttgatagtgggaccacatacgtaaaaatctctcatttgtgtggagtcatttctgatttcaggggagatccttgtgtttatcagaaagggcagaagtaggggaagaataatttggtatccttatctagtgtttgattgtcaatgctggagaaaaatatctgtaagagtgtttatacagtacacttcagttatcttgatctccctttcctatatgatgatttgcttaaatatccatattaagtaagtctcaaggtagggtaggcagcctgagagtctagaggcctttagttataaaggaatctagccagtgaacataattcttattactagactgccacaaggaagaaattaacttaccctgtatatcagggtacaaaaaattcagtgatgtgcctaaataagttataaagatttaggccaatcagaagctaacagcagtttcaggtagaggtgcatgcctaatgttagttagtgtagattccatttactgcattcttctgatcactgaaataaaagctatataagattcaa

SEQ ID NO: 192951 - DNA, 1155 bp, Homo sapiens
  Payload ID: 18090
  Gene Name: translocase of inner mitochondrial membrane 8 homolog B (yeast)
  ENST ID: ENST00000509359
  CDS Start-End: 76-174
aagtcgagaggcggtgcacacccgtcgcgcatgcgcaaacacagctgtcggaaggtggcgagcctgaggcgaacaatggcggagctgggcgaagccgatgaagcggagttgcagcgcctggtggccgccgagcagcagaaggcgcagtttactgcacaggccacgtgcccgtagaaaagatactcatccactgtgggttttggtgtcgccgtcaccccactgcctcactggattgtgaggatcatatgcgacaatgtatttgaaaacgactagaacattatcggaggaaggtggactctgaagtagtcgctgtagactatggatgtagaacaagggtttggagcccttcggacatggttctaacgcggcctgacttcttgctggctacatgaccttggactacataatcacgcctcttaaatgggaggtgatgacagctatccttgaggaccttagagagaactgatttcttagtacccagcctcacaaatagtgcatcacttcatggagttatgttgggataaatgtgtggagaagccagggaatcgcctagactctcgcactgaaaattgtctctccagctgtgtagaccgcttcattgacaccactcttgccatcaccagtcggtttgcccagattgtacagaaaggagggcagtaggccatcccccaggagaatgacagaagcaaaggacttgttactaagcagatttaagggtcagtgggggaaggctatcaacccattgtcagatcagcatcaggctgttatcaagtctgttggtgctaaaaagtaaaagatgaaatgttcaaagagtgaaatttatttatttggaattcagaaattccaggttgtatgacatcagttactcaataagtgtgaattctccaactcttcttttaatcccattttagaatttaatatagagatctctgattggcaggaacactagaaataaatgttccatggccagtagtgcaaatgggggattgtaggttttgaaaaaccaccctaagccatattaagggggttggaagaaccatcgaagcctaaggcatagaagaaaatttggggttaagaaagatgaagaacaaaaaacagctttattgcttatacatgaccaagaaaaggaaaacatggcaaaaaaaaaaaaaaaaa

SEQ ID NO: 192952 - DNA, 819 bp, Homo sapiens
  Payload ID: 18090
  Gene Name: translocase of inner mitochondrial membrane 8 homolog B (yeast)
  Uniprot ID: Q9Y5J9
  ENST ID: ENST00000504148
  CDS Start-End: 73-324
tcgagaggcggtgcacacccgtcgcgcatgcgcaaacacagctgtcggaaggtggcgagcctgaggcgaacaatggcggagctgggcgaagccgatgaagcggagttgcagcgcctggtggccgccgagcagcagaaggcgcagtttactgcacaggtgcatcacttcatggagttatgttgggataaatgtgtggagaagccagggaatcgcctagactctcgcactgaaaattgtctctccagctgtgtagaccgcttcattgacaccactcttgccatcaccagtcggtttgcccagattgtacagaaaggagggcagtaggccatcccccaggagaatgacagaagcaaaggacttgttactaagcagatttaagggtcagtgggggaaggctatcaacccattgtcagatcagcatcaggctgttatcaagtctgttggtgctaaaaagtaaaagatgaaatgttcaaagagtgaaatttatttatttggaattcagaaattccaggttgtatgacatcagttactcaataagtgtgaattctccaactcttcttttaatcccattttagaatttaatatagagatctctgattggcaggaacactagaaataaatgttccatggccagtagtgcaaatgggggattgtaggttttgaaaaaccaccctaagccatattaagggggttggaagaaccatcgaagcctaaggcatagaagaaaatttggggttaagaaagatgaagaacaaaaaacagctttattgcttatacatgaccaagaaaaggaaaacatggcaaaaaaaaaaaaaaaaa

SEQ ID NO: 192953 - DNA, 805 bp, Homo sapiens
  Payload ID: 18090
  Gene Name: translocase of inner mitochondrial membrane 8 homolog B (yeast)
  ENST ID: ENST00000541231
  CDS Start-End: 31-327
aagtcgagaggcggtgcacacccgtcgcgcatgcgcaaacacagctgtcggaaggtggcgagcctgaggcgaacaatggcggagctgggcgaagccgatgaagcggagttgcagcgcctggtggccgccgagcagcagaaggcgcagtttactgcacaggtgcatcacttcatggagttatgttgggataaatgtgtggagaagccagggaatcgcctagactctcgcactgaaaattgtctctccagctgtgtagaccgcttcattgacaccactcttgccatcaccagtcggtttgcccagattgtacagaaaggagggcagtaggccatcccccaggagaatgacagaagcaaaggacttgttactaagcagatttaagggtcagtgggggaaggctatcaacccattgtcagatcagcatcaggctgttatcaagtctgttggtgctaaaaagtaaaagatgaaatgttcaaagagtgaaatttatttatttggaattcagaaattccaggttgtatgacatcagttactcaataagtgtgaattctccaactcttcttttaatcccattttagaatttaatatagagatctctgattggcaggaacactagaaataaatgttccatggccagtagtgcaaatgggggattgtaggttttgaaaaaccaccctaagccatattaagggggttggaagaaccatcgaagcctaaggcatagaagaaaatttggggttaagaaagatgaagaacaaaaaacagctttattgcttatacatgaccaagaaaaggaaaacatggc

SEQ ID NO: 192954 - DNA, 1336 bp, Homo sapiens
  Payload ID: 18091
  Gene Name: translocase of inner mitochondrial membrane 9 homolog (yeast)
  Uniprot ID: Q9Y5J7
  ENST ID: ENST00000395159
  CDS Start-End: 527-796
aagcgctctctggtgctcttccattcctctccgggtggaaacaaactccggacataacaggggtttatttatttatttattttaaggtagcacattgccgcacaagaccgctctacagtctcatccaagacttgaagagctcccgacttgtaatactacttgtgtttaccagggactgttgacactgcttcgcttccgaagaccgttagggacgtgggattagatttcctcgcgttataacgaatcggcgtctaagggtttaagtgtcacttgacattactgctcccacgtgttctttcccatctggcggccgcggctcctgtccagaccctgaccctccctcccaaggctcaaccgtcccccaacaacccccagccttgtactgatgtcggatgcgagagcctgtgcttaagtaagaatcaggccttattggagacattcaagcaaaggttggacaactacttttccagaacagaaaggaaactcatgcatcagaaaaggtgactaataaaggtaccagaagaatatggctgcacaaataccagaatctgatcagataaaacagtttaaggaatttctggggacctacaataaacttacagagacctgctttttggactgtgttaaagacttcacaacaagagaagtaaaacctgaagagaccacctgttcagaacattgcttacagaaatatttaaaaatgacacaaagaatatccatgagatttcaggaatatcatattcagcagaatgaagccctggcagccaaagcaggactccttggccaaccacgatagagaagtcctgatggatgaacttttgatgaaagattgccaacagctgctttattggaaatgaggactcatctgatagaatcccctgaaagcagtagccaccatgttcaaccatctgtcatgactgtttggcaaatggaaaccgctggagaaacaaaattgctatttaccaggaataatcacaatagaaggtcttattgttcagtgaaataataagatgcaacatttgttgaggccttatgattcagcagcttggtcacttgattagaaaaataaaccattgtttcttcaattgtgactgttaattttaaagcaacttatgtgttcgatcatgtatgagatagaaaaatttttattactcaaagtaaaataaatggaaatatcactgagcagttgtttatactgtatggtaccatagtattctcactggactgtggatacgttgaaatgtttttcaatcaggatcatcctccaagcagtcctgttcattcatgtctgcctcaaattgctggtgaatacataaaatagttacttgctaatcat

SEQ ID NO: 192955 - DNA, 377 bp, Homo sapiens
  Payload ID: 18091
  Gene Name: translocase of inner mitochondrial membrane 9 homolog (yeast)
  ENST ID: ENST00000555097
  CDS Start-End: 245-377
tggcggccgcggctcctgtccagaccctgaccctccctcccaaggctcaaccgtcccccaacaacccccagccttgtactgatgtcggatgcgagagcctgtgcttaagtaagaatcaggccttattggagacattcaagcaaaggttggacaactacttttccagaacagaaaggaaactcatgcatcagaaaaggtttcagggatataatcagaaggtgactaataaaggtaccagaagaatatggctgcacaaataccagaatctgatcagataaaacagtttaaggaatttctggggacctacaataaacttacagagacctgctttttggactgtgttaaagacttcacaacaagagaagtaaaacctgaag

SEQ ID NO: 192956 - DNA, 598 bp, Homo sapiens
  Payload ID: 18091
  Gene Name: translocase of inner mitochondrial membrane 9 homolog (yeast)
  Uniprot ID: Q9Y5J7
  ENST ID: ENST00000555061
  CDS Start-End: 169-438
taatgatctgagaaattgggggtggtggcatacaattacatacacagatttataaaatacgagcagtgattccctaactcttcagttagactaaaaacatttgtttatagattgacaaacttgttttgaatttttaaattaggtgactaataaaggtaccagaagaatatggctgcacaaataccagaatctgatcagataaaacagtttaaggaatttctggggacctacaataaacttacagagacctgctttttggactgtgttaaagacttcacaacaagagaagtaaaacctgaagagaccacctgttcagaacattgcttacagaaatatttaaaaatgacacaaagaatatccatgagatttcaggaatatcatattcagcagaatgaagccctggcagccaaagcaggactccttggccaaccacgatagagaagtcctgatggatgaacttttgatgaaagattgccaacagctgctttattggaaatgaggactcatctgatagaatcccctgaaagcagtagccaccatgttcaaccatctgtcatgactgtttggcaaatggaaaccgctggagaaacaaaattgc

SEQ ID NO: 192957 - DNA, 796 bp, Homo sapiens
  Payload ID: 18091
  Gene Name: translocase of inner mitochondrial membrane 9 homolog (yeast)
  Uniprot ID: Q9Y5J7
  ENST ID: ENST00000555593
  CDS Start-End: 141-410
gctctacagtctcatccaagacttgaagagctcccgacttgtaatactacttgtgtttaccagggactgttgacactgcttcgcttccgaagaccgttagggacgtgggattaggtgactaataaaggtaccagaagaatatggctgcacaaataccagaatctgatcagataaaacagtttaaggaatttctggggacctacaataaacttacagagacctgctttttggactgtgttaaagacttcacaacaagagaagtaaaacctgaagagaccacctgttcagaacattgcttacagaaatatttaaaaatgacacaaagaatatccatgagatttcaggaatatcatattcagcagaatgaagccctggcagccaaagcaggactccttggccaaccacgatagagaagtcctgatggatgaacttttgatgaaagattgccaacagctgctttattggaaatgaggactcatctgatagaatcccctgaaagcagtagccaccatgttcaaccatctgtcatgactgtttggcaaatggaaaccgctggagaaacaaaattgctatttaccaggaataatcacaatagaaggtcttattgttcagtgaaataataagatgcaacatttgttgaggccttatgattcagcagcttggtcacttgattagaaaaataaaccattgtttcttcaattgtgactgttaattttaaagcaacttatgtgttcgatcatgtatgagatagaaaaatttttattactcaaagtaaaataaatggaaatatcactga

SEQ ID NO: 192958 - DNA, 430 bp, Homo sapiens
  Payload ID: 18091
  Gene Name: translocase of inner mitochondrial membrane 9 homolog (yeast)
  Uniprot ID: Q9Y5J7
  ENST ID: ENST00000555404
  CDS Start-End: 161-430
actgctcccacgtgttctttcccatctggcggccgcggctcctgtccagaccctgaccctccctcccaaggctcaaccgtcccccaacaacccccagccttgtactgatgtcggatgcgagagcctgtgcttaagtgactaataaaggtaccagaagaatatggctgcacaaataccagaatctgatcagataaaacagtttaaggaatttctggggacctacaataaacttacagagacctgctttttggactgtgttaaagacttcacaacaagagaagtaaaacctgaagagaccacctgttcagaacattgcttacagaaatatttaaaaatgacacaaagaatatccatgagatttcaggaatatcatattcagcagaatgaagccctggcagccaaagcaggactccttggccaaccacgatag

SEQ ID NO: 192959 - DNA, 746 bp, Homo sapiens
  Payload ID: 18091
  Gene Name: translocase of inner mitochondrial membrane 9 homolog (yeast)
  ENST ID: ENST00000556007
  CDS Start-End: 176-376
caaccgtcccccaacaacccccagccttgtactgatgtcggatgcgagagcctgtgcttaagtaagaatcaggccttattggagacattcaagcaaaggttggacaactacttttccagaacagaaaggaaactcatgcatcagaaaaggtgactaataaaggtaccagaagaatatggctgcacaaataccagaatctgatcagataaaacagtttaaggaatttctggggacctacaataaacttacagagacctgctttttggactgtgttaaagacttcacaacaagagaagtaaaacctgaagaggaatatcatattcagcagaatgaagccctggcagccaaagcaggactccttggccaaccacgatagagaagtcctgatggatgaacttttgatgaaagattgccaacagctgctttattggaaatgaggactcatctgatagaatcccctgaaagcagtagccaccatgttcaaccatctgtcatgactgtttggcaaatggaaaccgctggagaaacaaaattgctatttaccaggaataatcacaatagaaggtcttattgttcagtgaaataataagatgcaacatttgttgaggccttatgattcagcagcttggtcacttgattagaaaaataaaccattgtttcttcaattgtgactgttaattttaaagcaacttatgtgttcgatcatgtatgagatagaaaaatttttattactcaaagtaaaataa

SEQ ID NO: 192960 - DNA, 1271 bp, Homo sapiens
  Payload ID: 18092
  Gene Name: translocase of inner mitochondrial membrane domain containing 1
  ENST ID: ENST00000264244
  CDS Start-End: 183-710
atttccaaggactccaaagcgaggccggggactgaaggtgtgggtgtcgagccctctggcagagggttaacctgggtcaaatgcacggattctcacctcgtacagttacgctctcccgcggcacgtccgcgaggacttgaagtcctgagcgctcaagtttgtccgtaggtcgagagaaggccatggaggtgccgccaccggcaccgcggagctttctctgtagagcattgtgcctatttccccgagtctttgctgccgaagctgtgactgccgattcggaagtccttgaggagcgtcagaagcggcttccctacgtcccagagccctattacccggaatctggatgggaccgcctccgggagctgtttggcaaagatgaacagcagagaatttcaaaggaccttgctaatatctgtaagacggcagctacagcaggcatcattggctgggtgtatgggggaataccagcttttattcatgctaaacaacaatacattgagcagagccaggcagaaatttatcataaccggtttgatgctgtgcaatctgcacatcgtgctgccacacgaggcttcattcgttatggctggcgctggggttggagaactgcagtgtttgtgactatattcaacacagtgaacactagtctgaatgtataccgaaataaagatgccttaagccattttgtaattgcaggagcactcctgtaggaggcctgctgatggcatttcagaagtactctggtgagactgttcaggaaagaaaacagaaggatcgaaaggcactccatgagctaaaactggaagagtggaaaggcagactacaagttactgagcacctccctgagaaaattgaaagtagtttacaggaagatgaacctgagaatgatgctaagaaaattgaagcactgctaaaccttcctagaaacccttcagtaatagataaacaagacaaggactgaaagtgctctgaacttgaaactcactggagagctgaagggagctgccatgtccgatgaatgccaacagacaggccactctttggtcagcctgctgacaaatttaagtgctggtacctgtggtggcagtggcttgctcttgtctttttcttttctttttaactaagaatggggctgttgtactctcactttacttatccttaaatttaaatacatacttatgtttgtattaatctatcaatatatgcatacatgaatatatccacccacctagattttaagcagtaaataaaacatttcgcaaaagattaaa

SEQ ID NO: 192961 - DNA, 551 bp, Homo sapiens
  Payload ID: 18092
  Gene Name: translocase of inner mitochondrial membrane domain containing 1
  ENST ID: ENST00000486418
  CDS Start-End: 168-383
aaagcgaggccggggactgaaggtgtgggtgtcgagccctctggcagagggttaacctgggtcaaatgcacggattctcacctcgtacagttacgctctcccgcggcacgtccgcgaggacttgaagtcctgagcgctcaagtttgtccgtaggtcgagagaaggccatggaggtgccgccaccggcaccgcggagctttctctgtagagcattgtgcctatttccccgagtctttgctgccgaagctgtgactgccgattcggaagtccttgaggagcgtcagaagcggcttccctacgtcccagagccctattacccggaatctggatgggaccgcctccgggagctgtttggcaaagactgtcacgggaagtctttttaggataaacgtaggcctgcgtggcctggtggctggtggcataattggagccttgctgggcactcctgtaggaggcctgctgatggcatttcagaagtactctggtgagactgttcaggaaagaaaacagaaggatcgaaaggcactccatgagctaaaactggaagagtg

SEQ ID NO: 192962 - DNA, 670 bp, Homo sapiens
  Payload ID: 18092
  Gene Name: translocase of inner mitochondrial membrane domain containing 1
  ENST ID: ENST00000463927
  CDS Start-End: 152-349
ctgaaggtgtgggtgtcgagccctctggcagagggttaacctgggtcaaatgcacggattctcacctcgtacagttacgctctcccgcggcacgtccgcgaggacttgaagtcctgagcgctcaagtttgtccgtaggtcgagagaaggccatggaggtgccgccaccggcaccgcggagctttctctgtagagcattgtgcctatttccccgagtctttgctgccgaagctgtgactgccgattcggaagtccttgaggagcgtcagaagcggcttccctacgtcccagagccctattacccggaatctggatgggaccgcctccgggagctgtttggcaaagagtaaaagtgcctaggtgaacagcagagaatttcaaaggaccttgctaatatctgtaagacggcagctacagcaggcatcattggctgggtgtatgggggaataccagcttttattcatgctaaacaacaatacattgagcagagccaggcagaaatttatcataaccggtttgatgctgtgcactcctgtaggaggcctgctgatggcatttcagaagtactctggtgagactgttcaggaaagaaaacagaaggatcgaaaggcactccatgagctaaaactggaagagtggaaaggcagactacaagttactgagcacctccc

SEQ ID NO: 192963 - DNA, 2394 bp, Homo sapiens
  Payload ID: 18092
  Gene Name: translocase of inner mitochondrial membrane domain containing 1
  Uniprot ID: Q9NPL8
  ENST ID: ENST00000494664
  CDS Start-End: 203-1060
ggcgggacttcctgtgtcgtatttccaaggactccaaagcgaggccggggactgaaggtgtgggtgtcgagccctctggcagagggttaacctgggtcaaatgcacggattctcacctcgtacagttacgctctcccgcggcacgtccgcgaggacttgaagtcctgagcgctcaagtttgtccgtaggtcgagagaaggccatggaggtgccgccaccggcaccgcggagctttctctgtagagcattgtgcctatttccccgagtctttgctgccgaagctgtgactgccgattcggaagtccttgaggagcgtcagaagcggcttccctacgtcccagagccctattacccggaatctggatgggaccgcctccgggagctgtttggcaaagatgaacagcagagaatttcaaaggaccttgctaatatctgtaagacggcagctacagcaggcatcattggctgggtgtatgggggaataccagcttttattcatgctaaacaacaatacattgagcagagccaggcagaaatttatcataaccggtttgatgctgtgcaatctgcacatcgtgctgccacacgaggcttcattcgttatggctggcgctggggttggagaactgcagtgtttgtgactatattcaacacagtgaacactagtctgaatgtataccgaaataaagatgccttaagccattttgtaattgcaggagctgtcacgggaagtctttttaggataaacgtaggcctgcgtggcctggtggctggtggcataattggagccttgctgggcactcctgtaggaggcctgctgatggcatttcagaagtactctggtgagactgttcaggaaagaaaacagaaggatcgaaaggcactccatgagctaaaactggaagagtggaaaggcagactacaagttactgagcacctccctgagaaaattgaaagtagtttacaggaagatgaacctgagaatgatgctaagaaaattgaagcactgctaaaccttcctagaaacccttcagtaatagataaacaagacaaggactgaaagtgctctgaacttgaaactcactggagagctgaagggagctgccatgtccgatgaatgccaacagacaggccactctttggtcagcctgctgacaaatttaagtgctggtacctgtggtggcagtggcttgctcttgtctttttcttttctttttaactaagaatggggctgttgtactctcactttacttatccttaaatttaaatacatacttatgtttgtattaatctatcaatatatgcatacatgaatatatccacccacctagattttaagcagtaaataaaacatttcgcaaaagattaaagttgaattttacagttcgtatattcatgtggtcctttgaaagggtattctagaaatcactggaaagaggagaggaaagaaccaggtaggcaaatggtctgtgaaacccttgggtcctggaagcagtgtgagtgtaaatgtgtagtgtttggtttcatctaaataaacaaagatgatttctttgacacttgaaataaaatacaaattcaacaaaaagtagatcagcattattaaagaaacggttcaactttgtttcttcccttagtattgctgacaaagtatctgctgtagaatacaggaattacttagaatagaaacatagtcatcacaactgttactaaatggaaaagaaaagaattattgagttaagtattcctgtcaatacgggaaacactgctagtaccttatgttggtgttagacctctctgccctacactgagaatatagttttacacaggagcaaggtttgtgaagcagcatagtgaggtagctaaagccatgggctggctctaaaggctttaaatcccagccatgtggcttagctgccatgagatgtgcatttgagaaatgttgtcttcttttgctgttcaactccagattttcagatgataatgtgattatcccagcttaagttgcgtccacttctggtctagtgaattgtggaaggcagttttagagaaaggagtcatgagtaacatgaacagcagttggctatgtctttccagttctctgctgatgtcagaaagacccagaaataccaaggagaaaaagccatcttagggatctaaggaggccctatggaaagttactaccttagacatttgaagatagcttactgcttagtacatacactgtaaacaacgatctcattttaaatgagaactttctcataaatattttacaaatgaggtcaaactagcataaagccatttaaagagattatcagtccaatatgaaccagttaagtctttggactatccctttcctccttgactactgctttgacgtacctaaatcattcgtct

SEQ ID NO: 192964 - DNA, 725 bp, Homo sapiens
  Payload ID: 18092
  Gene Name: translocase of inner mitochondrial membrane domain containing 1
  ENST ID: ENST00000492164
  CDS Start-End: 160-432
gccggggactgaaggtgtgggtgtcgagccctctggcagagggttaacctgggtcaaatgcacggattctcacctcgtacagttacgctctcccgcggcacgtccgcgaggacttgaagtcctgagcgctcaagtttgtccgtaggtcgagagaaggccatggaggtgccgccaccggcaccgcggagctttctctgtagagcattgtgcctatttccccgagtctttgctgccgaagctgtgactgccgattcggaagtccttgaggagcgtcagaagcggcttccctacgtcccagagccctattacccggaatctggatgggaccgcctccgggagctgtttggcaaagacaatctgcacatcgtgctgccacacgaggcttcattcgttatggctggcgctggggttggagaactgcagtgtttgtgactatattcaacacagtgaacactagtctgaatgtataccgaaataaagatgccttaagccattttgtaattgcaggagctgtcacgggaagtctttttaggataaacgtaggcctgcgtggcctggtggctggtggcataattggagccttgctgggcactcctgtaggaggcctgctgatggcatttcagaagtactctggtgagactgttcaggaaagaaaacagaaggatcgaaaggcactccatgagctaaaactggaagagtggaaaggcagactacaagttactgag

SEQ ID NO: 192965 - DNA, 710 bp, Homo sapiens
  Payload ID: 18092
  Gene Name: translocase of inner mitochondrial membrane domain containing 1
  ENST ID: ENST00000493694
  CDS Start-End: 188-643
gtcgtatttccaaggactccaaagcgaggccggggactgaaggtgtgggtgtcgagccctctggcagagggttaacctgggtcaaatgcacggattctcacctcgtacagttacgctctcccgcggcacgtccgcgaggacttgaagtcctgagcgctcaagtttgtccgtaggtcgagagaaggccatggaggtgccgccaccggcaccgcggagctttctctgtagagcattgtgcctatttccccgagtctttgctgccgaagctgtgactgccgattcggaagtccttgaggagcgtcagaagcggcttccctacgtcccagagccctattacccggaatctggatgggaccgcctccgggagctgtttggcaaagacactcctgtaggaggcctgctgatggcatttcagaagtactctggtgagactgttcaggaaagaaaacagaaggatcgaaaggcactccatgagctaaaactggaagagtggaaaggcagactacaagttactgagcacctccctgagaaaattgaaagtagtttacaggaagatgaacctgagaatgatgctaagaaaattgaagcactgctaaaccttcctagaaacccttcagtaatagataaacaagacaaggactgaaagtgctctgaacttgaaactcactggagagctgaagggagctgccatgtccgatgaatgccaacag

SEQ ID NO: 192966 - DNA, 605 bp, Homo sapiens
  Payload ID: 18092
  Gene Name: translocase of inner mitochondrial membrane domain containing 1
  ENST ID: ENST00000466984
  CDS Start-End: 154-605
gactgaaggtgtgggtgtcgagccctctggcagagggttaacctgggtcaaatgcacggattctcacctcgtacagttacgctctcccgcggcacgtccgcgaggacttgaagtcctgagcgctcaagtttgtccgtaggtcgagagaaggccatggaggtgccgccaccggcaccgcggagctttctctgtagagcattgtgcctatttccccgagtctttgctgccgaagctgtgactgccgattcggaagtccttgaggagcgtcagaagcggcttccctacgtcccagagccctattacccggaatctggatgggaccgcctccgggagctgtttggcaaagacacagtgaacactagtctgaatgtataccgaaataaagatgccttaagccattttgtaattgcaggagctgtcacgggaagtctttttaggataaacgtaggcctgcgtggcctggtggctggtggcataattggagccttgctgggcactcctgtaggaggcctgctgatggcatttcagaagtactctggtgagactgttcaggaaagaaaacagaaggatcgaaaggcactccatgagctaaaactggaagagtg

SEQ ID NO: 192967 - DNA, 684 bp, Homo sapiens
  Payload ID: 18092
  Gene Name: translocase of inner mitochondrial membrane domain containing 1
  ENST ID: ENST00000498399
  CDS Start-End: 1-115
gactgccgattcggaagtccttgaggagcgtcagaagcggcttccctacgtcccagagccctattacccggaatctggatgggaccgcctccgggagctgtttggcaaagagtaaaacactcctgtaggaggcctgctgatggcatttcagaagtactctggtgagactgttcaggaaagaaaacagaaggatcgaaaggcactccatgagctaaaactggaagagtggaaaggcagactacaagttactgagcacctccctgagaaaattgaaagtagtttacaggaagatgaacctgagaatgatgctaagaaaattgaagcactgctaaaccttcctagaaacccttcagtaatagataaacaagacaaggactgaaagtgctctgaacttgaaactcactggagagctgaagggagctgccatgtccgatgaatgccaacagacaggccactctttggtcagcctgctgacaaatttaagtgctggtacctgtggtggcagtggcttgctcttgtctttttcttttctttttaactaagaatggggctgttgtactctcactttacttatccttaaatttaaatacatacttatgtttgtattaatctatcaatatatgcatacatgaatatatccacccacctagattttaagcagtaaataaaacatttcgcaaaaga

SEQ ID NO: 192968 - DNA, 3387 bp, Homo sapiens
  Payload ID: 18093
  Gene Name: translocase of outer mitochondrial membrane 20 homolog (yeast)
  Uniprot ID: Q15388
  ENST ID: ENST00000366607
  CDS Start-End: 222-659
gcaggcgcaggagccgcgctctgggcctctgctcaggctctgccgcggacgacctcgaggcccttagttgactgggaccggaagtggcgtgtgctcggcctttctgtgttcctggcccgcggccgtcgggtgtgagctgcgccgaccgctctgagggttcgtggcccaccgctccttcgcggtccctgccgccaccgtccacgctcagcgttgtagagaagatggtgggtcggaacagcgccatcgccgccggtgtatgcggggcccttttcattgggtactgcatctacttcgaccgcaaaagacgaagtgaccccaacttcaagaacaggcttcgagaacgaagaaagaaacagaagcttgccaaggagagagctgggctttccaagttacctgaccttaaagatgctgaagctgttcagaagttcttccttgaagaaatacagcttggtgaagagttactagctcaaggtgaatatgagaagggcgtagaccatctgacaaatgcaattgctgtgtgtggacagccacagcagttactgcaggtcttacagcaaactcttccaccaccagtgttccagatgcttctgactaagctcccaacaattagtcagagaattgtaagtgctcagagcttggctgaagatgatgtggaatgagaaacaaatgtcaacataataaaatctcagttaaaaatattttaaaaattcttggtagttgagcagctctgggggaataagggcaaatatgcttgttatgaactacactgaaatctaccaaagttaatgtttactttgtgtagatccatttgtctattttatttatttttcccagtgaaaagtgtattttgatagagaacttttcattctataaatacactatgagttactaaaatatcatggattttgtttattcctgaaacatagttacatagttaaactgtacatatgacatggcttatgttaaaaatacccagtgctcagttttgaaagataggcaaaaaaaaaaaagtataggagaaactgaagaatgtacacttttttagagggcacattttgctgtaaatctggaaatttgatagacttgactgtgtttgtgaaaactgagcattaaaggttttgattgatcctttctttccatttaatctctgagacgtaaatatgtgaggtgtgctgctgtgctgggttaacagcttccttccctttctgtgtagcagtcttgaaatgttctgtttaaatcagtaggcttaatgtgttctgggtatttatctccttgtattttaaatatatgtagttgcaaatagcaccaggaattagatttctgtacacccctaatctagccttgtgagcttcgctagttaatgtgtgctcactttccctccatttgttacgtgagagaatgcgtctgctgatcactgaagtgtcccttttagcttctgattcattgggttctgttgggcatctttaaatccaccttaacctgaggaatgtatgtgggcaaccaggccctgcatttttttatattctgaattttgcatgcttgcctgacttagtatttctgaattgatgttttttttaatggtataactatcttgattttcactgaaattatatggttctgtcactactctgtaaattaatccgaaacttttaaggtaactgggatgatctgcttgtaaaaatgcttgttgccttttgctttatcttcagtgtacctccttaatcctgcttcaacttgattatcttgtgaaacgatgagagtaagttgcaaccttgtgactgaaaacttgaaaagagtggagcaggtgggacctcttattctcaaatagtgacatattctccgtagtcacagtttcagaactgagtaaggatccttggtacttggtggcatctgttgaactgaggagcatttctcattgtaaagattgcctttgttctgtctaaaagtctggagaaatcccaaagacttttcctatgtactaggcattttattttgattgacttacaaactcttcttaatcattatcaatctcggtttttttgtggtgcagtggaaggagaaataggtctagtttctgcctctgattagccgcacagccttgaacaaatcacatttcatctttgaacttacctctactgttagactaggcgactcacatttgaggacttttctcgggtatcttgagggtttgtgatcctgaacccttaaacagtgcttttttgttacacaggagggcttttttggggggatgaccagtacagacatgccagttagttttactagtgggatcccaaatccaaagcagtgtagtggtgattggtcagtgactaaccaggcagctaagaagtcttaggcagcagcccagacatgtatagaggggcagttagagggagaacaggggtgggaaagggagcaaggggcagatagctcagcaaggaaagaatgggctcagaaaaaggagggctggctggaggagtgaggggcagcttaagtttggggagggtagaaacgccgtttccttgggaactggagtgcagtatgagctgggtgtcacttggctctgaacatactggctttgctgtaatgcttgaaaaggcgttggtatcttcattttacagttcattaacccaagtacgttttcttatttaaatgacaactttggtgctttaaaatgaggtaccactttttaaagctagctgtgtcgagttaaagaaaaaatcagcagttttttctcccagaaatgtaattgccaaacactattcatccccatcttaagttttacaaggtgatgtaatcagcttgttgtagtgatgctggccaaatggtgctcagcaggtgagaacaaaaaaaccccagatctcagtgaactaatacacagcttgagcgtttccatgtgctaatgttgcacacttactaaaaaactttggaaatggaaaataatgtattagtgcaacagttgatgtgcttctttgggcaaagatatagttttgttccacaatttgtacttaaaagcgaaagaacattgaaaacatagacttactggctgtagcaatgctggcctgttaactgataactagaacttaggttcacgtttatgtaaagtgtgtaaaacctagtagagcttgcatagtcggcactcagtaaatgtttggttccttttgccccttggtaagtttattttaccatcctcccacctgccattctgactttattaaatcaacatgtggaccagagtgttaatgagatgttattgcagaagagattgagaaaattggtatatcatgcagataacatacaaaatctttttgtaacgtaaaaaatgcagttttattattgcttgtgcctcaactgtttaagtgaatattaaagggcttggagaaaactttg

SEQ ID NO: 192969 - DNA, 620 bp, Homo sapiens
  Payload ID: 18094
  Gene Name: translocase of outer mitochondrial membrane 20 homolog (yeast)-like
  Uniprot ID: Q6UXN7
  ENST ID: ENST00000360945
  CDS Start-End: 43-501
ggcccgcgcccaacgctcggcttgtgggacgcccgcggtcggatgccctccgtccgctccctcctccgcctcttggccgccgcggcggcctgtggcgccttcgccttcctgggctattgtatttacctcaaccggaagcggcgcggggaccccgcgttcaagcgccgcctgcgggacaaaagaagagcagagcctcaaaaggctgaggagcagggcacgcagttgtgggatccaacgaagaataaaaagttgcaagaacttttcttgcaagaggtacggatgggagaactttggttatctagaggagagcacagaatggggattcaacacctcggcaatgcccttttagtgtgcgagcaaccacgggaacttctgaaagttttcaaacacactctccctcccaaggtatttgagatgctgttgcacaaaattccccttatttgccagcaatttgaggcagacatgaatgaacaggactgcttggaggatgatcctgattgaaaaacatttcaacgtatccacagtccagtgagaatactatggtaccatacagtataaacaactgctcagtgatatttccatttattttactttgagtaataaaaatttttctatctcat

SEQ ID NO: 192970 - DNA, 438 bp, Homo sapiens
  Payload ID: 18094
  Gene Name: translocase of outer mitochondrial membrane 20 homolog (yeast)-like
  ENST ID: ENST00000557754
  CDS Start-End: 31-255
acgctcggcttgtgggacgcccgcggtcggatgccctccgtccgctccctcctccgcctcttggccgccgcggcggcctgtggcgccttcgccttcctgggctattgtatttacctcaaccggaagcggcgcggggaccccgcgttcaagcgccgcctgcgggacaaaagaagagcagagcctcaaaaggctgaggagcagggcacgcaggagagcacagaatggggattcaacacctcggcaatgcccttttagtgtgcgagcaaccacgggaacttctgaaagttttcaaacacactctccctcccaaggtatttgagatgctgttgcacaaaattccccttatttgccagcaatttgaggcagacatgaatgaacaggactgcttggaggatgatcctgattgaaaaacatttcaacgtatccacagtccagtga

SEQ ID NO: 192971 - DNA, 2040 bp, Homo sapiens
  Payload ID: 18095
  Gene Name: translocase of outer mitochondrial membrane 22 homolog (yeast)
  Uniprot ID: Q9NS69
  ENST ID: ENST00000216034
  CDS Start-End: 32-460
ctcctttccgcttccggtgtcccctacagtcatggctgccgccgtcgctgctgccggtgcaggggaaccccagtccccggacgaattgctcccgaaaggcgacgcggagaagcctgaggaggagctggaggaggacgacgatgaggagctagatgagaccctgtcggagagactatggggcctgacggagatgtttccggagagggtccggtccgcggccggagccacttttgatctttccctctttgtggctcagaaaatgtacaggttttccagggcagccttgtggattgggaccacttcctttatgatcctggttcttcccgttgtctttgagacggagaagttgcaaatggagcaacagcagcaactgcagcagcggcagatacttctaggacctaacacagggctctcaggaggaatgccaggggctctaccctcacttcctggaaagatctagattgttattgctgtttgagctgtctcagtgggataagtttgaaattcaagtgtttgaactgctgataatttggatttttttttttttttaactttggcacattgatctatctaaacctggtggggagaattatccccacattgtctcatggaaagactcaacttgcaactgtgccctccacactatccttacttctgtctccactctgataccagagtgcagccatgcagatggttattccagctctggtcacccgactcctttcaccaaattgctcctaactggaagatctcactttccccttgtggggtaggaaccgatgccagtgggagggatgtgcccctgaccattaacgactgttttttttttttttttttaaagaatggagttgttggggcaggacatgcacacaatgtgaaacagacaaaatgcattacacctgtagtgtaaagtggccactatgaatccctatgtatgagaggagggaggcaggctgcagcttcagccacagaatggggactatggaagacagcaggagctcatttcctctgcacattttggctgttagacctgtgtgtgtgtttaaaaaaagagaagtcagtgctcactttttgtatttaaatattaaaaatgattccaactgaaagtgtcatcctaagtaccttgaaatgagaccacgtcagagacatgtactgcccctcacattttctcacctaaaccagcagcacctccatcttaacagccataggcccaaattgtttccaagtgaaaattcatttttagccaagtacttcatagcaatctttgccctgaatttaggcagtcactttgagatccatcagcctaaaacaaaggattgggtctatgtacttctttagtctataatgacactgtgtaattataaagtatttgtagggaataacatagtactgatttctggggaataggggagggggacagaatttttttttttttttttttgcctgagatcaggtctcactggagtacagtggtgtcgtttgggttcactgcaacctcttacctcccctccaacttggcctcctgggtagctaagactacaggtacacgccaccgtgcccagctagtttcttttatttttggtagagtcagggtttcgccttgttgccccagatagtcttgaactcctgagttctagccatccacccgcctctggcccctcaaagtgctgggattataggcgtcacccaccacgcccagccagagtaagccttttgtgtgtttatcagatcaaccaacactacaatctaggtggtactgttcccattttacagaagaggaaacagccacagaaaggtaattgctcaaggctgcagagttaagtgctagacctggattcaaatccaggcagtccagctacagaacactgctgctgtgcgctcgggatggtggggctgggcccaggcccgctgggtatacatgatctttcacttgttaactagggaaaaacactagtcaccagtgtggtacaaacttgtacttaggtggattcttcaaattgtcaagattagtttttataaattaaaatagactgaaaaatg

SEQ ID NO: 192972 - DNA, 2062 bp, Homo sapiens
  Payload ID: 18096
  Gene Name: translocase of outer mitochondrial membrane 34
  Uniprot ID: Q15785
  ENST ID: ENST00000372813
  CDS Start-End: 154-1083
gctccgggcctccaggtctcgcaggccccgccccctcgccgcgggttcgctgttgggcggagatattcgccgccggcgcttgcgcccggaaggtgtgccgcaccacacgggggaggaaggaaggagctcccaactcgccggcctggccacgggatggcccccaaattcccagactctgtggaggagctccgcgccgccggcaatgagagtttccgcaacggccagtacgccgaggcctccgcgctctacggccgcgcgctgcgggtgctgcaggcgcaaggttcttcagacccagaagaagaaagtgttctctactccaaccgagcagcatgtcacttgaaggatggaaactgcagagactgcatcaaagattgcacttcagcactggccttggttcccttcagcattaagcccctgctgcggcgagcatctgcttatgaggctctggagaagtaccctatggcctatgttgactataagactgtgctgcagattgatgataatgtgacgtcagccgtagaaggcatcaacagaatgaccagagctctcatggactcgcttgggcctgagtggcgcctgaagctgccctcaatccccttggtgcctgtttcagctcagaagaggtggaattccttgccttcggagaaccacaaagagatggctaaaagcaaatccaaagaaaccacagctacaaagaacagagtgccttctgctggggatgtggagaaagccagagttctgaaggaagaaggcaatgagcttgtaaagaagggaaaccataagaaagctattgagaagtacagtgaaagcctcttgtgtagtaacctggaatctgccacgtacagcaacagagcactctgctatttggtcctgaagcagtacacagaagcagtgaaggactgcacagaagccctcaagctggatggaaagaacgtgaaggcattctacagacgggctcaagcccacaaagcactcaaggactataaatccagctttgcagacatcagcaacctcctacagattgagcctaggaatggtcctgcacagaagttgcggcaggaagtgaagcagaacctacactaaaaacccaacagggcaactggaacccctgcctgaccttacccagagaagccatgggccacctgctctgtgcccgctcctgaaacccagcatgccccaagtgagctctgaagccccctcctcaatcccttgatggcctcccaccctgtaagaggctttgcttgttcaaattaaactcagtgtagtcaaacacagacatggttgttgcaccagaaaggtccccactagagctaagcgtgaagctgaagctctgtccctattcccccagcccagctagctgatcacaccaacagatcctcatcagcaaagcatttggctttgtcctgcccaagtgggctgcagactgagtgctgcccttgtagcttccccagaccccaactcactgcagttcatctgaacaacctgagctcctgggccggggtggaaggagggggataaacctaaggccctgatccaaagcagcctgttgagctggttctccagggctgcagtctctccaggtgtacagctgctgtccctgccctgtcctgtccttgcacagtctcctatgtctgagccccagtgccttctgttcgggccctcctttggtgggaaggcagagccctgacccttgaatggttgtccttgactctgtgctgctgccttctgcagagaggcacctaagctgtttaaagagcccagtgattgtggctgctcctcctagaggtgggagggggcaagaggcctccttggtcagtgtccatgctttctgggcagggacttggttttttgttccaacagtggccttctccgggcttcatagttctttgtaatatgttgaagttaatttgaattgactgattttgttgaactgtgtgtttaagctgttgcattaaaaagctttcttctacatcaatatctgctgtgctttcatttatgccttttcagctttgcacctggaactctgtagtaataataaaagttattgcttattgggcattca

SEQ ID NO: 192973 - DNA, 1707 bp, Homo sapiens
  Payload ID: 18097
  Gene Name: translocase of outer mitochondrial membrane 40 homolog (yeast)
  Uniprot ID: O96008
  ENST ID: ENST00000252487
  CDS Start-End: 102-1187
ggggcgacggtggtggcggcggcggcagcgggttcggttgcgcgtggcgcacggggtgggagcggagcccaggccgggagcaggcgccgccgccagcgaccatggggaacgtgttggctgccagctcgccgcccgcagggccgccaccgccgcctgcgccggccctcgtggggctgccgccacctccgccctcgccgccgggcttcacgctgccgccgctgggaggcagcctgggcgccggcaccagtacgagtcgaagttcggaacggacccccggggctgcaaccgccagcgcctcaggggccgccgaggatggggcctgcggctgcctgcccaacccgggcacattcgaggagtgccaccggaagtgcaaggagctgtttcccattcagatggagggtgtcaagctcacagtcaacaaagggttgagtaaccattttcaggtcaaccacacagtagccctcagcacaatcggggagtccaactaccacttcggggtcacatatgtggggacaaagcagctgagtcccacagaggcgttccctgtactggtgggtgacatggacaacagtggcagtctcaacgctcaggtcattcaccagctgggccccggtctcaggtccaagatggccatccagacccagcagtcgaagtttgtgaactggcaggtggacggggagtatcggggctctgacttcacagcagccgtcaccctggggaacccagacgtcctcgtgggttcaggaatcctcgtagcccactacctccagagcatcacgccttgcctggccctgggtggagagctggtctaccaccggcggcctggagaggagggcactgtcatgtctctagctgggaaatacacattgaacaactggttggcaacggtaacgttgggccaggcgggcatgcacgcaacatactaccacaaagccagtgaccagctgcaggtgggtgtggagtttgaggccagcacaaggatgcaggacaccagcgtctccttcgggtaccagctggacctgcccaaggccaacctcctcttcaaaggctctgtggatagcaactggatcgtgggtgccacgctggagaagaagctcccacccctgcccctgacactggcccttggggccttcctgaatcaccgcaagaacaagtttcagtgtggctttggcctcaccatcggctgagccctcctggcccccgccttccacgcccttccgattccacctccacctccacctccccctgccacagaggggagacctgagcccccctcccttccctccccccttgggggtcgggggggacattggaaaggagggaccccgccaccccagcagctgaggaggggattctggaactgaatggcgcttcgggattctgagtagcaggggcagcatgcccagtgggcctggggtcccgggagggattccggaattgaggggcacgcaggattctgagcaccaggggcagaggcggccagacaacctcagggaggagtgtcctggcgtccccatcctccaaagggcctgggcccgccccgagggggcagcgagaggagcttccccatccccggtcagtccaccctgccccgtccactttcccatctcctcggtataaatcatgtttataagttatggaagaaccgggacattttacagaaaaaaaacaaaaaacaacaaaaaatatacgtgggaaaaaaaacga

SEQ ID NO: 192974 - DNA, 1709 bp, Homo sapiens
  Payload ID: 18097
  Gene Name: translocase of outer mitochondrial membrane 40 homolog (yeast)
  Uniprot ID: O96008
  ENST ID: ENST00000405636
  CDS Start-End: 105-1190
ggggcgacggtggtggcggcggcggcagcgggttcggttgcgcgtggcgcacggggtgggagcggagcccaggccgggagcaggcgccgccgccacaggcgaccatggggaacgtgttggctgccagctcgccgcccgcagggccgccaccgccgcctgcgccggccctcgtggggctgccgccacctccgccctcgccgccgggcttcacgctgccgccgctgggaggcagcctgggcgccggcaccagtacgagtcgaagttcggaacggacccccggggctgcaaccgccagcgcctcaggggccgccgaggatggggcctgcggctgcctgcccaacccgggcacattcgaggagtgccaccggaagtgcaaggagctgtttcccattcagatggagggtgtcaagctcacagtcaacaaagggttgagtaaccattttcaggtcaaccacacagtagccctcagcacaatcggggagtccaactaccacttcggggtcacatatgtggggacaaagcagctgagtcccacagaggcgttccctgtactggtgggtgacatggacaacagtggcagtctcaacgctcaggtcattcaccagctgggccccggtctcaggtccaagatggccatccagacccagcagtcgaagtttgtgaactggcaggtggacggggagtatcggggctctgacttcacagcagccgtcaccctggggaacccagacgtcctcgtgggttcaggaatcctcgtagcccactacctccagagcatcacgccttgcctggccctgggtggagagctggtctaccaccggcggcctggagaggagggcactgtcatgtctctagctgggaaatacacattgaacaactggttggcaacggtaacgttgggccaggcgggcatgcacgcaacatactaccacaaagccagtgaccagctgcaggtgggtgtggagtttgaggccagcacaaggatgcaggacaccagcgtctccttcgggtaccagctggacctgcccaaggccaacctcctcttcaaaggctctgtggatagcaactggatcgtgggtgccacgctggagaagaagctcccacccctgcccctgacactggcccttggggccttcctgaatcaccgcaagaacaagtttcagtgtggctttggcctcaccatcggctgagccctcctggcccccgccttccacgcccttccgattccacctccacctccacctccccctgccacagaggggagacctgagcccccctcccttccctccccccttgggggtcgggggggacattggaaaggagggaccccgccaccccagcagctgaggaggggattctggaactgaatggcgcttcgggattctgagtagcaggggcagcatgcccagtgggcctggggtcccgggagggattccggaattgaggggcacgcaggattctgagcaccaggggcagaggcggccagacaacctcagggaggagtgtcctggcgtccccatcctccaaagggcctgggcccgccccgagggggcagcgagaggagcttccccatccccggtcagtccaccctgccccgtccactttcccatctcctcggtataaatcatgtttataagttatggaagaaccgggacattttacagaaaaaaaacaaaaaacaacaaaaaatatacgtgggaaaaaaaacg

SEQ ID NO: 192975 - DNA, 1725 bp, Homo sapiens
  Payload ID: 18097
  Gene Name: translocase of outer mitochondrial membrane 40 homolog (yeast)
  Uniprot ID: O96008
  ENST ID: ENST00000426677
  CDS Start-End: 181-1266
cggcggcggcagcgggttcggttgcgcgtggcgcacggggtgggagcggagcccaggccgggagcaggcgccgccgccagtgagaaccggggccggagccgggtgcggatttgctggggctgagtcgggggcgcgcgggccctgacctctgccctctgacctctcccctagcaggcgaccatggggaacgtgttggctgccagctcgccgcccgcagggccgccaccgccgcctgcgccggccctcgtggggctgccgccacctccgccctcgccgccgggcttcacgctgccgccgctgggaggcagcctgggcgccggcaccagtacgagtcgaagttcggaacggacccccggggctgcaaccgccagcgcctcaggggccgccgaggatggggcctgcggctgcctgcccaacccgggcacattcgaggagtgccaccggaagtgcaaggagctgtttcccattcagatggagggtgtcaagctcacagtcaacaaagggttgagtaaccattttcaggtcaaccacacagtagccctcagcacaatcggggagtccaactaccacttcggggtcacatatgtggggacaaagcagctgagtcccacagaggcgttccctgtactggtgggtgacatggacaacagtggcagtctcaacgctcaggtcattcaccagctgggccccggtctcaggtccaagatggccatccagacccagcagtcgaagtttgtgaactggcaggtggacggggagtatcggggctctgacttcacagcagccgtcaccctggggaacccagacgtcctcgtgggttcaggaatcctcgtagcccactacctccagagcatcacgccttgcctggccctgggtggagagctggtctaccaccggcggcctggagaggagggcactgtcatgtctctagctgggaaatacacattgaacaactggttggcaacggtaacgttgggccaggcgggcatgcacgcaacatactaccacaaagccagtgaccagctgcaggtgggtgtggagtttgaggccagcacaaggatgcaggacaccagcgtctccttcgggtaccagctggacctgcccaaggccaacctcctcttcaaaggctctgtggatagcaactggatcgtgggtgccacgctggagaagaagctcccacccctgcccctgacactggcccttggggccttcctgaatcaccgcaagaacaagtttcagtgtggctttggcctcaccatcggctgagccctcctggcccccgccttccacgcccttccgattccacctccacctccacctccccctgccacagaggggagacctgagcccccctcccttccctccccccttgggggtcgggggggacattggaaaggagggaccccgccaccccagcagctgaggaggggattctggaactgaatggcgcttcgggattctgagtagcaggggcagcatgcccagtgggcctggggtcccgggagggattccggaattgaggggcacgcaggattctgagcaccaggggcagaggcggccagacaacctcagggaggagtgtcctggcgtccccatcctccaaagggcctgggcccgccccgagggggcagcgagaggagcttccccatccccggtcagtccaccctgccccgtccactttcccatctcctcggtataaatcatgtttataagttatggaagaac

SEQ ID NO: 192976 - DNA, 731 bp, Homo sapiens
  Payload ID: 18097
  Gene Name: translocase of outer mitochondrial membrane 40 homolog (yeast)
  ENST ID: ENST00000589649
  CDS Start-End: 88-731
ggcggcggcagcgggttcggttgcgcgtggcgcacggggtgggagcggagcccaggccgggagcaggcgccgccgccacaggcgaccatggggaacgtgttggctgccagctcgccgcccgcagggccgccaccgccgcctgcgccggccctcgtggggctgccgccacctccgccctcgccgccgggcttcacgctgccgccgctgggaggcagcctgggcgccggcaccagtacgagtcgaagttcggaacggacccccggggctgcaaccgccagcgcctcaggggccgccgaggatggggcctgcggctgcctgcccaacccgggcacattcgaggagtgccaccggaagtgcaaggagctgtttcccattcagatggagggtgtcaagctcacagtcaacaaagggttgagtaaccattttcaggtcaaccacacagtagccctcagcacaatcggggagtccaactaccacttcggggtcacatatgtggggacaaagcagctgagtcccacagaggcgttccctgtactggtgggtgacatggacaacagtggcagtctcaacgctcaggtcattcaccagctgggccccggtctcaggtccaagatggccatccagacccagcagtcgaagtttgtgaactggcaggtggacggggagtatcggggctctgacttcacagcagccgtcaccctggggaacccagacgtcctcgtgggttcagg

SEQ ID NO: 192977 - DNA, 707 bp, Homo sapiens
  Payload ID: 18097
  Gene Name: translocase of outer mitochondrial membrane 40 homolog (yeast)
  ENST ID: ENST00000592041
  CDS Start-End: 1-506
ctcaggtcattcaccagctgggccccggtctcaggtccaagatggccatccagacccagcagtcgaagtttgtgaactggcaggtggacggggagtatcggggctctgacttcacagcagccgtcaccctggggaacccagacgtcctcgtgggttcaggaatcctcgtagcccactacctccagagcatcacgccttgcctggccctgggtggagagctggtctaccaccggcggcctggagaggagggcactgtcatgtctctagctgggaaatacacattgaacaactggttggcaacggtaacgttgggccaggcgggcatgcacgcaacatactaccacaaagccagtgaccagctgcaggtgggtgtggagtttgaggccagcacaaggatgcaggacaccagcgtctccttcgggtaccagctggacctgcccaaggccaacctcctcttcaaaggtaaaggtctcggttcccctacgcgggaaacaggcaggaggtgactcaactctgagtggatgtgtgggccaccacaggtgctggaggacagtgtgctgccaccctgtgggcctccacattaccagggaacacttgttaaaaggctctgtggatagcaactggatcgtgggtgccacgctggagaagaagctcccacccctgcccctgacactggcccttggggccttcctgaatcaccgcaagaa

SEQ ID NO: 192978 - DNA, 207 bp, Homo sapiens
  Payload ID: 18097
  Gene Name: translocase of outer mitochondrial membrane 40 homolog (yeast)
  ENST ID: ENST00000589253
  CDS Start-End: 98-207
gtgggtaacgaggagcagcgcagggttcgcagaacagattagaattctcccgaggcactctgggaagggccagcacttccggttttagcaggcgaccatggggaacgtgttggctgccagctcgccgcccgcagggccgccaccgccgcctgcgccggccctcgtggggctgccgccacctccgccctcgccgccgggcttcacgct

SEQ ID NO: 192979 - DNA, 3415 bp, Homo sapiens
  Payload ID: 18097
  Gene Name: translocase of outer mitochondrial membrane 40 homolog (yeast)
  Uniprot ID: O96008
  ENST ID: ENST00000592434
  CDS Start-End: 94-1083
ggtggcggcggcggcagcgggttcggttgcgcgtggcgcacggggtgggagcggagcccaggccgggagcaggcgccgccgccacaggcgaccatggggaacgtgttggctgccagctcgccgcccgcagggccgccaccgccgcctgcgccggccctcgtggggctgccgccacctccgccctcgccgccgggcttcacgctgccgccgctgggaggcagcctgggcgccggcaccagtacgagtcgaagttcggaacggacccccggggctgcaaccgccagcgcctcaggggccgccgaggatggggcctgcggctgcctgcccaacccgggcacattcgaggagtgccaccggaagtgcaaggagctgtttcccattcagatggagggtgtcaagctcacagtcaacaaagggttgagtaaccattttcaggtcaaccacacagtagccctcagcacaatcggggagtccaactaccacttcggggtcacatatgtggggacaaagcagctgagtcccacagaggcgttccctgtactggtgggtgacatggacaacagtggcagtctcaacgctcaggtcattcaccagctgggccccggtctcaggtccaagatggccatccagacccagcagtcgaagtttgtgaactggcaggtggacggggagtatcggggctctgacttcacagcagccgtcaccctggggaacccagacgtcctcgtgggttcaggaatcctcgtagcccactacctccagagcatcacgccttgcctggccctgggtggagagctggtctaccaccggcggcctggagaggagggcactgtcatgtctctagctgggaaatacacattgaacaactggttggcaacggtaacgttgggccaggcgggcatgcacgcaacatactaccacaaagccagtgaccagctgcaggtgggtgtggagtttgaggccagcacaaggatgcaggacaccagcgtctccttcgggtaccagctggacctgcccaaggccaacctcctcttcaaaggtaaaggtctcggttcccctacgcgggaaacaggcaggaggtgactcaactctgagtggatgtgtgggccaccacaggtgctggaggacagtgtgctgccaccctgtgggcctccacattaccagggaacacttgttaaaaggtaggtggggccgggtgcggtggctcacgcctgtaatcccagcactttgggaggccaaggcgggccgaggtaaggagattgagaccatcctggctaacacggtgaaactccgtctctactaaaaatacaaaaacaaaattagccgggtgtggttgcgggtgcctatagtcccaactactgaggctgaggcgggaaaatggtatgaacccaggaggcggagcttgcggtgagccgagatcgtgccaccgcactccagcctgggtgacagagcaagactccatctcaaaaaaaaaaaagtaggtggacaaccctctactatgttttatgcttggaaaaaaaaagtaggtagagcagccaggcgtggtgactcacgcctgtaatcccagcattttgggaggccaagccaggtagaatacttgaggccaggagttggagaccagcctggccaacgtggtgaaatcccctctctactaaaagtacaaaaattagccaggtgtggtagcgtgctgcaactgtagtccccgctacttaggaggctgaggcacaagaatcacttgaacctgggaggcggaggttgcagggagttgagactgcaccactgcactccagcctgggtgacagagtgagactccatctccaaaaaaaataaaatgaaataaataaataaatgttaaaaaaaatctggtggagcatctgatgggtgtttgggccaagctggagctttgtccatcccctcttatttttctgcacttgactctcttatttttctgagactggtctccctctgtcgcccaggctagagtgcagcagtgcaactgcggctcactgcagcctccacctcccgggctcaagcagccttcccacctcagcctcctgagtagctaggaccacaggtgtatgccaccaggcccagctaatttttttgatagttttgggagacatgggggtttcaccatgttgcccaggctggtctcgaactcctggactcaagccttggcctcccaaagtgctgggattataggtgtgagccaccacacccagccagggtagaaggcactttggaagcctcgagcctgccccattcatcttacgttagtggaaactgaggcttccagaggtttcaaggtcacaactaaatccagaacctcatctcaggcacactggtcgtagtcccaatgtccagtcttaagtcttcttggatatctgtggctcacagattttgggtgtttgagcctcctgctgagcactgctggggccacagcggtgaccagccctgtcttcacgggactcagtgagaggaacagattcatccgcagagtgggcaggactaggttgggggaacccaggggtctagagggcttttcagagggcaggggtcactgagcggagagcagaggaggagtgagccatttgctccagcgtgaagttgttggtgtgatggggtttcagggtggcaggagcagtgtggttaaaggtctggaagctgtcggcatgtggctggtatccaaggtggccaggaactctgcatggatatggtgggaagctggcacgcctctcacctcagctcttccctgcaggctctgtggatagcaactggatcgtgggtgccacgctggagaagaagctcccacccctgcccctgacactggcccttggggccttcctgaatcaccgcaagaacaagtttcagtgtggctttggcctcaccatcggctgagccctcctggcccccgccttccacgcccttccgattccacctccacctccacctccccctgccacagaggggagacctgagcccccctcccttccctccccccttgggggtcgggggggacattggaaaggagggaccccgccaccccagcagctgaggaggggattctggaactgaatggcgcttcgggattctgagtagcaggggcagcatgcccagtgggcctggggtcccgggagggattccggaattgaggggcacgcaggattctgagcaccaggggcagaggcggccagacaacctcagggaggagtgtcctggcgtccccatcctccaaagggcctgggcccgccccgagggggcagcgagaggagcttccccatccccggtcagtccaccctgccccgtccactttcccatctcctcggtataaatcatgtttataagttatggaagaaccgggacattttacagaaaaaaaacaaaaaacaacaaaaaatatacgtgggaaaaaaaa

SEQ ID NO: 192980 - DNA, 2636 bp, Homo sapiens
  Payload ID: 18098
  Gene Name: translocase of outer mitochondrial membrane 40 homolog (yeast)-like
  Uniprot ID: Q969M1
  ENST ID: ENST00000367987
  CDS Start-End: 187-1113
ctagggttgtctctccatgagtgctctccttccctactcttcctgttccaggtgtagcgtcggaccatgtggaagtttctgaggctggggagccggataatggggggtggggcccgttggggggtaaaggggcaatagcgtcctttcacaggctaacctcggctcttcccagtcctctggactaaaatggggaacacattgggcctggcaccaatggggactttgccccgccggagcccccgccgagaggaacccctgcccaaccctgggagcttcgatgagctgcaccgtctatgcaaagatgtattcccagcacagatggagggagtgaagctcgttgtcaacaaggttctgagcagccatttccaggtggcgcacactatacacatgagtgccctgggcttgccgggatatcacctccatgcggcctatgcaggggattggcagctcagtcccactgaggtgttccccactgtggtaggggatatggacagcagtggcagcctgaacgcccaggtcttgctcctcttggcagagcggctccgagctaaggctgtcttccagacgcagcaggccaagttcctgacatggcagtttgatggcgagtatcggggagatgactacacagccactctgaccctaggaaatcctgacctgattggggagtcggtgatcatggttgctcacttcctgcagagcctcactcatcggctggtgctgggaggagagctagtttatcaccggcggccaggcgaagagggggccatcttgacactggctgggaagtactcggctgtacactgggtagctacattgaatgtgggatcaggcggggcccatgcaagttactaccacagggcaaatgaacaggttcaggttggagtggagtttgaggcaaacacaaggctacaagacacaacattctcctttggttaccacctgactctgccccaggccaacatggtatttagaggcttggtggatagtaactggtgtgtaggtgctgtgctggagaagaagatgccccctctgcctgtcaccctagcccttggagccttcctcaatcactggcgcaacagattccattgtggcttcagcatcactgtgggctgaggttgtccagagccagcccccacagcagctggaacctctgagtcaggtgccctagggccaaagactaggcccctcttcagagcccaccttgctgggtgatctctaggacccaggagcagagtggtggacaggaccatgccctcctcagaactggagctgccacaggggcagttgatgaggcagaggtttgaggatcccccctctgctaccagccccagtatcaccttccccatgctcttgtggctgtggactaagggagaaggattaaggggtatggctgaattcccccggcaccccttgccctcaggcttccttcttcctttccctttggttaatcctgcatgggattagctgaccatcctgttttccatcccagagcctcccaaggctgggaaagtagggctgaagggctagatgtttggtctcaggaagtggggcccacccattcccagaaggagcttctttacctcttagccctgaggtttcctccttcccatcttctgtgcttccagagaacaactttgttcctatggtcacccccactatccccatgaccgcatgaagaggcagttattgctttagtctttcattgcaaccactgggctccctttgaacccggcccaatctttggtcccagcattttcccactccagtgtatccagggtgttccaggtgagctggggaaggaagtgagcatggcctcagctgcagatctcctggagcagcggcatcatggcagacaggccctggatgtgctggatttggtacccgtaggcctcattaatgctccggagctcagccagcaggcctagcaacttcgcatacagaaacctttggaggaagtagtggggttgccaggaaaacaggagggaaataaggcagttgggagtcttgtctctaggccctgatcccctgaactattcctcagtgaagccaggtctgaacattagagaaaatcatgctctggtatgacagactatcagaggttccaaaggtcctccagggggcctcggtctgacactgtcttctctcaccatgctcagttttttctgaacccagagctctgagagccgagtgtgaagaaagctccagacttggccagaactccaaccatgtggaatctgagggcctggccttctagagcaggttctagaaggtggatgtgttctatggtataaagcatcccctttctggccaaactagctcttggaggaacgagcaaaacagaagcggtgcatacctcagagcctggataaatcacagactattgaacctggaactggctttgaccatgaaactgtgaatggccctaacttcaagggaaatgagaaatcgaaggaattggcccaatggcgaggagaggaaaggccaagggaagagaaaagtctgcgttagtctggagaagttggactagtgaggtaatggatgtcatcaatctcaggaatgctattacccagagcctctgagctactactttgcatctgtactgaataaaaaaaaaatctggaaaaagtgagatgaaa

SEQ ID NO: 192981 - DNA, 2708 bp, Homo sapiens
  Payload ID: 18098
  Gene Name: translocase of outer mitochondrial membrane 40 homolog (yeast)-like
  Uniprot ID: Q969M1
  ENST ID: ENST00000367988
  CDS Start-End: 270-1196
ttcaaagatggcgcttacggccacgctaagaatgcagcgtgaagctgcagttctgccatcactcaagatggctgcccccatcaagatgaccggggtgtgccggggggaaaggggcagcatgatggtctgagatggtgtagcgtcggaccatgtggaagtttctgaggctggggagccggataatggggggtggggcccgttggggggtaaaggggcaatagcgtcctttcacaggctaacctcggctcttcccagtcctctggactaaaatggggaacacattgggcctggcaccaatggggactttgccccgccggagcccccgccgagaggaacccctgcccaaccctgggagcttcgatgagctgcaccgtctatgcaaagatgtattcccagcacagatggagggagtgaagctcgttgtcaacaaggttctgagcagccatttccaggtggcgcacactatacacatgagtgccctgggcttgccgggatatcacctccatgcggcctatgcaggggattggcagctcagtcccactgaggtgttccccactgtggtaggggatatggacagcagtggcagcctgaacgcccaggtcttgctcctcttggcagagcggctccgagctaaggctgtcttccagacgcagcaggccaagttcctgacatggcagtttgatggcgagtatcggggagatgactacacagccactctgaccctaggaaatcctgacctgattggggagtcggtgatcatggttgctcacttcctgcagagcctcactcatcggctggtgctgggaggagagctagtttatcaccggcggccaggcgaagagggggccatcttgacactggctgggaagtactcggctgtacactgggtagctacattgaatgtgggatcaggcggggcccatgcaagttactaccacagggcaaatgaacaggttcaggttggagtggagtttgaggcaaacacaaggctacaagacacaacattctcctttggttaccacctgactctgccccaggccaacatggtatttagaggcttggtggatagtaactggtgtgtaggtgctgtgctggagaagaagatgccccctctgcctgtcaccctagcccttggagccttcctcaatcactggcgcaacagattccattgtggcttcagcatcactgtgggctgaggttgtccagagccagcccccacagcagctggaacctctgagtcaggtgccctagggccaaagactaggcccctcttcagagcccaccttgctgggtgatctctaggacccaggagcagagtggtggacaggaccatgccctcctcagaactggagctgccacaggggcagttgatgaggcagaggtttgaggatcccccctctgctaccagccccagtatcaccttccccatgctcttgtggctgtggactaagggagaaggattaaggggtatggctgaattcccccggcaccccttgccctcaggcttccttcttcctttccctttggttaatcctgcatgggattagctgaccatcctgttttccatcccagagcctcccaaggctgggaaagtagggctgaagggctagatgtttggtctcaggaagtggggcccacccattcccagaaggagcttctttacctcttagccctgaggtttcctccttcccatcttctgtgcttccagagaacaactttgttcctatggtcacccccactatccccatgaccgcatgaagaggcagttattgctttagtctttcattgcaaccactgggctccctttgaacccggcccaatctttggtcccagcattttcccactccagtgtatccagggtgttccaggtgagctggggaaggaagtgagcatggcctcagctgcagatctcctggagcagcggcatcatggcagacaggccctggatgtgctggatttggtacccgtaggcctcattaatgctccggagctcagccagcaggcctagcaacttcgcatacagaaacctttggaggaagtagtggggttgccaggaaaacaggagggaaataaggcagttgggagtcttgtctctaggccctgatcccctgaactattcctcagtgaagccaggtctgaacattagagaaaatcatgctctggtatgacagactatcagaggttccaaaggtcctccagggggcctcggtctgacactgtcttctctcaccatgctcagttttttctgaacccagagctctgagagccgagtgtgaagaaagctccagacttggccagaactccaaccatgtggaatctgagggcctggccttctagagcaggttctagaaggtggatgtgttctatggtataaagcatcccctttctggccaaactagctcttggaggaacgagcaaaacagaagcggtgcatacctcagagcctggataaatcacagactattgaacctggaactggctttgaccatgaaactgtgaatggccctaacttcaagggaaatgagaaatcgaaggaattggcccaatggcgaggagaggaaaggccaagggaagagaaaagtctgcgttagtctggagaagttggactagtgaggtaatggatgtcatcaatctcaggaatgctattacccagagcctctgagctactactttgcatctgtactgaataaaaaaaaaatctggaaaaa

SEQ ID NO: 192982 - DNA, 2807 bp, Homo sapiens
  Payload ID: 18098
  Gene Name: translocase of outer mitochondrial membrane 40 homolog (yeast)-like
  Uniprot ID: Q969M1
  ENST ID: ENST00000545897
  CDS Start-End: 334-1158
tttcattgattgggcggggcccaatcagggttgggttgggtctttgacagctttctttgccagattcaaagatggcgcttacggccacgctaagaatgcagcgtgaagctgcagttctgccatcactcaagatggctgcccccatcaagatgaccggggtgtgccggggggaaaggggcagcatgatggtctgagatggtgtagcgtcggaccatgtggaagtttctgaggctggggagccggataatggggggtggggcccgttggggggtaaaggggcaatagcgtcctttcacaggctaacctcggctcttcccagtcctctggactaaaatggggaacacattgggcctggcaccaatggggactttgccccgccggagcccccgccgagaggaacccctgcccaaccctgggagcttcgatgagctgcaccgtctatgcaaagatgtattcccagcacagatggagggagtgaagctcgttgtcaacaaggttctgagcagccatttccaggtggcgcacactatacacatgagtgccctgggcttgccgggatatcacctccatgcggcctatgcaggggattggcagctcagtcccactgagacgcagcaggccaagttcctgacatggcagtttgatggcgagtatcggggagatgactacacagccactctgaccctaggaaatcctgacctgattggggagtcggtgatcatggttgctcacttcctgcagagcctcactcatcggctggtgctgggaggagagctagtttatcaccggcggccaggcgaagagggggccatcttgacactggctgggaagtactcggctgtacactgggtagctacattgaatgtgggatcaggcggggcccatgcaagttactaccacagggcaaatgaacaggttcaggttggagtggagtttgaggcaaacacaaggctacaagacacaacattctcctttggttaccacctgactctgccccaggccaacatggtatttagaggcttggtggatagtaactggtgtgtaggtgctgtgctggagaagaagatgccccctctgcctgtcaccctagcccttggagccttcctcaatcactggcgcaacagattccattgtggcttcagcatcactgtgggctgaggttgtccagagccagcccccacagcagctggaacctctgagtcaggtgccctagggccaaagactaggcccctcttcagagcccaccttgctgggtgatctctaggacccaggagcagagtggtggacaggaccatgccctcctcagaactggagctgccacaggggcagttgatgaggcagaggtttgaggatcccccctctgctaccagccccagtatcaccttccccatgctcttgtggctgtggactaagggagaaggattaaggggtatggctgaattcccccggcaccccttgccctcaggcttccttcttcctttccctttggttaatcctgcatgggattagctgaccatcctgttttccatcccagagcctcccaaggctgggaaagtagggctgaagggctagatgtttggtctcaggaagtggggcccacccattcccagaaggagcttctttacctcttagccctgaggtttcctccttcccatcttctgtgcttccagagaacaactttgttcctatggtcacccccactatccccatgaccgcatgaagaggcagttattgctttagtctttcattgcaaccactgggctccctttgaacccggcccaatctttggtcccagcattttcccactccagtgtatccagggtgttccaggtgagctggggaaggaagtgagcatggcctcagctgcagatctcctggagcagcggcatcatggcagacaggccctggatgtgctggatttggtacccgtaggcctcattaatgctccggagctcagccagcaggcctagcaacttcgcatacagaaacctttggaggaagtagtggggttgccaggaaaacaggagggaaataaggcagttgggagtcttgtctctaggccctgatcccctgaactattcctcagtgaagccaggtctgaacattagagaaaatcatgctctggtatgacagactatcagaggttccaaaggtcctccagggggcctcggtctgacactgtcttctctcaccatgctcagttttttctgaacccagagctctgagagccgagtgtgaagaaagctccagacttggccagaactccaaccatgtggaatctgagggcctggccttctagagcaggttctagaaggtggatgtgttctatggtataaagcatcccctttctggccaaactagctcttggaggaacgagcaaaacagaagcggtgcatacctcagagcctggataaatcacagactattgaacctggaactggctttgaccatgaaactgtgaatggccctaacttcaagggaaatgagaaatcgaaggaattggcccaatggcgaggagaggaaaggccaagggaagagaaaagtctgcgttagtctggagaagttggactagtgaggtaatggatgtcatcaatctcaggaatgctattacccagagcctctgagctactactttgcatctgtactgaataaaaaaaaaatctggaaaaagtgagatgaaacagcagtatccaaatacagcaatttggatgctgaaacgatgtgagacagggatggccagggggaaggactagaccccacgatacctgaattccctaaggaaaggacagtaaaaaaacattcctccc

SEQ ID NO: 192983 - DNA, 751 bp, Homo sapiens
  Payload ID: 18099
  Gene Name: translocase of outer mitochondrial membrane 5 homolog (yeast)
  Uniprot ID: Q8N4H5
  ENST ID: ENST00000321301
  CDS Start-End: 111-266
ggcaacgagagggcgggaacaggaagtgaggataggccgagttccgggcgcgaggcggccaccgtggagagcagagcgcggcggctggaagctgctaagtcagagccgcgatgttccggattgagggcctcgcgccgaagctggacccggaggagatgaaacggaagatgcgcgaggatgtgatctcctccatacggaactttctcatctacgtggccctcctgcgagtcactccatttatcttaaagaaattggacagcatatgaagacaggacatcacatatgaatgcacgatatgaagagcctggttacagtttcgactcctctctgcaagtgaataggcccagaaaggtgtaagagactctttgaatggacataaaattctgcttgttaagaacaagtttggctctggtaactgaccttcaaagctaaaatataaaactatttgggaagtatgaaacgatgtctcgtgatctggtgtacccttatccctgtgacgtttggcctctgacaatactggtataattgtaaataatgtcaaactccgttttctagcaagtattaagggagctgtgtctgaaatggcactgtcttgtcagtcatttctgtttacctttttcttctgcccagagtgtatttgtgaagagtctcttatattatgttttgtggaaatcagcacacaaccacaatgacatttaagcacaggatcattattagtctatgtttttaataaacatatcaattaagaaaa

SEQ ID NO: 192984 - DNA, 808 bp, Homo sapiens
  Payload ID: 18099
  Gene Name: translocase of outer mitochondrial membrane 5 homolog (yeast)
  Uniprot ID: Q8N4H5
  ENST ID: ENST00000377773
  CDS Start-End: 66-323
gggcgcgaggcggccaccgtggagagcagagcgcggcggctggaagctgctaagtcagagccgcgatgttccggattgagggcctcgcgccgaagctggacccggaggagatgaaacggaagatgcgcgaggatgtgatctcctccatacggaactttctcatctacgtggccctcctgcgagtcagtgagtgtctcccgggctgtgactgtgagaccagcggggagctcaccgacgggcaccccttaactctaaggggtcatcggggccttcgaactgagctgaacgctccatttatcttaaagaaattggacagcatatgaagacaggacatcacatatgaatgcacgatatgaagagcctggttacagtttcgactcctctctgcaagtgaataggcccagaaaggtgtaagagactctttgaatggacataaaattctgcttgttaagaacaagtttggctctggtaactgaccttcaaagctaaaatataaaactatttgggaagtatgaaacgatgtctcgtgatctggtgtacccttatccctgtgacgtttggcctctgacaatactggtataattgtaaataatgtcaaactccgttttctagcaagtattaagggagctgtgtctgaaatggcactgtcttgtcagtcatttctgtttacctttttcttctgcccagagtgtatttgtgaagagtctcttatattatgttttgtggaaatcagcacacaaccacaatgacatttaagcacaggatcattattagtctatgtttttaataaacatatcaattaagaaaa

SEQ ID NO: 192985 - DNA, 789 bp, Homo sapiens
  Payload ID: 18099
  Gene Name: translocase of outer mitochondrial membrane 5 homolog (yeast)
  ENST ID: ENST00000401811
  CDS Start-End: 73-369
gagttccgggcgcgaggcggccaccgtggagagcagagcgcggcggctggaagctgctaagtcagagccgcgatgttccggattgagggcctcgcgccgaagctggacccggaggagatgaaacggaagatgcgcgaggatgtgatctcctccatacggaactttctcatctacgtggccctcctgcgagtcagtgagtgtctcccgggctgtgactgtgagaccagcggggagctcaccgacgggcaccccttaactctaaggggtcatcggggccttcgaactgagctgaacggtagcggggagcaaggaggctccatttatcttaaagaaattggacagcatatgaagacaggacatcacatatgaatgcacgatatgaagagcctggttacagtttcgactcctctctgcaagtgaataggcccagaaaggtgtaagagactctttgaatggacataaaattctgcttgttaagaacaagtttggctctggtaactgaccttcaaagctaaaatataaaactatttgggaagtatgaaacgatgtctcgtgatctggtgtacccttatccctgtgacgtttggcctctgacaatactggtataattgtaaataatgtcaaactccgttttctagcaagtattaagggagctgtgtctgaaatggcactgtcttgtcagtcatttctgtttacctttttcttctgcccagagtgtatttgtgaagagtctcttatattatgttttgtggaaatcagcacacaaccacaatgacatttaagcacagg

SEQ ID NO: 192986 - DNA, 635 bp, Homo sapiens
  Payload ID: 18099
  Gene Name: translocase of outer mitochondrial membrane 5 homolog (yeast)
  Uniprot ID: Q8N4H5
  ENST ID: ENST00000544379
  CDS Start-End: 65-343
ggcgcgaggcggccaccgtggagagcagagcgcggcggctggaagctgctaagtcagagccgcgatgttccggattgagggcctcgcgccgaagctggacccggaggagatgaaacggaagatgcgcgaggatgtgatctcctccatacggaactttctcatctacgtggccctcctgcgagtcagtgagtgtctcccgggctgtgactgtgagaccagcggggagctcaccgacgggcaccccttaactctaaggggtcatcggggccttcgaactgagctgaacggtagcggggagcaaggagggtgcgcgttgaaggcgacgggcatatgcgcggtttgagctccatttatcttaaagaaattggacagcatatgaagacaggacatcacatatgaatgcacgatatgaagagcctggttacagtttcgactcctctctgcaagtgaataggcccagaaaggtgtaagagactctttgaatggacataaaattctgcttgttaagaacaagtttggctctggtaactgaccttcaaagctaaaatataaaactatttgggaagtatgaaacgatgtctcgtgatctggtgtacccttatccctgtgacgtttggcctctgacaatactggta

SEQ ID NO: 192987 - DNA, 3071 bp, Homo sapiens
  Payload ID: 18099
  Gene Name: translocase of outer mitochondrial membrane 5 homolog (yeast)
  ENST ID: ENST00000540941
  CDS Start-End: 1-216
gaggatgtgatctcctccatacggaactttctcatctacgtggccctcctgcgagtcagtgagtgtctcccgggctgtgactgtgagaccagcggggagctcaccgacgggcaccccttaactctaaggggtcatcggggccttcgaactgagctgaacggtagcggggagcaaggagggtgcgcgttgaaggcgacgggcatatgcgcggtttgagctccatttatcttaaagaaattggacagcatatgaagacaggacatcacatatgaatgcacgatatgaagagcctggttacagtttcgactcctctctgcaagtgaataggcccagaaagttatttcccattgagctggtcattgctcagagaacaaagactcttccaatctcccaagtgctgaatgaggccctgccaacgttctgggattcaaaggaatagggctgtggtgaggctcaggacagacaggtttatatcttaaaacaaaaacctttaccgtcatttaatgggatttttgggagggagtggaggtaggtatacgtgcttcatctaccatcttaacctggaaagcatgtattttaattctgtggttttgtatttatttcttaaattaagaaggtgtagtgtatggcactgtggtcatatgaatactggctctaaagacaggcagacttgattttgaatgttggctccaatacttacgagatgggtgattttcagcaagtgagctccgaatctcattttctttaactataaaattaggataatagaaacatctctctacttcaaagtgtcgtaaggattaagtgaaaaaatgcaagtagagcagctggcacaattgcttgacatttggtaaatgttattaatggctagtctttggtataaggcatttagaagtgatttgtgctggcattcacagcatagacagatctcattcctatttccagatgctctgagatagcatactcatcctctaattgtgtacaaacttcaaacttaccaaacacttaagttcattatctaaaaatagccttaaccaatcaataataatgccattttacaggtggagaggttgagactgcaagtttcagtggccaatgagtagcagctggccaaggcctaggggactttttttttttttttcatttaaaaaaattatttctagtcagtctgtgcttatccaggggacttttaatgtttatttattccttgtaccccatccttacatgcttttcttggaggaaaatagtgtaattgttaccctggattctagtgtatgttcaggctggagtaagagaaaatgtgatggttcagtttttgtgaccagctttttaactttcaggccataaacgccacagaggggctcaatacttggaataagcagttctaaaatagtacattaagaaacagttggggagatatatacagtttgtttgtttgaatatgtaacatgaaataagaaagaaccatagcaaatttgagtttggtaaactcttgaaaggggtacgttgaaagaaatggggatagtgaaaaatgtttattctccacaaacaggttaccagcttagtaggaatgctgctcctaagttaaggtagtgtacttcctgctgtcagtgcaacattaaaaaaaaaaactgctttatcattgctctttatagttcttctgtggagtaagttagcattacagttaacatgttcagcagttcacaggctggaaaatttgggcctacatttggaatgaagaacaagtacaggaatcaggacttcttgttctcttccccctctttgcttgagctaagcttgtctcttacaagatccaggcaccattctttttactctattttgcttttatagcttgatcatgtcataaattctgcatgtagctcagtcgtcaagccactaaagcaggggttggcaagctttctgttaggggcaaatggtaaatattttaggctttgtgggctcttacgatctctcagctgccaactgcagttggtagtatgaaagcagccagggacaatatgcaaatgagtgggtgtggctgtgtcccaataaaactttatttacagaaaagatggctggccggatttgtcctacaggacaccttctaaagtaaagagtaaaatttggctaagtgtgaaatggtcaccaaatcacttttattactttaaagatgttcattttatcatagatcaaagccctgagattacaaattcattcatcagcgttactgagttcctgctatgtgccaggcactgtgctaggagttgaggatatggacgggcagggggactgcctttttgaggtctataatctgccataagatgccatgtgagtaaatatctcaaagacctgaaaaccttgctggaggctcagagagaacttacctgaaaacatgacatttaaaggaacctgaagggataggtccaggttatctagggtgactaggtaaagggagggtcaggcaaagatcatgttgatcaaggtggggagttcagaattgtccacttaaaacaatattggatgcaatatgggtactgtatttgaaggagaggtcagaggggtatatgagcagctcagcatttatttagatacgtgtagtgaggaaagaaaggcatcaaagaagactccctgatttctggtttaagtgcagggttgacggtgccattcgctgaagtaaggaacaagtttcaaggggaaaataatgggttcgattttgagcctgggaggcagtagggaggactcccttaggaagagacacataaagtaaggtttgggtgaataggaattggccagatagagcggggcatctttgaaaaagtgttaaagcagatgtatttgaggaagaaagaccagtgtgactgaagtgtgttgtgcacagaagagcaagaaagcctcagtccttccagaaactcctgttatttattgtgttttcatacttgagtcttaagagattccattctgacatctgctggctattgtgtatactgcagttccaaattccactacacaagaacaacctttaataacgtattttttgaaatttgtcataataaatttgagataaaacacaa

SEQ ID NO: 192988 - DNA, 595 bp, Homo sapiens
  Payload ID: 18100
  Gene Name: translocase of outer mitochondrial membrane 6 homolog (yeast)
  Uniprot ID: Q96B49
  ENST ID: ENST00000398881
  CDS Start-End: 34-258
tcctccaccgaggcccatgcgaagctttccactatggcttccagcactgtcccggtgagcgctgctggctcggctaatgaaactcccgaaataccggacaacgtgggagattggcttcggggcgtctaccgctttgccactgataggaatgacttccggaggaacttgatactaaatttgggactctttgctgcgggagtttggctggccaggaacttgagtgacattgacctcatggcacctcagccaggggtgtagccaagtagacaaatggaatcctgtgctgaacccgaatcttccaaaaaacagcctacaatctgtgaccaccacaagatgtgccctgatggcagctgaagtttgattcagatgggcacttttcttccccttccctgcctagtttccttttgttccttgagtccacgcagaattccattctctggtcagcagacaggcttaagctaaagtattgcctctattctgtaaagttctgtacatagttcccaagcttctgcagggggtgatttttgctcttgtcctgagaaataacagtgctgttttaaaaaacatttgaaataaataccgcacacaaaggcag

SEQ ID NO: 192989 - DNA, 637 bp, Homo sapiens
  Payload ID: 18100
  Gene Name: translocase of outer mitochondrial membrane 6 homolog (yeast)
  Uniprot ID: Q96B49
  ENST ID: ENST00000398884
  CDS Start-End: 37-261
ggttcctccaccgaggcccatgcgaagctttccactatggcttccagcactgtcccggtgagcgctgctggctcggctaatgaaactcccgaaataccggacaacgtgggagattggcttcggggcgtctaccgctttgccactgataggaatgacttccggaggaacttgatactaaatttgggactctttgctgcgggagtttggctggccaggaacttgagtgacattgacctcatggcacctcagccaggggtgtagccaagtagttctaatgccacctgtcgtcttatcatctgattgcagacaaatggaatcctgtgctgaacccgaatcttccaaaaaacagcctacaatctgtgaccaccacaagatgtgccctgatggcagctgaagtttgattcagatgggcacttttcttccccttccctgcctagtttccttttgttccttgagtccacgcagaattccattctctggtcagcagacaggcttaagctaaagtattgcctctattctgtaaagttctgtacatagttcccaagcttctgcagggggtgatttttgctcttgtcctgagaaataacagtgctgttttaaaaaacatttgaaataaataccgcacacaaaggcagtc

SEQ ID NO: 192990 - DNA, 778 bp, Homo sapiens
  Payload ID: 18101
  Gene Name: translocase of outer mitochondrial membrane 7 homolog (yeast)
  Uniprot ID: Q9P0U1
  ENST ID: ENST00000358435
  CDS Start-End: 73-240
ctcctttccctttcggattcccgacgctgtggttgctgtaaggggtcctccctgcgccacacggccgtcgccatggtgaagctgagcaaagaggccaagcagagactacagcagctcttcaaggggagccagtttgccattcgctggggctttatccctcttgtgatttacctgggatttaagaggggtgcagatcccggaatgcctgaaccaactgttttgagcctactttggggataaaggattatttggtcttctggatttggaggcaatcagcggacagcatggaagatgtgtgctctggctcggataagagatgggacatcattcagtcactagttggatggcacaaggctcttcacagacgcatctgtagcagagtggaacttgtactaacttatgatagaatgtatcagaataaatgtttttaacagtgttatgcttgagtcttttttgaattgaacatgctaggattatcaggtaaaaattaagccttttggtactttctcaaaacagggaatttatgtgtgtacctaggtgctatttaagcctgtaaatcccagcactttgggaggccagggcgggtggatcacgatataaaaaaatttttccaagttattcctgcccattgacctaacatatggattacagtttccctttgcagtgaattaataactccttctaggatattccgaggtagtaagaatacagatagttctgtttgtgacaaaccaagctgttacttcctcctctgcattaaagttctgactgcaagaaa

SEQ ID NO: 192991 - DNA, 514 bp, Homo sapiens
  Payload ID: 18101
  Gene Name: translocase of outer mitochondrial membrane 7 homolog (yeast)
  ENST ID: ENST00000372879
  CDS Start-End: 13-390
acggccgtcgccatggtgaagctgagcaaagaggccaagcagagactacagcagctcttcaaggggagccagtttgccattcgctggggctttatccctcttgtgatttacctgggatttaagaggggtgcagatcccggaatgcctgaaccaactgttttgagggtgtggtggctcacacctgtaatctcagcactttggaaagccaaggtgggaagatcatgggaggattgcttgaagctaggagttcaagaccagcctgggcaacgtagcgagacccatctctaccaaaaaaaaaaaacctactttggggataaaggattatttggtcttctggatttggaggcaatcagcggacagcatggaagatgtgtgctctggctcggataagagatgggacatcattcagtcactagttggatggcacaaggctcttcacagacgcatctgtagcagagtggaacttgtactaacttatgatagaatgtatcagaataaatgtttttaacagtgt

SEQ ID NO: 192992 - DNA, 455 bp, Homo sapiens
  Payload ID: 18101
  Gene Name: translocase of outer mitochondrial membrane 7 homolog (yeast)
  ENST ID: ENST00000405021
  CDS Start-End: 101-256
tctcggggtgtttttcctcaccgctccatgtggtcctaagtggaaagagtcctgttcagggaatcgagacacctcgtgaaagtaccactgccatgaaagcatgattataataatagtcgttggatgcctctgctttcttacctgtacgatgaagggtttggatgatttctattactgcccccattttacaggatttaagaggggtgcagatcccggaatgcctgaaccaactgttttgagcctactttggggataaaggattatttggtcttctggatttggaggcaatcagcggacagcatggaagatgtgtgctctggctcggataagagatgggacatcattcagtcactagttggatggcacaaggctcttcacagacgcatctgtagcagagtggaacttgtactaacttatgatagaatgtatcagaataaatgtttttaacagtgtta

SEQ ID NO: 192993 - DNA, 241 bp, Homo sapiens
  Payload ID: 18101
  Gene Name: translocase of outer mitochondrial membrane 7 homolog (yeast)
  ENST ID: ENST00000621567
  CDS Start-End: 74-241
cctcctttccctttcggattcccgacgctgtggttgctgtaaggggtcctccctgcgccacacggccgtcgccatggtgaagctgagcaaagaggccaagcagagactacagcagctcttcaaggggagccagtttgccattcgctggggctttatccctcttgtgatttacctgggatttaagaggggtgcagatcccggaatgcctgaaccaactgttttgagattgtcatgggattaa

SEQ ID NO: 192994 - DNA, 4409 bp, Homo sapiens
  Payload ID: 18102
  Gene Name: translocase of outer mitochondrial membrane 70 homolog A (S. cerevisiae)
  Uniprot ID: O94826
  ENST ID: ENST00000284320
  CDS Start-End: 450-2276
cttgagcgcccttagcccgctgtatacgcgcccctcctcggcttcagtaggcaagagggccatctgcccttctttcctgaaggtagaggggacaacaccagctacgacggggactccagaagtccatctcccgaacagcagcggggcgaaaagaaagaaaaagggtttccgaagactcctactcacacccacgctttcccttaacccggaagtgatttccgcccctcctctccctcttcggttgatactggaggagaaggacggccaggtctggcccggcatgccctgggcttccggtgacctctggcccttttctgtcgtccgctctctctgcctagcgtgctcgctcgctcattgctttccttccctccctcggtcttccttcgcacgctgtttggtgattgtggcgctcgcgacagacagggaggcggtggcagaggacacttgtcatggccgcctctaaacctgtggaggcagcggtggtcgcagccgctgtaccgagctccgggagtggggtgggcggcggcgggactgcgggcccgggcacgggggggctgccgcgatggcagctggctctggcggtcggggcacccctgctgctgggcgcgggtgccatatacctgtggagtcggcagcaacggcgccgggaggccagaggccggggcgacgccagcggcctgaagcgcaacagcgaacggaagaccccggagggcagggccagtccggccccgggcagcggacaccctgaaggtcccggtgctcacttggacatgaactctcttgatagagcccaagcagccaagaataaaggcaataaatattttaaagcaggaaaatatgaacaagctattcagtgctatactgaggctattagcttgtgccctacagagaagaatgttgacctttctacattttatcaaaacagagctgctgcctttgaacagttgcaaaaatggaaagaagtggcacaagactgtacaaaagctgttgaacttaatcccaaatatgtgaaagctctctttagacgtgcaaaagcccatgagaagctagacaataagaaggaatgtttagaagatgtcactgctgtgtgtatattagaagggttccaaaatcaacaaagcatgctgttagccgataaagttcttaaactccttggaaaagagaaagccaaagaaaaatataagaatcgtgaacctctgatgccatctccacagtttatcaaatcttacttcagttctttcacggatgatatcatttcccagcccatgcttaaaggagagaaatctgatgaagataaagacaaggaaggggaggctttagaagtgaaagaaaattctggatacttaaaggccaaacagtatatggaagaagaaaactacgataaaatcataagtgaatgctcaaaagaaatagatgctgaaggcaaatacatggcagaagcattgctactacgagctaccttctacctgcttattggcaatgccaatgcagccaaaccagatttagataaagtcatcagtttgaaagaagctaatgtgaagcttcgagcaaatgctctcatcaaaagaggcagcatgtacatgcaacagcagcagcctttgctgtccactcaagattttaacatggctgctgacatcgatcctcagaatgcagatgtttatcaccaccgaggacagctgaaaatactccttgatcaagttgaagaagcagtggcagattttgatgaatgtattaggttaagacctgagtctgctctggcacaagcacagaaatgttttgcattgtaccgccaggcatatacgggaaacaactcttcacaaatccaagcagctatgaaaggttttgaagaggtcataaagaaatttccaaggtgtgccgaaggctatgcactatacgcccaggcattaacagatcaacaacagtttggtaaagctgatgaaatgtatgataaatgtattgatttggaaccagataatgctacaacatatgttcataaaggtttacttcaacttcagtggaagcaagatctggatagaggtttggaacttatcagcaaggctattgaaattgacaataaatgtgattttgcctatgaaaccatgggaactattgaagtacaaagaggaaacatggagaaagccattgacatgttcaacaaagctattaacctggccaaatcggaaatggagatggcccatctgtattcactttgcgatgccgcccatgcccagacagaagttgcaaagaaatacggattaaaaccaccaacattataaaacagggggaaagcagactgaccctctttttaaaagtttaccccctcttcaactgaaccctaaagacactgtcatgaactgtgttgaatggtggaaatcagtatttctgtttgtggtgttgttatttgttacatctgtttcatgtctaggtgttgtgggtgtggctgttgaaggaagtttgcagtcttgcagcttttattccctgtgcaacaaaagattagaacatgttaaagggatttttaaataaagttgcaaagagtacaaatgataattggccatgcaaataaaaactgatttgttgattttttttttaaggggggttggcagttgattatgttctggatgattccgtctatatatgtgtgaataatgtaagtattttacagcatgttgatttttaaattaacgtagtaaatgctgtaaaatagatttatattcagttaaccgctttcagttgattttttgaaagaaacaaaggttaaatgggggattaaagtaaaattgagagaccctttaaaccattgtcagcatgcacaatgcctctgattctgcagttttagaaacttggtggcacttattaatcctcttggcccctttccactctaatggatagtgtacattcttcttaaagtccacaacagcagattttcttgcagtaaattatgcagatgcaaaatattctaattgatatatgtgttggaagactgagtattgatgggggagtggaccagacaaagaggtaagatgaaacagtagtgtgtttataattgtctgtgactattttctataataattagtactatttaatggtgagcttttaaaaatgtaggatagagggtacagtggcactgtatatactatttatagtctcagctactagggaggctgaggcaagaggcttgagaccaggagctcgaggctgtaatgtgccatgatgattgcacctgcgaatagccactgcactccagcctgggcaatatagcaagaccccatcctttaaaaaattttagaacttttttaaaatcaaagtgcagattgcttgtatgtaaaacccaaataaaggtagagtaagtgtgatatatgggagtattaaaatagcttaaaatttctcgtgaaggacatgtggctaaagggtcaaaaaggatgtaagacttggagccagagcatagtatttcctgaaataacaagtttagtgctttaactatggctacatgtgcttaaggaattttgagccacttatttttgaagatgctgaggacatgtagagtgctttttgtagtgagctaaccttgatctctaaggactaactacccaggtccaggtcttcactaggggtactgacagtgtttaagctttactccacctccttacttagaaatcactttacgatttatttccattttccacttttatagaccatccttttgcttatatgctagatttttctggtgagggaagggttgtgttcttcaggggtcttttgttttgaaatactcaggatggggagaggtttatttaagaacgaattataattatggtttacactgttgggagtaaaggagcatttttacaccccttaagggtgcttaattctgttgaaaccaaaaagatttgtctacaaatgctatcttttttagaaactattagaaatgactccctttcaaagtcaatctttggaaaatattgaggaggtcactaattagttggtgcagttaatataattcaagatgatttggatgatgggaagtttgagaccgctgcattttgtttttaaattatgcaccttctgataacccccaaatacagaaatgttctacatctctgaatgacctctgactttaaaaaagtttttatttgcatggctgtatttacattaacactgacattttcttctactcttctcccttctttcatcttggggttgggtagagaaacacaaaggaaactgaagcatgtgccattctatactgtcattccaaattctcatggactattgcctgttgtgaaaatgtttgaaactgcactgaaagctgcatctgtctgtatctttcttttgtaaatgacctcacatgtaaattcaccaaataaatattacattcaagctcttctatctattctttaaatagaaagata

SEQ ID NO: 192995 - DNA, 9708 bp, Homo sapiens
  Payload ID: 18103
  Gene Name: translocated promoter region, nuclear basket protein
  Uniprot ID: P12270
  ENST ID: ENST00000367478
  CDS Start-End: 298-7389
gcgcaagaggatcagggatagcctctgagctcgggttcccagggttcgtagcttccaacggctgcgcgcgcacttcggtcgcgggcggtgaggtgctgttgctgaaacgctgccgctgagggtggactcgatttcccagggtcccgccgcgggagtctccggcgggcgggcgcgcgcgagccaccgagcgaggtgatagaggcggcggcccaggcgtctgggtcctgctggtcttcgcctttcttctccgcttctaccccgtcggccgctgccactggggtccctggccccaccgacatggcggcggtgttgcagcaagtcctggagcgcacggagctgaacaagctgcccaagtctgtccagaacaaacttgaaaagttccttgctgatcagcaatccgagatcgatggcctgaaggggcggcatgagaaatttaaggtggagagcgaacaacagtattttgaaatagaaaagaggttgtcccacagtcaggagagacttgtgaatgaaacccgagagtgtcaaagcttgcggcttgagctagagaaactcaacaatcaactgaaggcactaactgagaaaaacaaagaacttgaaattgctcaggatcgcaatattgccattcagagccaatttacaagaacaaaggaagaattagaagctgagaaaagagacttaattagaaccaatgagagactatctcaagaacttgaatacttaacagaggatgttaaacgtctgaatgaaaaacttaaagaaagcaatacaacaaagggtgaacttcagttaaaattggatgaacttcaagcttctgatgtttctgttaagtatcgagaaaaacgcttggagcaagaaaaggaattgctacatagtcagaatacatggctgaatacagagttgaaaaccaaaactgatgaacttctggctcttggaagagaaaaagggaatgagattctagagcttaaatgtaatcttgaaaataaaaaagaagaggtttctagactggaagaacaaatgaatggcttaaaaacatcaaatgaacatcttcaaaagcatgtggaggatctgttgaccaaattaaaagaggccaaggaacaacaggccagtatggaagagaaattccacaatgaattaaatgcccacataaaactttctaatttgtacaagagtgccgctgatgactcagaagcaaagagcaatgaactaacccgggcagtagaggaactacacaaacttttgaaagaagctggtgaagccaacaaagcaatacaagatcatcttctagaggtggagcaatccaaagatcaaatggaaaaagaaatgcttgagaaaatagggagattggagaaggaattagagaatgcaaatgaccttctttctgccacaaaacgtaaaggagccatattgtctgaagaagagcttgccgccatgtctcctactgcagcagctgtagctaagatagtgaaacctgggatgaaactaactgagctctataatgcttatgtggaaactcaggatcagttgcttttggagaaactagagaacaaaagaattaataagtacctagatgaaatagtgaaagaagtggaagccaaagcaccaattttgaaacgccagcgtgaggaatatgaacgtgcacagaaagctgtagcaagtttatctgttaagcttgaacaagctatgaaggagattcagcgattgcaggaggacactgataaagccaacaagcaatcatctgtacttgagagagataatcgaagaatggaaatacaagtaaaagatctttcacaacagattagagtgcttttgatggaacttgaagaagcaaggggtaaccacgtaattcgtgatgaggaagtaagctctgctgatataagtagttcatctgaggtaatatcacagcatctagtatcttacagaaatattgaagagcttcaacaacaaaatcaacgtctcttagtggcccttagagagcttggggaaaccagagaaagagaagaacaagaaacaacttcatccaaaatcactgagcttcagctcaaacttgagagtgcccttactgaactagaacaactccgcaaatcacgacagcatcaaatgcagcttgttgattccatagttcgtcagcgtgatatgtaccgtattttattgtcacaaacaacaggagttgccattccattacatgcttcaagcttagatgatgtttctcttgcatcaactccaaaacgtccaagtacatcacagactgtttccactcctgctccagtacctgttattgaatcaacagaggctatagaggctaaggctgcccttaaacagttgcaggaaatttttgagaactacaaaaaagaaaaagcagaaaatgaaaaaatacaaaatgagcagcttgagaaacttcaagaacaagttacagatttgcgatcacaaaataccaaaatttctacccagctagattttgcttctaaacgttatgaaatgctgcaagataatgttgaaggatatcgtcgagaaataacatcacttcatgagagaaatcagaaactcactgccacaactcaaaagcaagaacagattatcaatacgatgactcaagatttgagaggagcaaatgagaagctagctgtcgcagaagtaagagcagaaaatttgaagaaggaaaaggaaatgcttaaattgtctgaagttcgtctttctcagcaaagagagtctttgttagctgaacaaagggggcaaaacttactgctaactaatctgcaaacaattcagggaatactggagcgatctgaaacagaaaccaaacaaaggcttagtagccagatagaaaaactggaacatgagatctctcatctaaagaagaagttggaaaatgaggtggaacaaaggcatacacttactagaaatctagatgttcaacttttagatacaaagagacaactggatacagagacaaatcttcatcttaacacaaaagaactattaaaaaatgctcaaaaagaaattgccacattgaaacagcacctcagtaatatggaagtccaagttgcttctcagtcttcacagagaactggtaaaggtcagcctagcaacaaagaagatgtggatgatcttgtgagtcagctaagacagacagaagagcaggtgaatgacttaaaggagagactcaaaacaagtacgagcaatgtggaacaatatcaagcaatggttactagtttagaagaatccctgaacaaggaaaaacaggtgacagaagaagtgcgtaagaatattgaagttcgtttaaaagagtcagctgaatttcagacacagttggaaaagaagttgatggaagtagagaaggaaaaacaagaacttcaggatgataaaagaagagccatagagagcatggaacaacagttatctgaattgaagaaaacactttctagtgttcagaatgaagtacaagaagctcttcagagagcaagcacagctttaagtaatgagcagcaagccagacgtgactgtcaggaacaagctaaaatagctgtggaagctcagaataagtatgagagagaattgatgctgcatgctgctgatgttgaagctctacaagctgcgaaggagcaggtttcaaaaatggcatcagtccgtcagcatttggaagaaacaacacagaaagcagaatcacagttgttggagtgtaaagcatcttgggaggaaagagagagaatgttaaaggatgaagtttccaaatgtgtatgtcgctgtgaagatctggagaaacaaaacagattacttcatgatcagatcgaaaaattaagtgacaaggtcgttgcctctgtgaaggaaggtgtacaaggtccactgaatgtatctctcagtgaagaaggaaaatctcaagaacaaattttggaaattctcagatttatacgacgagaaaaagaaattgctgaaactaggtttgaggtggctcaggttgagagtctgcgttatcgacaaagggttgaacttttagaaagagagctgcaggaactgcaagatagtctaaatgctgaaagggagaaagtccaggtaactgcaaaaacaatggctcagcatgaagaactgatgaagaaaactgaaacaatgaatgtagttatggagaccaataaaatgctaagagaagagaaggagagactagaacaggatctacagcaaatgcaagcaaaggtgaggaaactggagttagatattttacccttacaagaagcaaatgctgagctgagtgagaaaagcggtatgttgcaggcagagaagaagctcttagaagaggatgtcaaacgttggaaagcacgtaaccagcatctagtaagtcaacagaaagatccagatacagaagaatatcggaagctcctttctgaaaaggaagttcatactaagcgtattcaacaattgacagaagaaattggtagacttaaagctgaaattgcaagatcaaatgcatctttgactaacaaccagaacttaattcagagtctgaaggaagatctaaataaagtaagaactgaaaaggaaaccatccagaaggacttagatgccaaaataattgatatccaagaaaaagtcaaaactattactcaagttaagaaaattggacgtaggtacaagactcaatatgaagaacttaaagcacaacaggataaggttatggagacatcggctcagtcctctggagaccatcaggagcagcatgtttcagtccaggaaatgcaggaactcaaagaaacgctcaaccaagctgaaacaaaatcaaaatcacttgaaagtcaagtagagaatctgcagaagacattatctgaaaaagagacagaagcaagaaatctccaggaacagactgtgcaacttcagtctgaactttcacgacttcgtcaggatcttcaagatagaaccacacaggaggagcagctccgacaacagataactgaaaaggaagaaaaaaccagaaaggctattgtagcagcaaagtcaaaaattgcacacttagctggtgtaaaagatcagctaactaaagaaaatgaggagcttaaacaaaggaatggagccttagatcagcagaaagatgaattggatgttcgcattactgcgctaaagtcccaatatgaaggtcgaattagtcgcttggaaagagaactcagggagcatcaagagagacaccttgagcagagagatgagcctcaagaaccttctaataaggtccctgaacagcagagacagatcacattgaaaacaactccagcttctggtgaaagaggaattgccagcacatcagacccaccaacagccaatatcaagccaactcctgttgtgtctactccaagtaaagtgacagctgcagctatggctggaaataagtcaacacccagggctagtatccgcccaatggttacacctgcaactgttacaaatcccactactaccccaacagctacagtgatgcccactacacaagtggaatcacaggaagctatgcagtcagaagggcctgtggaacatgttccagtttttggaagcacaagtggatccgttcgttctactagtcctaatgtccagccttctatctctcaacctattttaactgttcagcaacaaacacaggctacagcttttgtgcaacccactcaacagagtcatcctcagattgagcctgccaatcaagagttatcttcaaacatagtagaggttgttcagagttcaccagttgagcggccttctacttccacagcagtatttggcacagtttcggctacccccagttcttctttgccaaagcgtacacgtgaagaggaagaggatagcaccatagaagcatcagaccaagtctctgatgatacagtggaaatgcctcttccaaagaagttgaaaagtgtcacacctgtaggaactgaggaagaagttatggcagaagaaagtactgatggagaggtagagactcaggtatacaaccaggattctcaagattccattggagaaggagttacccagggagattatacacctatggaagacagtgaagaaacctctcagtctctacaaatagatcttgggccacttcaatcagatcagcagacgacaacttcatcccaggatggtcaaggcaaaggagatgatgtcattgtaattgacagtgatgatgaagaagaggatgatgatgaaaatgatggagaacatgaggattatgaagaggatgaggaagatgatgatgatgatgaagatgacacagggatgggagatgagggtgaagatagtaatgaaggaactggtagtgccgatggcaatgatggttatgaagctgatgatgctgagggtggtgatgggactgatccaggtacagaaacagaagaaagtatgggtggaggtgaaggtaatcacagagctgctgattctcaaaacagtggtgaaggaaatacaggtgctgcagaatcttctttttctcaggaggtttctagagaacaacagccatcatcagcatctgaaagacaggcccctcgagcacctcagtcaccgagacgcccaccacatccacttcccccaagactgaccattcatgccccacctcaggagttgggaccaccagttcagagaattcagatgacccgaaggcagtctgtaggacgtggccttcagttgactccaggaataggtggcatgcaacagcatttttttgatgatgaagacagaacagttccaagtactccaactcttgtggtgccacatcgtactgatggatttgctgaagcaattcattcgccgcaggttgctggtgtccctagattccggtttgggccacctgaagatatgccacaaacaagttctagtcactctgatcttggccagcttgcttctcaaggaggtttaggaatgtatgaaacacccctgttcctagctcatgaagaagagtcaggtggccgaagtgttcccactactccactacaagtagcagccccagtgactgtatttactgagagcaccacctctgatgcttcggaacatgcctctcaatctgttccaatggtgactacatccactggcactttatctacaacaaatgaaacagcaacaggtgatgatggagatgaagtatttgtggaggcagaatctgaaggtattagttcagaagcaggcctagaaattgatagccagcaggaagaagagccggttcaagcatctgatgagtcagatctcccctccaccagccaggatcctccttctagctcatctgtagatactagtagtagtcaaccaaagcctttcagacgagtaagacttcagacaacattgagacaaggtgtccgtggtcgtcagtttaacagacagagaggtgtgagccatgcaatgggagggagaggaggaataaacagaggaaatattaattaaatggtctgtaaacaataacaactgtgaataagattatcaaatctgttttagtgtaatgattgtcaagtttaaaaacatttttatatataaactggtatactcatgtcaatattctttattaataaaatgtttttcagtgtcaaaatttattattcatttcttcattagttgactcctcctttgctcatcagtctaaggacagttgtaccagactttggataaggtctgcccagaacgagtagtaattgctcttgctgttctactaggcacatcaatgttatagtattgatctaaatggaagagaaaacatttttttagttaaaaagaaaacaatgcccaaactaaaaaataacttatgttgactattatgctcaaagacaatgtttatcattttaatagagatgtttttactaattaatttgaactttataacaaaaagaaaaacaattgcctagacttttcagcttttttgatgtttcaaaagattgacatttcaccatctttttgtaaaatcaggttcagctctcctttatgaagtaaacattaaagagtaaccaagtttgaaaaataatttacttggggttattccttttaaaaaatacatgccaatgtcattcatattatgaaattacaggcagaataacttagatttctgggcatttcaaagaaaagcatcctgagtaatataatttaattaataaaattagtttctcaggaacttctttctgatcttacagactctgcagtgatgcaaatcattataaccttgtgccaaacaaggtatctgttaaatgccacaaatgatagaagtaaaatactattgtcagtagcaagtttactctagtaactggatgttttatcgtaatctcatgaaggttagagcagaattgaattgcagtgccatcattttaattgaaattaaagcaaaagtcttaactcttttccacagcaattagaataagtaccgtagtgtaacttctcacattcagtcatcattgcagccagcatttttactttatcttcatgttttcacaaatgatatcacctccttgggaaactgttagttaataccttacctttagaaaaggcatagtaatcatagccgtcaggttttctgatgttgggcagtgatatagctgaggtaaccacatttggaagtcctctccacagtatactcactttaacttcattatgaaggacacctgtaagtggcatgtttaataaaagataccagattaaaaggcaatgtactatcttggaaagagccagacatctgagttttaatctcagttttagccctctgatgtagaactattgagggttatagactggtatataatgttcttggtaagaagtacttgataaatagtattggttataactaacaaacctgaacaaactgctttacttacccacaaggaaaaagaaagtattggtctttggttattcactaaggcaagtggatgagtttttcatcagtaagcttaaattattagggctgtttgatcagtatccatatttcataagccttactgtataagaaactgtattacatctacttatgtttaaggatttttttaacacaataaaaatgttacctttgtcttgataagccagtctggcaggtgaatattgaattctgatggtgtgtgtttgagaaggtcctatagcacgttcaaagcgacgtctcctaacctgtgtcgtttctccatacactggataatttagagcaggccttcttccagggcacttctgtacaggttcctgtttataaatatactgctgaatgctgccacctgttatgtattagaatatcacatggaaaatgaaaattaattttaataccctcagaaaaggtggaaaacaacttttacaatgtataggaaacagttttgttctcatttttcatataatatattgatattaataatggctattagtcaagggtattataaaaataattattaaactgaaatacttgttgaatgaatagatgcagcaaattacatagttatatatttaatttcaattgaaagtgacaagtgctcagtttggcagcacatatactaaaactggaatgatacagagattagcatggcccttgtgcaaggatgacatgcacatttgtgaagcgaaagtaaatgacattctatcagtgacctgaaaactcaaatgaattgtgacttgcctgtgaagaaatgaaaataaaaattgagggcaataagaatactaccctcaatattgatttttttcactgaaaatatttgatttcagccattaaagatatcttttgacagtaaagtcaataataaatgaaaa

SEQ ID NO: 192996 - DNA, 515 bp, Homo sapiens
  Payload ID: 18103
  Gene Name: translocated promoter region, nuclear basket protein
  ENST ID: ENST00000451586
  CDS Start-End: 66-515
ccttctgggcgccatagagagcgtggcggtatcccggagcctgccgtccggccctaccgggaccgatgccctctagtggctcagtgtccagaagccgccaacgaggacgatccatggcatcccggggctttgacgggtcccgccgcgggagtctccggcgggcgggcgcgcgcgagccaccgagcgaggtgatagaggcggcggcccaggcgtctgggtcctgctggtcttcgcctttcttctccgcttctaccccgtcggccgctgccactggggtccctggccccaccgacatggcggcggtgttgcagcaagtcctggagcgcacggagctgaacaagctgcccaagtctgtccagaacaaacttgaaaagttccttgctgatcagcaatccgagatcgatggcctgaaggggcggcatgagaaatttaaggtggagagcgaacaacagtattttgaaatagaaaagaggttgtcccacagtcaggagagacttgtgaatgaaacccgagag

SEQ ID NO: 192997 - DNA, 2478 bp, Homo sapiens
  Payload ID: 18103
  Gene Name: translocated promoter region, nuclear basket protein
  Uniprot ID: P12270
  ENST ID: ENST00000613151
  CDS Start-End: 298-2478
gcgcaagaggatcagggatagcctctgagctcgggttcccagggttcgtagcttccaacggctgcgcgcgcacttcggtcgcgggcggtgaggtgctgttgctgaaacgctgccgctgagggtggactcgatttcccagggtcccgccgcgggagtctccggcgggcgggcgcgcgcgagccaccgagcgaggtgatagaggcggcggcccaggcgtctgggtcctgctggtcttcgcctttcttctccgcttctaccccgtcggccgctgccactggggtccctggccccaccgacatggcggcggtgttgcagcaagtcctggagcgcacggagctgaacaagctgcccaagtctgtccagaacaaacttgaaaagttccttgctgatcagcaatccgagatcgatggcctgaaggggcggcatgagaaatttaaggtggagagcgaacaacagtattttgaaatagaaaagaggttgtcccacagtcaggagagacttgtgaatgaaacccgagagtgtcaaagcttgcggcttgagctagagaaactcaacaatcaactgaaggcactaactgagaaaaacaaagaacttgaaattgctcaggatcgcaatattgccattcagagccaatttacaagaacaaaggaagaattagaagctgagaaaagagacttaattagaaccaatgagagactatctcaagaacttgaatacttaacagaggatgttaaacgtctgaatgaaaaacttaaagaaagcaatacaacaaagggtgaacttcagttaaaattggatgaacttcaagcttctgatgtttctgttaagtatcgagaaaaacgcttggagcaagaaaaggaattgctacatagtcagaatacatggctgaatacagagttgaaaaccaaaactgatgaacttctggctcttggaagagaaaaagggaatgagattctagagcttaaatgtaatcttgaaaataaaaaagaagaggtttctagactggaagaacaaatgaatggcttaaaaacatcaaatgaacatcttcaaaagcatgtggaggatctgttgaccaaattaaaagaggccaaggaacaacaggccagtatggaagagaaattccacaatgaattaaatgcccacataaaactttctaatttgtacaagagtgccgctgatgactcagaagcaaagagcaatgaactaacccgggcagtagaggaactacacaaacttttgaaagaagctggtgaagccaacaaagcaatacaagatcatcttctagaggtggagcaatccaaagatcaaatggaaaaagaaatgcttgagaaaatagggagattggagaaggaattagagaatgcaaatgaccttctttctgccacaaaacgtaaaggagccatattgtctgaagaagagcttgccgccatgtctcctactgcagcagctgtagctaagatagtgaaacctgggatgaaactaactgagctctataatgcttatgtggaaactcaggatcagttgcttttggagaaactagagaacaaaagaattaataagtacctagatgaaatagtgaaagaagtggaagccaaagcaccaattttgaaacgccagcgtgaggaatatgaacgtgcacagaaagctgtagcaagtttatctgttaagcttgaacaagctatgaaggagattcagcgattgcaggaggacactgataaagccaacaagcaatcatctgtacttgagagagataatcgaagaatggaaatacaagtaaaagatctttcacaacagattagagtgcttttgatggaacttgaagaagcaaggggtaaccacgtaattcgtgatgaggaagtaagctctgctgatataagtagttcatctgaggtaatatcacagcatctagtatcttacagaaatattgaagagcttcaacaacaaaatcaacgtctcttagtggcccttagagagcttggggaaaccagagaaagagaagaacaagaaacaacttcatccaaaatcactgagcttcagctcaaacttgagagtgcccttactgaactagaacaactccgcaaatcacgacagcatcaaatgcagcttgttgattccatagttcgtcagcgtgatatgtaccgtattttattgtcacaaacaacaggagttgccattccattacatgcttcaagcttagatgatgtttctcttgcatcaactccaaaacgtccaagtacatcacagactgtttccactcctgctccagtacctgttattgaatcaacagaggctatagaggctaaggctgcccttaaacagttgcaggaaatttttgagaactacaaaaaagaaaaagcagaaaatgaaaaaatacaaaatgagcagcttgagaaacttcaagaacaagttacagatttgcgatcacaaaataccaaaatttctacccagctagattttgcttctaaacgttacttgtag

SEQ ID NO: 192998 - DNA, 2785 bp, Homo sapiens
  Payload ID: 18104
  Gene Name: translocation associated membrane protein 1
  Uniprot ID: Q15629
  ENST ID: ENST00000262213
  CDS Start-End: 171-1295
cgggcggcccggcggctgcgtactggctgtgggatgggaagtgaagccccagcgagcggctgcagcggggccgtgaggagcagccagcgggaggcggcggcgagtcggtgagcagctgggaagagcagaaccggggcggagcacctgcaggcgcgggcggcggccccaccatggcgattcgcaagaaaagcaccaagagccccccagtgctgagccacgaattcgtcctgcagaatcacgcggacatcgtctcctgtgtggcgatggtcttcctgctggggctcatgtttgagataacggcaaaagcttctatcatttttgttactcttcagtacaatgtcaccctcccagcaacagaagaacaagctactgaatcagtgtccctttattactatggcatcaaagatttggctactgttttcttctacatgctagtggcgataattattcatgccgtaattcaagagtatatgttggataaaattaacaggcgaatgcacttctccaaaacaaaacacagcaagtttaatgaatctggtcagcttagtgcgttctacctttttgcctgtgtttggggcacattcattctcatctctgaaaactacatctcagacccaactatcttatggagggcttatccccataacctgatgacatttcaaatgaagtttttctacatatcacagctggcttactggcttcatgcttttcctgaactctacttccagaaaaccaaaaaagaagatattcctcgtcagcttgtctacattggtctttacctcttccacattgctggagcttaccttttgaacttgaatcatctaggacttgttcttctggtgctacattattttgttgaatttcttttccacatttcccgcctgttttattttagcaatgaaaagtatcagaaaggattttctctgtgggcagttctttttgttttgggaagacttctgactttaattctttcagtactgactgttggttttggccttgcaagagcagaaaatcagaagctggatttcagtactggaaacttcaatgtgttagctgttagaatcgctgttctggcatccatttgcgttactcaggcatttatgatgtggaagttcattaattttcagcttcgaaggtggagggaacattctgcttttcaggcaccagctgtgaagaagaaaccaacagtaactaaaggcagatcttctaaaaaaggaacagaaaatggtgtgaatggaacattaacttcaaatgtagcagactctccccggaataaaaaagagaaatcttcataatgaattataaactaattgattaatgtccccaaagaaatctgctttctactatatctttcagcattagagatttttctgttcttgaaaatacagtctgtgctctttgatttttgctattgtacggtttcatgcatttttttaaagggcatttgaggggaggattattgctatgaatgaaaaaaatattttagcttagactaagctacctgccttcaaaatagtttagggaccaccaccatattttattttgtttttatttttgaacatttttctaatgatttggagagaaaactatttacaaaaattccacatatcagtgatacaatttcttgctgtcaccaattttttataatagcagagtggcctgttctaagaaggccatattttttaagttatctttcagggtaacatggaaatactataaagttggatgtcaaactttaatatgttttcagtgttctctaattttttggaatttttgtagactttacacctggaaaaaaagatttgtaaaatcaccggaacaattgtgtgctttattttataggtagtggttattagtattacatccccattttaaaaacaaaaacataataatcgttacaacacgtggagttttactaacatacatattaaatcaaagtatattcttaaaagtacttgtgaagtaaaatctttcttgtgcattttcaatacttgtaaactggaaatcagaaaatatttactatgaacaggaaaatctgacatatagccctttttgatatgtttattaataatgattcttaatggggctcataataagtttaatatgcacagcatcttagaaaagtttaacctgcaaacacttttaaaacataatgcctacttgatttatatctataaaaagactgacaggtaattatatttggaaaacatttaatgcactaactttaaagaaattgaaaattcaggtggataaatagtcttacaaaagacaatgtgctttatgttatacctatagctttggtcccatctttaattgagaaacatttatctgtataaaacatatttttggataaatatatatatatatatttgtatctctacagaaaggctctaaaaagcatttgaggaaaatatttggttcccttttctataatcatcctttaagattcttatagctacatttggtttattcatcatatttacagtatatatattgttcttttcagtgttcacatcttgttccccatttctcacttgtgtcaccagctgtttgtgccatttttagtgtaaaagttgcagacctattagatctgcagtttaagttgccatgctgctaggaaattgtcctttttctttctagctgttaacctacttcctggaaaaagtagtagctctctgtagcattatggagtttcagtggaaccaaatttttgccattaaaaactggcattatactgaactatacattgagaaatcaatcaaaataaaaatttttactttcacaa

SEQ ID NO: 192999 - DNA, 535 bp, Homo sapiens
  Payload ID: 18104
  Gene Name: translocation associated membrane protein 1
  ENST ID: ENST00000518678
  CDS Start-End: 199-535
gtgtttttttttttcccccgggcggcccggcggctgcgtactggctgtgggatgggaagtgaagccccagcgagcggctgcagcggggccgtgaggagcagccagcgggaggcggcggcgagtcggtgagcagctgggaagagcagaaccggggcggagcacctgcagaatcacgcggacatcgtctcctgtgtggcgatggtcttcctgctggggctcatgtttgagataacggcaaaagcttctatcatttttgttactcttcagtacaatgtcaccctcccagcaacagaagaacaagctactgaatcagtgtccctttattactatggcatcaaagatttggctactgttttcttctacatgctagtggcgataattattcatgccgtaattcaagagtatatgttggataaaattaacaggcgaatgcacttctccaaaacaaaacacagcaagtttaatgaatctggtcagcttagtgcgttctacctttttgcctgtgtttggggcacattcattctcatctctgtaa

SEQ ID NO: 193000 - DNA, 3394 bp, Homo sapiens
  Payload ID: 18104
  Gene Name: translocation associated membrane protein 1
  ENST ID: ENST00000521425
  CDS Start-End: 1038-1904
cgcagttcctggttcccgcgaagggttacgtggcagccggcgaggggcctgcgggcgggggcggcccctgcgctgccgagctggctcggggcgggtgggcggacttggggggactgccagcctcggccgcggtgagcgtcagccccgcgagggccggggaaggccgaggcccggcccccgggtctgaggagtgccggcctggagaccacaggccccgagtgacaggggagcccccggtagctccgagattggggtgagcgagaaaccggagtcaggcatctgctttcgacttgaagggcggtggccgccgggcaccggcgcagtggaggcgcgccagattgttttcatttttgtcttttaaactgatattattaccagttaacgaactttttgccctgacgctttaaagaaacaaggtctgatggataaatcgaggttctgaacagcggtgccaaggaatcgagtaattttgtttcttgaagtaggagaggatgggaatgtcaggagtgtgtaaattctcttcccacgtatctagtattttgatgacttatttaacagctgttgaatgtggatgataaactttgcaaggtgaacgagtaacatcctacgtttttcccctcgctccccaatacacacgctcattcctttgcttttttccctttttaatttttctctggagcctttatgtctcagtaaatatacaaattattttgctcctgccttgttttgtctcctctctcctgcatgtaacaagtgagagtagagattttggagtatttttacgagtctgtatttccagagtctaggatagtgcctgggacataggagtgcttaaaaaaagatgagcgacgttaagaatccttgagaaaacctaatggaatgatattaccagtgaccaaaagataacggcaaaagcttctatcatttttgttactcttcagtacaatgtcaccctcccagcaacagaagaacaagctactgaatcagtgtccctttattactatggcatcaaagatttggctactgttttcttctacatgctagtggcgataattattcatgccgtaattcaagagtatatgttggataaaattaacaggcgaatgcacttctccaaaacaaaacacagcaagtttaatgaatctggtcagcttagtgcgttctacctttttgcctgtgtttggggcacattcattctcatctctgaaaactacatctcagacccaactatcttatggagggcttatccccataacctgatgacatttcaaatgaagtttttctacatatcacagctggcttactggcttcatgcttttcctgaactctacttccagaaaaccaaaaaagaagatattcctcgtcagcttgtctacattggtctttacctcttccacattgctggagcttaccttttgaacttgaatcatctaggacttgttcttctggtgctacattattttgttgaatttcttttccacatttcccgcctgttttattttagcaatgaaaagtatcagaaaggattttctctgtgggcagttctttttgttttgggaagacttctgactttaattctttcagtactgactgttggttttggccttgcaagagcagaaaatcagaagctggatttcagtactggaaacttcaatgtgttagctgttagaatcgctgttctggcatccatttgcgttactcaggcatttatgatgtggaagttcattaattttcagcttcgaaggtggagggaacattctgcttttcaggcaccagctgtgaagaagaaaccaacagtaactaaaggcagatcttctaaaaaaggaacagaaaatggtgtgaatggaacattaacttcaaatgtagcagactctccccggaataaaaaagagaaatcttcataatgaattataaactaattgattaatgtccccaaagaaatctgctttctactatatctttcagcattagagatttttctgttcttgaaaatacagtctgtgctctttgatttttgctattgtacggtttcatgcatttttttaaagggcatttgaggggaggattattgctatgaatgaaaaaaatattttagcttagactaagctacctgccttcaaaatagtttagggaccaccaccatattttattttgtttttatttttgaacatttttctaatgatttggagagaaaactatttacaaaaattccacatatcagtgatacaatttcttgctgtcaccaattttttataatagcagagtggcctgttctaagaaggccatattttttaagttatctttcagggtaacatggaaatactataaagttggatgtcaaactttaatatgttttcagtgttctctaattttttggaatttttgtagactttacacctggaaaaaaagatttgtaaaatcaccggaacaattgtgtgctttattttataggtagtggttattagtattacatccccattttaaaaacaaaaacataataatcgttacaacacgtggagttttactaacatacatattaaatcaaagtatattcttaaaagtacttgtgaagtaaaatctttcttgtgcattttcaatacttgtaaactggaaatcagaaaatatttactatgaacaggaaaatctgacatatagccctttttgatatgtttattaataatgattcttaatggggctcataataagtttaatatgcacagcatcttagaaaagtttaacctgcaaacacttttaaaacataatgcctacttgatttatatctataaaaagactgacaggtaattatatttggaaaacatttaatgcactaactttaaagaaattgaaaattcaggtggataaatagtcttacaaaagacaatgtgctttatgttatacctatagctttggtcccatctttaattgagaaacatttatctgtataaaacatatttttggataaatatatatatatatatttgtatctctacagaaaggctctaaaaagcatttgaggaaaatatttggttcccttttctataatcatcctttaagattcttatagctacatttggtttattcatcatatttacagtatatatattgttcttttcagtgttcacatcttgttccccatttctcacttgtgtcaccagctgtttgtgccatttttagtgtaaaagttgcagacctattagatctgcagtttaagttgccatgctgctaggaaattgtcctttttctttctagctgttaacctacttcctggaaaaagtagtagctctctgtagcattatggagtttcagtggaaccaaatttttgccattaaaaactggcattatactgaactatacattgagaaatcaatcaaaataaaaatttttactttcacaa

SEQ ID NO: 193001 - DNA, 2023 bp, Homo sapiens
  Payload ID: 18105
  Gene Name: translocation associated membrane protein 1-like 1
  Uniprot ID: Q8N609
  ENST ID: ENST00000310754
  CDS Start-End: 184-1293
atgctcagctcagctcggccctcgcctttgatttattttttttctgggcggccgctgcgacccgggactgacttcgggatgggaagtggagcccccggagctgctaccgtggcggcggcgctgtgaggagcagccagggggaggcagctgcggctcgccggtgagtatccgggaagcgccaccatggggctccgtaagaagagcaccaagaacccccccgttctcagccaggaattcatcctgcagaatcatgcggacatcgtctcctgcgtggggatgttcttcctgctggggcttgtgttcgagggaacagcagaagcatccatcgtgtttctcactcttcagcacagtgttgctgtccctgcagcagaggaacaagccacgggctcaaagtccctctattattatggtgtcaaagatttggccacggttttcttctacatgctggtggcaatcattattcatgccacaattcaggaatatgtgttggataaaattaacaagagaatgcagttcaccaaagcgaaacaaaacaagtttaacgagtctggtcagtttagtgtgttctactttttttcttgtatttggggcacattcattttaatctctgaaaactgcctgtcagacccaactcttatatggaaggctcgtccccatagcatgatgacatttcaaatgaagtttttctacatatcccagttggcttactggtttcatgcttttcctgaactctacttccagaaaaccaaaaaacaagacatccctcgtcaacttgtctacattggtcttcacctcttccacattactggagcttatctcttgtacttgaatcatttgggacttcttcttttggtactgcattattttgttgaattactttcccacatgtgcggcctgttttactttagtgatgaaaagtaccagaaaggcatatctctgtgggccattgtgtttatcttgggtagacttgtgactttaattgtttccgtactcactgttgggtttcacctggctggatcgcagaatcggaatcctgatgcccttactggaaatgtaaatgtgttggcagctaaaattgctgttctgtcgtccagttgcacgatccaagcctacgtaacatggaacttaattactctctggcttcagaggtgggtagaagattctaatattcaggcctcatgtatgaaaaagaaacggtcgagatcttctaaaaaaagaacagaaaacggagtgggagtggaaacttcaaatagagtagactgtccgccaaagaggaaagagaaatcttcataatctttgcaagcgcattgattaatgtctgcaaaggaatctgctctttgaggtttctttctgcactagagatttttctgtttttgaaaatagttcgtgctcttcggtttttgttattgaactgtttcatgtattttttaaagacatttgaggggaggaggattattatgaatgggaaaaaaagattttggttgagactaaattactcatcgtcaaaataatgtcaaaatagttttggggatcaccactatattttgttttgatttttaacctttcaacattttcctaatgatttgcagagataactgcacaattttgcatatcaatgatactggttcttactcccaccagtgtttcataatactaacaagatggtctctcctagcaagattatgtgtttaatgcttgctttggggtaaaataaaagtacgaaaaaggtggaagtcaaatcagtattctgtaattgttagaatttattttttaagaacttacaactcagaaaagattgctagactcaccaaaataataaatgttctttattttacaggtagtgattattagtgcttcatccccatttaaaaaaacacagtactaatgggtaacacatatggaggtttgctgccatatatattgcatcaaaatatcattaattaatataaaaatattaaaatcattcctgtccattccacttgtaaatgggaattcatgaaattaaatattactttaaaaagga

SEQ ID NO: 193002 - DNA, 6908 bp, Homo sapiens
  Payload ID: 18106
  Gene Name: translocation associated membrane protein 2
  Uniprot ID: Q15035
  ENST ID: ENST00000182527
  CDS Start-End: 1-1113
atggctttccgcaggaggacgaaaagttacccgctcttcagccaggagttcgtcatccacaaccatgcggacatcggcttctgcctggtgctctgcgtcctcatcgggcttatgttcgaggtcacagccaagactgcctttctatttattttacctcagtataacattagcgtgcctacagcagacagtgagaccgtgcactaccactatggccctaaggacctggtcacaatcttgttctacatcttcatcaccatcatcttgcatgctgtggttcaggagtacattttagataaaatcagcaaacggcttcatctctccaaagtcaaacacagcaagttcaatgaatctggacagctggtcgtctttcatttcacctcggtgatttggtgcttctacgtggtggtgacggaaggatacttaacaaacccaagaagcctctgggaagactacccgcatgtgcacctccccttccaggtgaagtttttctacctatgccagctggcctactggctgcacgcacttcctgagctatacttccagaaggtacggaaggaggaaattccccgccagctccagtatatttgcctgtacctggtgcatatagctggagcatacctcttaaacctgagccgcctgggcctgatcttgctgctgctgcagtactcaactgagttcctcttccacacggctagactcttctactttgcagatgaaaacaacgagaaactgttcagtgcctgggctgctgtttttggggttacccgcctcttcatcctcacccttgccgtgctggccattggctttggactggctcgcatggaaaaccaggcatttgatcccgagaaagggaacttcaacactttgttttgcaggctctgcgtgctgctgctggtgtgtgccgcccaggcctggctcatgtggcgcttcatccactcccagctgcggcactggcgggaatactggaatgagcagagtgcaaagcggagagtcccagccacacccagactaccagccaggctcatcaagagggaatctggttaccatgaaaatggagtggtgaaggcagagaacggaacctccccacggactaagaaactcaagtctccctaaggccaaagtgctaagaacaggaatcctcttggtgggggccgagcagggggcaaggagcccaggccccctccctgcctcctccttcctgcctgtgatgctccgtctcaaacagccgaaacctgtcttgcaatggggggagggggcgtttcgctttccttcttcttggcttcctcttattcttccacaaaccattctcaataaagccaaaaatctttctctttctccccctcaggccacctcctgtcctcactcctgtcctgtgctggcttttctggaacgccaggcgcccatggctggcacctttctgcttgctctgtctcttgccttatggctgctgcttttcctttttacttcctattttcaccttatcttgcaatttttctgtctgatttttacaatgggaggggagctaagattgcagtcctgtccttcggtcccccagggcctgccggtcagaagcctggggctggtaggcccttggtggtcctcatgtggatgggcaagaagagagcggccatctcggatcataatctccttggtgctgattaactgacgagatatatgattccagttctgcatgtaccatcttgaggcacagcagccactgctcgttgtaaatgccaaggcatttggctttgggacgtgacaactcaatccagaaggatggtgtgaactcggttgggtcccgtgactcgagctcctaccagtggctggccgcggattggaagccagcctgctgtcgctctgtggggggggacacgtcttcccactgcttagagcgagagcagagcaaactgcgcagcaggcacctccagaaaggtaatggtggcagaacccacagtggagtcgacctaggcctttctccagcagtcccagtcgccattgctttttcagccattcacaagcattcaaaaccaaaccaaacagcagttcatatacctgcctgagataggctggtcctcacctccagagccagccagccccgtcaggggccaaacttactaccttgacttcatctctagctgcagaaacactaagtctcaagggcttcagccccatgctggtcccttggtgttcagggagggtcacttggaccgctgttcatctggccgcccttgttgagtgttctttggaattgtcgttttttgagcacaactacagcattttagactgcatgaaaccatgactgactgagagtcactctctgggtagatgataggcgcctttctggccccttccctcacagattctttcccctcccctccacctgaagagaaggcctccaagtccttttggtgccttgtgaggacttttagaaggggcgttcagctttaaaaagccggtcctaattacggccggacgcagtagcttacgcctgttatcccagcactttgggaggtcgaggtgggcagatcacctgaggttaggagttcaagaccagcctggccaacatggtgaaaccccatctctactaaaaatacaaaaaattaggtgtagtggcaggcacctgtaatcccagctactcgggaggctgaggcaggagaatcgcttgaacctagaaggcggaggttgcagtgagcggagattgtaccatggcactccagcctggacaacaagagcgaaattctgtctaaaaaaacaaaagtcccaattaagaacctccgaactctgttttgaggcaaaggggagtagttcttggtaggtgcaggaatagtagtgtcatttggaatactggtcatctttctgacatcacagtagaaaccaaaccttggatttagattcaaaaggggggaaatgggtcttttcatcaaggcaactccccttctccaagtcacttacatcatagataaattttagcttcccagtaactgagggatttgtttcctaacgccattggaggccttcatccctctctacgataaggttgcagaaatgggaagagctacccgtggttgcttttgattacccttaggaagtgagacagtgtttttgaaaatatgtatttcccccatttctccctctccttccctgacacttctctgggctgcacagcagaaacgttggtaaaagggcagtttggtttcaacacagcagacctgatatgggatcccttagccactttagtcaaacagccctgacagagtctataattgagttcaggccccccaccttgcctaataactgcaaatcgcatgttcagccagcagcctcctaagcccaccttcctcccccattagagaacacccatcctaggtgctctccaggctgtgtcattggcagggcttcacatgcaggaggcctctctcaggtgagtccaggttaaactgttgagttgtggcttcaacagatatgtatggcatgctgggatgtgccaggtgcctgcgttgtgccagttgctggagaggtagtgtgagcagagcagctgaaatcttgccatcaagcaaccctcattctcatgcctgtaggtttccattgctctgtcccaggacacttgcgtgccagagacgccacaacttcatgtccctgtctcttgcaagctccccgtgctgccagtacttcatgccttggatgtggtcccaccagcccagtggccggggtcagcttaggctctgcttcccagtggacgggtgtgctaagggtttattttatgtaaaaaaaaaaaaaaaaacaaaaaaaaaccctgagaccatgagtggggctggcatcttgccagcctgggcttcagggatgtttggggggggtggttagagggtagttgtagggtactttgtcacccccctccccctgccaccctccctggcacgtttatttcacagcagagccaagtctgtggcaggttgacacagactgtgttgccagagctgaaataattccacttcatcctatgagcgtgttgggctagcttgttctaattttggccactttggctgttttcttcagttttatgcattctctcctgccccaaagtgccaagccatttgtgaaggctctgccagacacctccaagcttgagagctcagcaccatgcaccaagagcaggagaaaagacgtaaacctaccccagcaactgtggcctctcgacagccctggctaactaacttacatttgtggggaagccaacagacacagcaggaggagagggaggtggcgctggtggaccaaggatctgtgctacccgctcccctccttggaggtgcagtgatgatgggagttatttttaccatccgggcgctgatagctgcactattaataaattgcatgtgttccttttgaaggtaggggatggttctgggtgagaggggagcaggctgagccggcgggggatctgctgtcctcccttttgagtcagttctaatcccatgtgtgtctgggccaccagaccgaaatggttgctgagaaacttgtctgttcatgtcccaaggcataacttcccaacatttaagaaaccccaatagacacctctgccctggccacgttcacagatccttctcttgaccggaaaccctgggaccctaagaacccctgaagcttggggtgggtgtgtgcttctggggtctcttttgggacctcctttgtcagtaccccttcttttttctaagcagctaataagaggttgggtgaaagagtgcatctcctcccaggattccacaacaaaattcttatcttccatggatgctttaattggaagtgggttgccgacccccttgtgcctagaaaaggccttcgcttgggtttcctttgtatgcttcagccttcctagttggtttttctaggcctggtgtgagaggtagggaagtctgcacataactaattcttttgcttaagggcctatggcacaagtgcacaaacttcaattcttgatgttctaagctctctcctctaacagagggagtgctgaaagcttttgagtcaagacaatggagtgctcttcctccctcactctgccttccgagcttatggttccttttctcaggagaggattttcaggattattggaggattaggtcattgtcagatgactggaaaacctaaataggatctctctccagctcaaggttgtcccagtgaggaagactttaccaacttctcactctaccccactactcacatgagtgttagctccaccttgcaaaggctgaagaccagttctccccagtgaaagctgcctcattcttttatggagttccctggagtggcagagctataaagacgagcattgggatttgcagtctccatgtagcctttcgtgcttggcaacccctgtagactttttgtcccaagcagattgcgtgcgtgcgcctgtgtgtgagaataagtgccttactttgctgtgtggttttcaacttgtactccgtggccagcccccagttgccagggctcgacggcagccaaggacaccatacctcagtatagttatatataaaagggacacggattgtgacagtttcaccccatttgtttctaaccccgctgcccaggattagggtctgtggtgtgttctgttttgtttttggtttctcccttgtgtcagttctcttctggcccagctgggtggctgtggaagtctgtgaggtggcccaaccacaagcatacctattaagagaagcccagagcttccagcccccacttcgaaaactctcctctggccccacatagcaaactccttctccgttattttccccacccccagattttttttaaaaggcccacttgccgtaacctcttttggtctattttgcttcccattcagcccaaagtttatatgataaaggtgtttacttttacttcccagtctccaagtgctaacacataaacacatacatgtctgactgttgcagaactgttcgagctcctaattcagtgttaccttgttttagtcgcagcaaccctctcccctaccccttgcccgcccacgtttttctcactcttccgggttgtgcaataactctcccagccagtggtcctttccacagcctttctgtcccttaaaacacctgcaactgggggagaaatgggacccatgggagggggagtcgtcatcccttacacaagaaatagccactttccttttgttgtcattcttgtgatcctgggtgggtttctgtggcactcttttagaacatgtagcatcatcttagaggtctatttttaaaaaatgtgttgaagaggaaaaaaccattctcacgatggggcttaagtcattgtccaggaataagattggcgtggtgcccatgacatcaccgtcactctgcctaaaagcactctagagctacttgttcacgtggagaggaaggatattttgcgaagcaacagccgcaggtggagagccctgttcacctgatagggtctagctgtgacagtaaatataataccgctgtttccttgggtacagatttgagtgttcatgtgatgagactgtaaacctcatttttcggttcctctgtttaaaaaaacatctgaaggatgaactaaggctgctggtgccctgagcaactgataatgcaaatgtggacaaagtgtctgttttctactctagcctgttcatatggaccaaatttcaacaaggaactcaaggaaaatttgtacctgccgtatttatgctttcatgtaaaaaagggttggggggaggggtgtctttttgcttttggtgaactttttttcaaaatcatttttccactgtttctgtctggttttaaaacaaattacagttttgtatggattttttaaatgtacattttggaacaaatgatcaaatattttctgaaataacaataaaaggcagaaaattatcagaa

SEQ ID NO: 193003 - DNA, 955 bp, Homo sapiens
  Payload ID: 18107
  Gene Name: translocator protein (18kDa)
  Uniprot ID: P30536
  ENST ID: ENST00000329563
  CDS Start-End: 227-736
ccctctcctgcccattccgcggatgggcaatcccaggcggaactcccttgagggtctcagaatatctgggagacctcgggctcttgatctccgagacaccccgtttcgtagtggagaacagtccagatcggggaagtttattttgcccaaagccggttagaggccccctggccctcgattcccagtgcggggctcagagctcccctgaacagcagctgcagcagccatggccccgccctgggtgcccgccatgggcttcacgctggcgcccagcctggggtgcttcgtgggctcccgctttgtccacggcgagggtctccgctggtacgccggcctgcagaagccctcgtggcacccgccccactgggtgctgggccctgtctggggcacgctctactcagccatggggtacggctcctacctggtctggaaagagctgggaggcttcacagagaaggctgtggttcccctgggcctctacactgggcagctggccctgaactgggcatggccccccatcttctttggtgcccgacaaatgggctgggccttggtggatctcctgctggtcagtggggcggcggcagccactaccgtggcctggtaccaggtgagcccgctggccgcccgcctgctctacccctacctggcctggctggccttcacgaccacactcaactactgcgtatggcgggacaaccatggctggcgtgggggacggcggctgccagagtgagtgcccggcccaccagggactgcagctgcaccagcaggtgccatcacgcttgtgatgtggtggccgtcacgctttcatgaccactgggcctgctagtctgtcagggccttggcccaggggtcagcagagcttcagaggtggccccacctgagcccccacccgggagcagtgtcctgtgctttctgcatgcttagagcatgttcttggaacatggaattt

SEQ ID NO: 193004 - DNA, 881 bp, Homo sapiens
  Payload ID: 18107
  Gene Name: translocator protein (18kDa)
  Uniprot ID: P30536
  ENST ID: ENST00000337554
  CDS Start-End: 121-630
ggcggctgggaggggcggggcggatgcggggacagcggcctggctaactcctgccaggcagtgcccttcccggagcgtgccctcgccgctgagctcccctgaacagcagctgcagcagccatggccccgccctgggtgcccgccatgggcttcacgctggcgcccagcctggggtgcttcgtgggctcccgctttgtccacggcgagggtctccgctggtacgccggcctgcagaagccctcgtggcacccgccccactgggtgctgggccctgtctggggcacgctctactcagccatggggtacggctcctacctggtctggaaagagctgggaggcttcacagagaaggctgtggttcccctgggcctctacactgggcagctggccctgaactgggcatggccccccatcttctttggtgcccgacaaatgggctgggccttggtggatctcctgctggtcagtggggcggcggcagccactaccgtggcctggtaccaggtgagcccgctggccgcccgcctgctctacccctacctggcctggctggccttcacgaccacactcaactactgcgtatggcgggacaaccatggctggcgtgggggacggcggctgccagagtgagtgcccggcccaccagggactgcagctgcaccagcaggtgccatcacgcttgtgatgtggtggccgtcacgctttcatgaccactgggcctgctagtctgtcagggccttggcccaggggtcagcagagcttcagaggtggccccacctgagcccccacccgggagcagtgtcctgtgctttctgcatgcttagagcatgttcttggaacatggaattttataagctgaataaagtttttgacttccttta

SEQ ID NO: 193005 - DNA, 1075 bp, Homo sapiens
  Payload ID: 18107
  Gene Name: translocator protein (18kDa)
  Uniprot ID: P30536
  ENST ID: ENST00000396265
  CDS Start-End: 316-825
ctcctgcccattccgcggatgggcaatcccaggcggaactcccttgagggtctcagaatatctgggagacctcgggctcttgatctccgagacaccccgtttcgtagtggagaacagtccagatcggggaagtttattttgcccaaagccggttagaggccccctggccctcgattcccagtgcggggctcaggtgcgttgcagcctagacgggtcttactgtgagccgagcagcctctgggacctgtctgcttcccctaccccttgcaaagaagccggagcccagagctcccctgaacagcagctgcagcagccatggccccgccctgggtgcccgccatgggcttcacgctggcgcccagcctggggtgcttcgtgggctcccgctttgtccacggcgagggtctccgctggtacgccggcctgcagaagccctcgtggcacccgccccactgggtgctgggccctgtctggggcacgctctactcagccatggggtacggctcctacctggtctggaaagagctgggaggcttcacagagaaggctgtggttcccctgggcctctacactgggcagctggccctgaactgggcatggccccccatcttctttggtgcccgacaaatgggctgggccttggtggatctcctgctggtcagtggggcggcggcagccactaccgtggcctggtaccaggtgagcccgctggccgcccgcctgctctacccctacctggcctggctggccttcacgaccacactcaactactgcgtatggcgggacaaccatggctggcgtgggggacggcggctgccagagtgagtgcccggcccaccagggactgcagctgcaccagcaggtgccatcacgcttgtgatgtggtggccgtcacgctttcatgaccactgggcctgctagtctgtcagggccttggcccaggggtcagcagagcttcagaggtggccccacctgagcccccacccgggagcagtgtcctgtgctttctgcatgcttagagcatgttcttggaacatggaattttataagctgaataaagtttttgacttccttt

SEQ ID NO: 193006 - DNA, 672 bp, Homo sapiens
  Payload ID: 18107
  Gene Name: translocator protein (18kDa)
  ENST ID: ENST00000428336
  CDS Start-End: 352-672
caggaagcgcggtcccaggagtggccgacgctccctctcctgcccattccgcggatgggcaatcccaggcggaactcccttgagggtctcagaatatctgggagacctcgggctcttgatctccgagacaccccgtttcgtagtggagaacagtccagatcggggaagtttattttgcccaaagccggttagaggccccctggccctcgattcccagtgcggggctcaggtgcgttgcagcctagacgggtcttactgtgagccgagcagcctctgggacctgtctgcttcccctaccccttgcaaagaagccggagcccagagctcccctgaacagcagctgcagcagccatggccccgccctgggtgcccgccatgggcttcacgctggcgcccagcctggggtgcttcgtgggctcccgctttgtccacggcgagggtctccgctggtacgccggcctgcagaagccctcgtggcacccgccccactgggtgctgggccctgtctggggcacgctctactcagccatggggtacggctcctacctggtctggaaagagctgggaggcttcacagagaaggctgtggttcccctgggcctctacactgggcagctggccctgaactgggcatggccccccatcttctttggtgcccgacaaatgggctgg

SEQ ID NO: 193007 - DNA, 636 bp, Homo sapiens
  Payload ID: 18107
  Gene Name: translocator protein (18kDa)
  ENST ID: ENST00000583777
  CDS Start-End: 189-386
agcggcctggctaactcctgccaggcagtgcccttcccggagcgtgccctcgccgctggtacggctcctacctggtctggaaagagctgggaggcttcacagagaaggctgtggttcccctgggcctctacactgggcagctggccctgaactgggcatggccccccatcttctttggtgcccgacaaatgggctgggccttggtggatctcctgctggtcagtggggcggcggcagccactaccgtggcctggtaccaggtgagcccgctggccgcccgcctgctctacccctacctggcctggctggccttcacgaccacactcaactactgcgtatggcgggacaaccatggctggcgtgggggacggcggctgccagagtgagtgcccggcccaccagggactgcagctgcaccagcaggtgccatcacgcttgtgatgtggtggccgtcacgctttcatgaccactgggcctgctagtctgtcagggccttggcccaggggtcagcagagcttcagaggtggccccacctgagcccccacccgggagcagtgtcctgtgctttctgcatgcttagagcatgttcttggaacatggaattttataagctgaataaagtttttgacttccttt

SEQ ID NO: 193008 - DNA, 718 bp, Homo sapiens
  Payload ID: 18108
  Gene Name: translocator protein 2
  Uniprot ID: Q5TGU0
  ENST ID: ENST00000373158
  CDS Start-End: 229-441
agttctcggtgagggccagctacatacctggctaagcgctgcccactgcagaaaagctcatcacccgggacctgatctccaggactcagaagcacttggaggaaggcctattcacttagaagcagttaccagtgctgggcagtgtcctccaagtgccagaggagtgctgtggagaaaagaagtccatggaagccaggagatgggcaagattttgcctcttcaaggtgaatgcggcttcaaggggctatctttgtgctcctgccccacctggggcccatcctggtctggctgttcactcgtgatcacatgtctggttggtgtgagggcccgaggatgctgtcctggtgcccattctacaaagtcttattgcttgtacagacagccatctactctgtcgtggggccctgctgcacctgctgctgctgtatgggctggtggtgagcacagcactgatctggcatcccatcaacaaactggctgccctgttactgctgccctacctagcctggctcaccgtgacttcagccctcacctaccacctgtggagggacagcctttgtccagtgcaccagcctcagcccacggagaagagtgactgaggccctagggcatgggagaggagggacgcccagggtggggaggaagagtctgcaagcagggctgtggagttagggttcaccccaatgggaccaccctcctgggtcccctggtgccgttt

SEQ ID NO: 193009 - DNA, 958 bp, Homo sapiens
  Payload ID: 18108
  Gene Name: translocator protein 2
  Uniprot ID: Q5TGU0
  ENST ID: ENST00000373161
  CDS Start-End: 246-758
atcagcttaggtagaacagttctcggtgagggccagctacatacctggctaagcgctgcccactgcagaaaagctcatcacccgggacctgatctccaggactcagaagcacttggaggaaggcctattcacttagaagcagttaccagtgctgggcagtgtcctccaagtgccagaggagtgctgtggagaaaagaagtccatggaagccaggagatgggcaagattttgcctcttcaaggtgaatgcggcttcaaggggctatctttgtgctcctgccccacctggggcccatcctggtctggctgttcactcgtgatcacatgtctggttggtgtgagggcccgaggatgctgtcctggtgcccattctacaaagtcttattgcttgtacagacagccatctactctgtcgtgggctatgcctcctacctggtgtggaaggacctgggagggggcttggggtggcccctggccctgcctcttggcctctatgctgttcagctcaccatcagctggactgtcctggttctctttttcacagtccacaaccctggtctggccctgctgcacctgctgctgctgtatgggctggtggtgagcacagcactgatctggcatcccatcaacaaactggctgccctgttactgctgccctacctagcctggctcaccgtgacttcagccctcacctaccacctgtggagggacagcctttgtccagtgcaccagcctcagcccacggagaagagtgactgaggccctagggcatgggagaggagggacgcccagggtggggaggaagagtctgcaagcagggctgtggagttagggttcaccccaatgggaccaccctcctgggtcccctggtgccgtttttccttagaaatcagagaaatgggaaagggggggaaactgattttacacttaaataataaaatcctattagtaactctgaa

SEQ ID NO: 193010 - DNA, 699 bp, Homo sapiens
  Payload ID: 18108
  Gene Name: translocator protein 2
  Uniprot ID: Q5TGU0
  ENST ID: ENST00000470917
  CDS Start-End: 112-624
tccaagtgccagaggagtgctgtggagaaaagaagtccatggaagccaggagatgggcaaggtgtggcctggggttggagagagctcagagattttgcctcttcaaggtgaatgcggcttcaaggggctatctttgtgctcctgccccacctggggcccatcctggtctggctgttcactcgtgatcacatgtctggttggtgtgagggcccgaggatgctgtcctggtgcccattctacaaagtcttattgcttgtacagacagccatctactctgtcgtgggctatgcctcctacctggtgtggaaggacctgggagggggcttggggtggcccctggccctgcctcttggcctctatgctgttcagctcaccatcagctggactgtcctggttctctttttcacagtccacaaccctggtctggccctgctgcacctgctgctgctgtatgggctggtggtgagcacagcactgatctggcatcccatcaacaaactggctgccctgttactgctgccctacctagcctggctcaccgtgacttcagccctcacctaccacctgtggagggacagcctttgtccagtgcaccagcctcagcccacggagaagagtgactgaggccctagggcatgggagaggagggacgcccagggtggggaggaagagtctgcaagcagggctgtggagttaggg

SEQ ID NO: 193011 - DNA, 1450 bp, Homo sapiens
  Payload ID: 18109
  Gene Name: transmembrane (C-terminal) protease, serine 12
  Uniprot ID: Q86WS5
  ENST ID: ENST00000398458
  CDS Start-End: 33-1079
acctgccgccatcttgctcaccagcctccaaaatgcggctggggctcctgagcgtggcgctgttgtttgtggggagctctcacttatactcagaccactactcgccctctggaaggcacaggctcggcccctcgccggaaccggcggctagttcccagcaggctgaggccgtccgcaagaggctccggcggcggagggagggaggggcgcatgcagaggattgtggaacagcaccgcttaaggatgtgttgcaagggtctcggattatagggggcaccgaagcacaagctggcgcatggccgtgggtggtgagcctgcagattaaatatggccgtgttcttgttcatgtatgtgggggaaccctagtgagagagaggtgggtcctcacagctgcccactgcactaaagacgctagcgatcctttaatgtggacagctgtgattggaactaataatatacatggacgctatcctcataccaagaagataaaaattaaagcaatcattattcatccaaacttcattttggaatcttatgtaaatgatattgcactttttcacttaaaaaaagcagtgaggtataatgactatattcagcctatttgcctaccttttgatgttttccaaatcctggacggaaacacaaagtgttttataagtggctggggaagaacaaaagaagaaggtaacgctacaaatattttacaagatgcagaagtgcattatatttctcgagagatgtgtaattctgagaggagttatgggggaataattcctaacacttcattttgtgcaggtgatgaagatggagcttttgatacttgcaggggtgacagtgggggaccattaatgtgctacttaccagaatataaaagattttttgtaatgggaattaccagttacggacatggctgtggtcgaagaggttttcctggtgtctatattgggccatccttctaccaaaagtggctgacagagcatttcttccatgcaagcactcaaggcatacttactataaatattttacgtggccagatcctcatagctttatgttttgtcatcttactagcaacaacataaagaaattctgaaggctttcatatctttattttgcattgtgtccctttctatgttctatataatgaacatcatttattcttctagcaattaattgcctacattagagatttcatgtgaacattttatgggctataagtattgtgacagatatacaattgtaattttggcactgaatcacatgtctccttgaaatatcttgattattttataatcataattctgtatctggaatactcatagagtttgtacaaaatattcagttaaacatatattttatgtgtataaatgccaaataatagtttataattaaaatgaaagctgtcatttggttaaattaataaaaattctttcttagattttattctaaaaaa

SEQ ID NO: 193012 - DNA, 3336 bp, Homo sapiens
  Payload ID: 18109
  Gene Name: transmembrane (C-terminal) protease, serine 12
  ENST ID: ENST00000551456
  CDS Start-End: 46-1008
gcgggtgggaagtacctgccgccatcttgctcaccagcctccaaaatgcggctggggctcctgagcgtggcgctgttgtttgtggggagctctcacttatactcagaccactactcgccctctggaaggcacaggctcggcccctcgccggaaccggcggctagttcccagcaggctgaggccgtccgcaagaggctccggcggcggagggagggaggggcgcatgcagaggattgtggaacagcaccgcttaaggatgtgttgcaagggtctcggattatagggggcaccgaagcacaagctggcgcatggccgtgggtggtgagcctgcagattaaatatggccgtgttcttgttcatgtatgtgggggaaccctagtgagagagaggtgggtcctcacagctgcccactgcactaaagacgctagcgatcctttaatgtggacagctgtgattggaactaataatatacatggacgctatcctcataccaagaagataaaaattaaagcaatcattattcatccaaacttcattttggaatcttatgtaaatgatattgcactttttcacttaaaaaaagcagtgaggtataatgactatattcagcctatttgcctaccttttgatgttttccaaatcctggacggaaacacaaagtgttttataagtggctggggaagaacaaaagaagaaggtaacgctacaaatattttacaagatgcagaagtgcattatatttctcgagagatgtgtaattctgagaggagttatgggggaataattcctaacacttcattttgtgcaggtgatgaagatggagcttttgatacttgcagggtaagaccaagtaattttcctttaaaatattttctgaagccagaagggaacttgtcaaacaaggcctttgataactttctggtggtcttaattatcaggcctaaaaataataaatcattttttctcctttttaactatttcaacaatccaaatcttcttggttcctgattccatggtttctgctgtcatcagtaggcagaatttaccttgaattcttttttttaatcattacctttgagatataattcacctagttaaaagtgtacagctcaattttttttttatttgagatagtctcgctttgtcacccatgctggagtgcagtgacacaatctctgttcactgcaacctctgcctcccaggttcaagcgattctcatccctcagcctcctaggtagctggaattacaggcacacatcactatgcccggccattctttttttttttttttgtattttcagtagagacagggcttcaccttgttgaccaggctggtcttgaactcctgacctcaagtgatctgcccaccttggcctcccaaagtgctgggattacaggggtgagccactgcgcccagcctgttactgtcttttttattataaccatccttgtgggtgcgcagtggtatctcatagtggttttaatttgcatttccttaatgactaatgatgttgagcatttttgcatgtatttattagccatttatatatcttctttacagaatgtctatttggatcccttcctcatttttaaattgagttgtctttttatcactgagttataagcatttttcatatattctggatacaagtcccttaccagatacataatgtacaaaatttttctcccattctgtagactgttttttcacttttctgaggttatcatttgcagcacaaatgttaatttttttaatgaagtacaattgatccattttttgttttgtctcatgcttttttactcttcctttattcctcttttcttcactatttccaaagctactagtccttcactcctgagtaacccatgctctcaccttttcctactcattctcatttctgcaatctaaagtttatcttttctgtgtccttttccttaaaaatcttgctgaatgaaatagtaaagaatccaatctaagtgaattgcattcctaggccaaacatcctcatcatcaaaaaataattattcaatgcctgccttatatagagaatcggaaacagttatctcagtgtccttgttgttttcagtgcattaacaggccttagtaacagcatttgggtgcattcctaattttgtatagactatgaaagtgacctgtcatttataatactactgagaggctttgccatttatgctcattttcctgcactagctattgtcaacacttagaaacttgtcttctattgcaagatgccagtttactcctctccctggcaagcaaaccacacacgtgcctaaaagaatccttcatacatcttaaagttatcctttccacacgcagtattcagcaagagaatattctaataatagacagttttgacaatattttgcacacttcctaaattatatttctcctaagtaattatatttaaaaatccaaacaatttgatttatagtattctggctcaaaaccaggcagatgagaaatttatctaccagctatatggttcctccaaatacctgggtaaaattgaattcctcctgtttgagttggaagtttaagctcaaaatctagtgatctttataaattgggggtatattgaaaatgtgtatttatataaatgtatgtttgatgtaaataatttattccagtgttactgttgcttgaagaatactagaagtaacaaacactattttgggacttttttgacagggtgacagtgggggaccattaatgtgctacttaccagaatataaaagattttttgtaatgggaattaccagttacggacatggctgtggtcgaagaggttttcctggtgtctatattgggccatccttctaccaaaagtggctgacagagcatttcttccatgcaagcactcaaggcatacttactataaatattttacgtggccagatcctcatagctttatgttttgtcatcttactagcaacaacataaagaaattctgaaggctttcatatctttattttgcattgtgtccctttctatgttctatataatgaacatcatttattcttctagcaattaattgcctacattagagatttcatgtgaacattttatgggctataagtattgtgacagatatacaattgtaattttggcactgaatcacatgtctccttgaaatatcttgattattttataatcataattctgtatctggaatactcatagagtttgtacaaaatattcagttaaacatatattttatgtgtataaatgccaaataatagtttataattaaaatgaaagctgtcatttggttaaattaataaaaattctttcttagattttattctaaaaaa

SEQ ID NO: 193013 - DNA, 1771 bp, Homo sapiens
  Payload ID: 18110
  Gene Name: transmembrane 4 L six family member 1
  Uniprot ID: P30408
  ENST ID: ENST00000305366
  CDS Start-End: 319-927
attaatcattttccctgttgcctatgactgaggctgtttctcacatcctgcccctggttttgcctgtcccaaggatttcgtctgaagggcgggacattccccctgcctcttcgcaccacagccagagcctgccattaggaccaatgaaagcaaagtacctcatcccctcagtgactaagaatcgcagtatttaagaggtagcaggaatgggctgagagtggtgtttgctttctccaccagaagggcacactttcatctaatttggggtatcactgagctgaagacaaagagaagggggagaaaacctagcagaccaccatgtgctatgggaagtgtgcacgatgcatcggacattctctggtggggctcgccctcctgtgcatcgcggctaatattttgctttactttcccaatggggaaacaaagtatgcctccgaaaaccacctcagccgcttcgtgtggttcttttctggcatcgtaggaggtggcctgctgatgctcctgccagcatttgtcttcattgggctggaacaggatgactgctgtggctgctgtggccatgaaaactgtggcaaacgatgtgcgatgctttcttctgtattggctgctctcattggaattgcaggatctggctactgtgtcattgtggcagcccttggcttagcagaaggaccactatgtcttgattccctcggccagtggaactacacctttgccagcactgagggccagtaccttctggatacctccacatggtccgagtgcactgaacccaagcacattgtggaatggaatgtatctctgttttctatcctcttggctcttggtggaattgaattcatcttgtgtcttattcaagtaataaatggagtgcttggaggcatatgtggcttttgctgctctcaccaacagcaatatgactgctaaaagaaccaacccaggacagagccacaatcttcctctatttcattgtaatttatatatttcacttgtattcatttgtaaaactttgtattagtgtaacatactccccacagtctacttttacaaacgcctgtaaagactggcatcttcacaggatgtcagtgtttaaatttagtaaacttcttttttgtttgtttatttgtttttgtttttttttaaggaatgaggaaacaaaccaccctctgggggtaatttacagactgagtgacagtactcagtatatctgagataaactctataatgttttggataaaaataacattccaatcactattgtatatatgtgcatgtattttttaaattaaagatgtctagttgctttttataagaccaagaaggagaaaatccgacaacctggaaagatttttgttttcactgcttgtatgatgtttcccattcatacacctataaatctctaacaagaggccctttgaactgccttgtgttctgtgagaaacaaatatttacttagagtggaaggactgattgagaatgttccaatccaaatgaatgcatcacaacttacaatgctgctcattgttgtgagtactatgagattcaaatttttctaacatatggaaagccttttgtcctccaaagatgagtactagggatcatgtgtttaaaaaaagaaaggctacgatgactgggcaagaagaaagatgggaaactgaataaagcagttgatcagcatcattggaacatggggacgagtgacggcaggaggaccacgaggaaataccctcaaaactaacttgtttacaacaaaataaagtattcactacca

SEQ ID NO: 193014 - DNA, 3115 bp, Homo sapiens
  Payload ID: 18110
  Gene Name: transmembrane 4 L six family member 1
  ENST ID: ENST00000472441
  CDS Start-End: 125-478
tgtggccatgaaaactgtggcaaacgatgtgcggtaggtcctcctgccctggtggtgaaaatgactcctaagatgtagctgtggcactctgtggctcacttcctgtgtgtctgcttttccctagatgctttcttctgtattggctgctctcattggaattgcaggatctggctactgtgtcattgtggcagcccttggcttagcagaaggaccactatgtcttgattccctcggccagtggaactacacctttgccagcactgagggccagtaccttctggatacctccacatggtccgagtgcactgaacccaagcacattgtggaatggaatgtatctctgttttctatcctcttggctcttggtggaattgaattcatcttgtgtcttattcaagtaataaatggagtgcttggaggcatatgtggcttttgctgctctcaccaacaggtaagaacctgcatgaaaatgtcgtagtctggccctggtgttaatataccattgttttcatcataaagaaaaaggcaaaaccaaacatgctcgacctaccagcatttattctgatatcatctttgtagcaacacaattatagcattcactttagctgtcagtaacaagcttcctcgagtctcacagtcacaggattgtcttagttctttgcagttggctctatgtacacaagaacatgctgcccatagacacagcgctcccttcaggatctaattcactgcctctgctctcgctgcagagacagaaaaaaaagtgatgtctgctctttgtttgctgttatattcccaactagtatacataagtaatagccaaccattcaatgcatcaggcactatgctaaacccatatgactcaaatattaagcaataggcttaagatcacctactcaggaaataacaggcttcaaaccttgagtcgctctgtgcaaaagctcctacttttaacctgtattccacacttgctgtttggttggattttctgcaattccttcctaataaggagtcataaaaatgcctaagcagtaagtatggagaatcactagcaatctttgaacagcagctcatgaaaagcctttcgttgtgaaagaaaaccaggaagcacttgtttcctggggatatgatttaggagaaaaaaatgcatttgtttgtagcagtgaaagttcttgtttctatatcctcctaaaatatatatattattgaattaatgaaagtccagctttgatcctatctttgagagggttattttatgtcttatatttttcaaaccatttactcctctggtgccagatctgttaactttcttttaaaaataagacaaaaacctaatgaaaactgaaagcccattgctaccatgaaaaactttgctgaaaataaaaggaaactttctgtaattttgggggaaggttaaaatgaaaatctagttttccttatcaggcaagtatagcaagattaataatttctttggcaaatttccaagaaaataagggaatgggaaaccttcaatatggagcttctttcaagcagtacggttggggaagggcagagaagtatcctctagggattgctgtcatgcagcttacctttagccttgaatttcatacaaggcagagttcaaagtaagtgattacttgtactaaatgtactcacttagtacgttttggggacaggcataaagagccaatgaccaaaatggctgaagtgatttggcagggaatgatactctcctctgatttggggtagtaaatacaccaggtttcccagctgagtcactgtagggatggcttcttcccagatactacagggaagatctgttacctttgtttataagacaaaagacactttcaaagggcaggtcttttcatgtagaagagtcaggtccataactcggtagcatttaatttgaaaggttacccacattgagctcataccagtgtgaaacttccatggcattatcttttaaatccctaagattaaaaccccacacaaatgcactcaaagcaacccaatatcagtatcctgcagtttctatgggccctttctgcagcctttactcatggaagacaagggatctgggtttgtttaggaaacattttgtgagcattgtccaagccctaagtatggttggcctaagctttgctgaagctaagatcagtctgtttatgtttgcttaaaataggaacttaaaggactaaaatgtcatcattatttatcctgattatagcctaatggtattttattttctctacagcaatatgactgctaaaagaaccaacccaggacagagccacaatcttcctctatttcattgtaatttatatatttcacttgtattcatttgtaaaactttgtattagtgtaacatactccccacagtctacttttacaaacgcctgtaaagactggcatcttcacaggatgtcagtgtttaaatttagtaaacttcttttttgtttgtttatttgtttttgtttttttttaaggaatgaggaaacaaaccaccctctgggggtaatttacagactgagtgacagtactcagtatatctgagataaactctataatgttttggataaaaataacattccaatcactattgtatatatgtgcatgtattttttaaattaaagatgtctagttgctttttataagaccaagaaggagaaaatccgacaacctggaaagatttttgttttcactgcttgtatgatgtttcccattcatacacctataaatctctaacaagaggccctttgaactgccttgtgttctgtgagaaacaaatatttacttagagtggaaggactgattgagaatgttccaatccaaatgaatgcatcacaacttacaatgctgctcattgttgtgagtactatgagattcaaatttttctaacatatggaaagccttttgtcctccaaagatgagtactagggatcatgtgtttaaaaaaagaaaggctacgatgactgggcaagaagaaagatgggaaactgaataaagcagttgatcagcatcattggaacatggggacgagtgacggcaggaggaccacgaggaaataccctcaaaactaacttgtttacaacaaaataaagtattcactacc

SEQ ID NO: 193015 - DNA, 702 bp, Homo sapiens
  Payload ID: 18110
  Gene Name: transmembrane 4 L six family member 1
  ENST ID: ENST00000493298
  CDS Start-End: 103-414
agtggtgtttgctttctccaccagaagggcacactttcatctaatttggggtatcactgagctgaagacaaagagaagggggagaaaacctagcagaccaccatgtgctatgggaagtgtgcacgatgcatcggacattctctggtggggctcgccctcctgtgcatcgcggctaatattttgctttactttcccaatggggaaacaaagtatgcctccgaaaaccacctcagccgcttcgtgtggttcttttctggcatcgtaggaggtggcctgctgatgctcctgccagcatttgtcttcattgggctggaacaggatgactgctgtggctgctgtggccatgaaaactgtggcaaacgatgtgcggtaggtcctcctgccctggtggtgaaaatgactcctaagatgtagctgtggcactctgtggctcacttcctgtgtgtctgcttttccctagatgctttcttctgtattggctgctctcattggaattgcaggatctggctactgtgtcattgtggcagcccttggcttagcagaaggaccactatgtcttgattccctcggccagtggaactacacctttgccagcactgagggccagtaccttctggatacctccacatggtccgagtgcactgaacccaagcacattgtggaatggaatgtatctctgttttctatcctcttggctcttgg

SEQ ID NO: 193016 - DNA, 976 bp, Homo sapiens
  Payload ID: 18110
  Gene Name: transmembrane 4 L six family member 1
  ENST ID: ENST00000493348
  CDS Start-End: 146-451
actaagaatcgcagtatttaagaggtagcaggaatgggctgagagtggtgtttgctttctccaccagaagggcacactttcatctaatttggggtatcactgagctgaagacaaagagaagggggagaaaacctagcagaccaccatgtgctatgggaagtgtgcacgatgcatcggacattctctggtggggctcgccctcctgtgcatcgcggctaatattttgctttactttcccaatggggaaacaaagtatgcctccgaaaaccacctcagccgcttcgtgtggttcttttctggcatcgtaggaggtggcctgctgatgctcctgccagcatttgtcttcattgggctggaacaggatgactgctgtggctgctgtggccatgaaaactgtggcaaacgatgtgcggtaccttctggatacctccacatggtccgagtgcactgaacccaagcacattgtggaatggaatgtatctctgttttctatcctcttggctcttggtggaattgaattcatcttgtgtcttattcaagtaataaatggagtgcttggaggcatatgtggcttttgctgctctcaccaacagcaatatgactgctaaaagaaccaacccaggacagagccacaatcttcctctatttcattgtaatttatatatttcacttgtattcatttgtaaaactttgtattagtgtaacatactccccacagtctacttttacaaacgcctgtaaagactggcatcttcacaggatgtcagtgtttaaatttagtaaacttcttttttgtttgtttatttgtttttgtttttttttaaggaatgaggaaacaaaccaccctctgggggtaatttacagactgagtgacagtactcagtatatctgagataaactctataatgttttggataaaaataacattccaatcactattgtatatatgtgcatgtattttttaaattaaagatgt

SEQ ID NO: 193017 - DNA, 1646 bp, Homo sapiens
  Payload ID: 18110
  Gene Name: transmembrane 4 L six family member 1
  ENST ID: ENST00000622124
  CDS Start-End: 196-894
agagcctgccattaggaccaatgaaagcaaagtacctcatcccctcagtgactaagaatcgcagtatttaagaggtagcaggaatgggctgagagtggtgtttgctttctccaccagaagggcacactttcatctaatttggggtatcactgagctgaagacaaagagaagggggagaaaacctagcagaccaccatgtgctatgggaagtgtgcacgatgcatcggacattctctggtggggctcgccctcctgtgcatcgcggctaatattttgctttactttcccaatggggaaacaaagtatgcctccgaaaaccacctcagccgcttcgtgtggttcttttctggcatcgtaggaggtggcctgctgatgctcctgccagcatttgtcttcattgggctggaacaggatgactgctgtggctgctgtggccatgaaaactgtggcaaacgatgtgcgatgctttcttctgtattggctgctctcattggaattgcaggatctggctactgtgtcattgtggcagcccttggcttagcagaaggaccactatgtcttgattccctcggccagtggaactacacctttgccagcactgagggccagtaccttctggatacctccacatggtccgagtgcactgaacccaagcacattgtggaatggaatgtatctctgttttctatcctcttggctcttggtggaattgaattcatcttgtgtcttattcaagtaataaatggagtgcttggaggcatatgtggcttttgctgctctcaccaacagcaaatgactgctaaaagaaccaacccaggacagagccacaatcttcctctatttcattgtaatttatatatttcacttgtattcatttgtaaaactttgtattagtgtaacatactccccacagtctacttttacaaacgcctgtaaagactggcatcttcacaggatgtcagtgtttaaatttagtaaacttcttttttgtttgtttatttgtttttgtttttttttaaggaatgaggaaacaaaccaccctctgggggtaatttacagactgagtgacagtactcagtatatctgagataaactctataatgttttggataaaaataacattccaatcactattgtatatatgtgcatgtattttttaaattaaagatgtctagttgctttttataagaccaagaaggagaaaatccgacaacctggaaagatttttgttttcactgcttgtatgatgtttcccattcatacacctataaatctctaacaagaggccctttgaactgccttgtgttctgtgagaaacaaatatttacttagagtggaaggactgattgagaatgttccaatccaaatgaatgcatcacaacttacaatgctgctcattgttgtgagtactatgagattcaaatttttctaacatatggaaagccttttgtcctccaaagatgagtactagggatcatgtgtttaaaaaaagaaaggctacgatgactgggcaagaagaaagatgggaaactgaataaagcagttgatcagcatcattggaacatggggacgagtgacggcaggaggaccacgaggaaataccctcaaaactaacttgtttacaacaaaataaagtattcactacc

SEQ ID NO: 193018 - DNA, 3852 bp, Homo sapiens
  Payload ID: 18111
  Gene Name: transmembrane 4 L six family member 18
  Uniprot ID: Q96CE8
  ENST ID: ENST00000296059
  CDS Start-End: 267-872
aacacaaggtcagggttaagccttcggtgctttaatccagaggaaaattacttattttaaaaagcagtgaaaaacaccgcattcctttggcacaggatgaagaccagctcagctcttcagttgttgatcattgtctattgttctccaaacagtaaaccagtatttcacactgagattgtcggctgcgggtatattccaattccccgtctcctcatgaatatgaagtgaagggctctgaccctggaagtggttctaagcagggcaaaatggggtctcggaagtgtggaggctgcctaagttgtttgctgattccgcttgcactttggagtataatcgtgaacatattattgtatttcccgaatgggcaaacttcctatgcatccagcaataaactcaccaactacgtgtggtattttgaaggaatctgtttctcaggcatcatgatgcttatagtaacaacagttcttctggtactggagaataataacaactataaatgttgccagagtgaaaactgcagcaaaaaatatgtgacactgctgtcaattatcttttcttccctcggaattgctttttctggatactgcctggtcatctctgccttgggtcttgtccaagggccatattgccgcacccttgatggctgggagtatgcttttgaaggcactgctggacgtttccttacagattctagcatatggattcagtgcctggaacctgcacatgttgtggagtggaacatcattttattttccattctcataaccctcagtgggcttcaagtgatcatctgcctcatcagagtagtcatgcaactatccaagatactgtgtggaagctattcagtgatcttccagcctggaatcatttgaataaggacaaaatgttttccattatcaagacatggccatctatctaaatattatatcaactgtgtagacttgagggcaatattgaaatgatggtgctttctgcatttggtgtttatttgtaaaaaatttgcagtcctcactgcacatgcaagtataccacccttccatttagtatgttttttaagtaatatgcatcagaaacttcagaaatacttctgccctttgatcaaacaaatccatttccaagaatctgtactagggaagtaaataagaatatgagagaaacctttatgcaaatatgtatattgcaacattatttaatattctggaaaattggaaacaccccaaaattctaaactcagaggaaggattaagtaaagagtggtacatactgtaaatgttttctgatattaaaaaaaaaattaaataaaaaataaagagtactacatggttgtaaaattacagtcattacaaatgatgtttttaaaattatgaataatgctacatcaaaaagcaggttacaaattcatgtttactatataactatttaaagcaaatgaaacactaatagtcaaagtttaggatgaaaactaaatctaaaaggaaatataacaaaatgccaattatgcttggtttggggcattgatgacccttcttcccacttttctatattttccaagatttctttattgaatatgttttactataaatattttctaaactcatattttcactattaaaatttttttatttttccaaactttaaggcatatgctctttccacattcctcaacattatttgcaaacatcatgaaatgacacttccatcaacattcaatgaggaaagtagtgatatagatgagccaaaaagagttttatataaacttatacaatctaaactcttgctcttcctttctgactcctgagggtgagtgtgatggactagaagaggtagccttaaaataagtgagcagctagggaacatgctcaatgggcaagagaaaatgaccactgaccagtcaatacctgtgtcagggggagttaccagtacctatatttatttttaaagtaattaaaaagtagaacacttacaaattttccacctatacatgccatgtcttcctcggggacagtagccacatcttatatatttcccaccatgcataggacccagcacacagtgaagccagtaggcactcagtgttgaatgctcataccaggttttctgcttcctgtagttaccctgctgagcactgcttccatcacaggtgcactgggcctcaacacttctgccatttccccatttgtctcctccatggacactgtcaacaatggtctgtcaacacctgctctgtgccaaagccagggagtaggctggggggatacggaagagaatatctttctccttgatgcctgctgtgccaacagccccctttaagccttgttcacagcctttgctgaaacaagcatcttgaaagcaagccatgttatacaccgcatgaccttcatgctctgggcccagctgactgaactggggcaggccccagagtcatgggcagcctattgtcttgctaatggcctctgacttagcctggagtaaaacactgtccaaacaagactggtggttattcaagcataagaatttgaactaggaagccaagaatgaagcaaccggaccattaccatcaaaaaatgattaaaggatgaagaaggaagccaacattcagagagtatctggttcatgttaataatggtatcatattaaaaggaagatacatgaacttctactccaaaagctcctaaaactgcctttgcccacaatgaacagtgtaccctaggcctggtttctgttcttggattcctagatagtctttcttctttgtcactgtgctgatcatttcagtaaacccccgactaaatcagtgcagctctgtttattgcaactaaaacgatccaaatgaagtctcccttttctagatgttgggttggagggatgctaagacaaagatgcttaggctccagagttttacagagcttcattcaataacactctactttccaaagaacttaaatatgaggtctgaaggacttggaccaagaggcaaacccaagctacagacaccatgttgtactcagagtgacctctcccctctgacagcccaggatttctctatcaagtccataagctagtcatatctaggaccatcttgttaaaaattctctcaaagtctcctcagccctcttgtaaacagacttctggaaggtccacttcatcagtttgttatatactttcagactgtctatctcttgtttagattcagcatggcaccgtacgttgaatggactgttaatagatgtttgctgaatgactccaccacagcattggacacatcaggggtacagccaaatgcagcatgatacctctatcaggaaaattaaattttaacacagccaccaaatattctatatttgaagagtatatgctaatcatgcaattttaagtaaaaaaaagctgaatacaaaaaaagctgaatatgtgttttatatcctcgtgaattcaaagtaaaaaggaaaaaaaactcaaaaaccaaatatatgtatgcagtttgagcccaaatttttaattaagtaaccatataattacatgtagacatgtataaaccttgagatatgtaaagaccagaaaaatatttaaaagttaatagttacatcatctgtggtcacaacaccctgaaaatgcctaatattggaaacttaagcaggattgatccaggttattacttggatgggagaccagatgctataggctgaaaaaagaaagcataagtacgcacaagttaatacttaataattatctcctaatgataggactataagttctatctcttttctttacattgttcagtattttcaaatttccctttgaaaatgtgttatgtacttgaattattagaaaaaataaatgtcatttaaaaagcaa

SEQ ID NO: 193019 - DNA, 662 bp, Homo sapiens
  Payload ID: 18111
  Gene Name: transmembrane 4 L six family member 18
  ENST ID: ENST00000474754
  CDS Start-End: 184-662
gtcttactttgtcacccaggctggagtgcagtggaacgatctcggctcactgcaacctccgtctcccagtaaaccagtatttcacactgagattgtcggctgcgggtatattccaattccccgtctcctcatgaatatgaagtgaagggctctgaccctggaagtggttctaagcagggcaaaatggggtctcggaagtgtggaggctgcctaagttgtttgctgattccgcttgcactttggagtataatcgtgaacatattattgtatttcccgaatgggcaaacttcctatgcatccagcaataaactcaccaactacgtgtggtattttgaaggaatctgtttctcaggcatcatgatgcttatagtaacaacagttcttctggtactggagaataataacaactataaatgttgccagagtgaaaactgcagcaaaaaatatgtgacactgctgtcaattatcttttcttccctcggaattgctttttctggatactgcctggtcatctctgccttgggtcttgtccaagggccatattgccgcacccttgatggctgggagtatgcttttgaaggcactgctggacgtttccttacagattctagcatatggattcagtgcctggaacctgcacatgttgtggagtggaacatcat

SEQ ID NO: 193020 - DNA, 907 bp, Homo sapiens
  Payload ID: 18111
  Gene Name: transmembrane 4 L six family member 18
  Uniprot ID: Q96CE8
  ENST ID: ENST00000470080
  CDS Start-End: 101-706
gagagagagagagaaaaaaaaggtcaggtaggaagaagaaaaatagactttctgtgactgtatactcttgaaatctcccgcaggttctaagcagggcaaaatggggtctcggaagtgtggaggctgcctaagttgtttgctgattccgcttgcactttggagtataatcgtgaacatattattgtatttcccgaatgggcaaacttcctatgcatccagcaataaactcaccaactacgtgtggtattttgaaggaatctgtttctcaggcatcatgatgcttatagtaacaacagttcttctggtactggagaataataacaactataaatgttgccagagtgaaaactgcagcaaaaaatatgtgacactgctgtcaattatcttttcttccctcggaattgctttttctggatactgcctggtcatctctgccttgggtcttgtccaagggccatattgccgcacccttgatggctgggagtatgcttttgaaggcactgctggacgtttccttacagattctagcatatggattcagtgcctggaacctgcacatgttgtggagtggaacatcattttattttccattctcataaccctcagtgggcttcaagtgatcatctgcctcatcagagtagtcatgcaactatccaagatactgtgtggaagctattcagtgatcttccagcctggaatcatttgaataaggacaaaatgttttccattatcaagacatggccatctatctaaatattatatcaactgtgtagacttgagggcaatattgaaatgatggtgctttctgcatttggtgtttatttgtaaaaaatttgcagtcctcactgcacatgcaagtataccacccttccatttagtatgttttttaagtaatatgcatcagaaa

SEQ ID NO: 193021 - DNA, 1022 bp, Homo sapiens
  Payload ID: 18112
  Gene Name: transmembrane 4 L six family member 19
  Uniprot ID: Q96DZ7
  ENST ID: ENST00000273695
  CDS Start-End: 127-756
aaagagtcctggaaagacaaccttcaggtccagccctggagctggaggagtggagccccactctgaagacgcagcctttctccaggttctgtctctcccattctgattcttgacaccagatgcaggatggtgtcctctccctgcacgcaggcaagctcacggacttgctcccgtatcctgggactgagccttgggactgcagccctgtttgctgctggggccaacgtggcactcctccttcctaactgggatgtcacctacctgttgaggggcctccttggcaggcatgccatgctgggaactgggctctggggaggaggcctcatggtactcactgcagctatcctcatctccttgatgggctggagatacggctgcttcagtaagagtgggctctgtcgaagcgtgcttactgctctgttgtcaggtggcctggctttacttggagccctgatttgctttgtcacttctggagttgctctgaaagatggtcctttttgcatgtttgatgtttcatccttcaatcagacacaagcttggaaatatggttacccattcaaagacctgcatagtaggaattatctgtatgaccgttcgctctggaactccgtctgcctggagccctctgcagctgttgtctggcacgtgtccctcttctccgcccttctgtgcatcagcctgctccagcttctcctggtggtcgttcatgtcatcaacagcctcctgggccttttctgcagcctctgcgagaagtgacaggcagaaccttcacttgcaagcatgggtgttttcatcatcggctgtcttgaatcctttctacaaggagtgggtacgaattataaacaaacttcccctttaggtatccctggagtaataatgacaacaaaattcactgcaggtcggtggaatgatagaatgcattttaaatcacattgtaaacttccaggtgatccatggataggataaataactaagttattataattgtttaggaatttatagtccataaaatatcctccagc

SEQ ID NO: 193022 - DNA, 1061 bp, Homo sapiens
  Payload ID: 18112
  Gene Name: transmembrane 4 L six family member 19
  Uniprot ID: Q96DZ7
  ENST ID: ENST00000454715
  CDS Start-End: 242-793
ctccggggagcggaagcgccttcaatgcaggcctgtgggcaggggcgtgggggcgcgcacacacacacgcctgggtgacctctacgtatatacagagcctccctggccctcctggaaagagtcctggaaagacaaccttcaggtccagccctggagctggaggagtggagccccactctgaagacgcagcctttctccaggttctgtctctcccattctgattcttgacaccagatgcaggatggtgtcctctccctgcacgcaggcaagctcacggacttgctcccgtatcctgggactgagccttgggactgcagccctgtttgctgctggggccaacgtggcactcctccttcctaactgggatgtcacctacctgttgaggggcctccttggcaggcatgccatgctgggaactgggctctggggaggaggcctcatggtgcttactgctctgttgtcaggtggcctggctttacttggagccctgatttgctttgtcacttctggagttgctctgaaagatggtcctttttgcatgtttgatgtttcatccttcaatcagacacaagcttggaaatatggttacccattcaaagacctgcatagtaggaattatctgtatgaccgttcgctctggaactccgtctgcctggagccctctgcagctgttgtctggcacgtgtccctcttctccgcccttctgtgcatcagcctgctccagcttctcctggtggtcgttcatgtcatcaacagcctcctgggccttttctgcagcctctgcgagaagtgacaggcagaaccttcacttgcaagcatgggtgttttcatcatcggctgtcttgaatcctttctacaaggagtgggtacgaattataaacaaacttcccctttaggtatccctggagtaataatgacaacaaaattcactgcaggtcggtggaatgatagaatgcattttaaatcacattgtaaacttccaggtgatccatggataggataaataactaagttattataattgtttaggaatttatagtccataaaatatcctccagcca

SEQ ID NO: 193023 - DNA, 1582 bp, Homo sapiens
  Payload ID: 18112
  Gene Name: transmembrane 4 L six family member 19
  ENST ID: ENST00000446879
  CDS Start-End: 127-1026
aaagagtcctggaaagacaaccttcaggtccagccctggagctggaggagtggagccccactctgaagacgcagcctttctccaggttctgtctctcccattctgattcttgacaccagatgcaggatggtgtcctctccctgcacgcaggcaagctcacggacttgctcccgtatcctgggactgagccttgggactgcagccctgtttgctgctggggccaacgtggcactcctccttcctaactgggatgtcacctacctgttgaggggcctccttggcaggcatgccatgctgggaactgggctctggggaggaggcctcatggtactcactgcagctatcctcatctccttgatgggctggagatacggctgcttcagtaagagtgggctctgtcgaagcgtgcttactgctctgttgtcaggtggcctggctttacttggagccctgatttgctttgtcacttctggagttgctctgaaagatggtcctttttgcatgtttgatgtttcatccttcaatcagacacaagcttggaaatatggttacccattcaaagacctgcatagaattatctgtatgaccgttcgctctggaactccgtctgcctggagccctctgcagctgttgtctggcacgtgtccctcttctccgcccttctgtgcatcagcctgctccagcttctcctggtggtcgttcatgtcatcaacagcctcctgggccttttctgcagcctctgcgagaagtgacaggcagaaccttcacttgcaagcatgggtgttttcatcatcggctgtcttgaatcctttctacaaggagtggagtctcatgctggagtgcagtggtgtgatctcggctcactgcaagctccgactccctggttcaagcaattctcctgcctcagcctcccaagtagctgggattacaggcacatgccaccacacccagctaatttttgtatttttagtagagaccgggtttcacaatgttagccaggatggtcttgatctcctaacctcatgatccgcccgcctcggcctcccaaagtgctgggatcacaggtgcgagtcaccgtgcctggccaactaatgaaaagtttaaagaatttatatctagttttggatgttaggcatgcacacacaagtgcatgcacactcatacacatcatctccacaagccccatcctggctcagccctattctgatgggtcagcaggaccccaaggagagaagggtgggtccttggcactaagacagttcacagtggttagctgactccttcttgcctccattctttcaggaactgcatatagtacagaacatgacagcgattcgaaaaacaatatcccagctggctgtgatggctcatgcctgtagtcccagcacttcggaaggctgaggtgggataatcacttgagcccaagagttcaatagtagcctgggcagcatagccagatcctatctctacaaaaattaaaaagattagccacgcgcggtggcattcgcctgtagttccaggtactccagaggctgaggtgggaggactgcttgagtccaagaggtcgaggctgaagtgagcg

SEQ ID NO: 193024 - DNA, 500 bp, Homo sapiens
  Payload ID: 18112
  Gene Name: transmembrane 4 L six family member 19
  ENST ID: ENST00000440822
  CDS Start-End: 1-332
atcagacacaagcttggaaatatggttacccattcaaagacctgcatagaattatctgtatgaccgttcgctctggaactccgtctgcctggagccctctgcagctgttgtctggcacgtgtccctcttctccgcccttctgtgcatcagcctgctccagcttctcctggtggtcgttcatgtcatcaacagcctcctgggccttttctgcagcctctgcgagaagtgacaggcagaaccttcacttgcaagcatgggtgttttcatcatcggctgtcttgaatcctttctacaaggagtgggtacgaattataaacaaacttcccctttaggtatccctggagtaataatgacaacaaaattcactgcaggtcggtggaatgatagaatgcattttaaatcacattgtaaacttccaggtgatccatggataggataaataactaagttattataattgtttaggaatttatagtccataaaatatcctccagccaggg

SEQ ID NO: 193025 - DNA, 2296 bp, Homo sapiens
  Payload ID: 18113
  Gene Name: transmembrane 4 L six family member 20
  Uniprot ID: Q53R12
  ENST ID: ENST00000304568
  CDS Start-End: 39-728
atagccactttgacaacgtttctgagccaggggtgaccatgacctgctgcgaaggatggacatcctgcaatggattcagcctgctggttctactgctgttaggagtagttctcaatgcgatacctctaattgtcagcttagttgaggaagaccaattttctcaaaaccccatctcttgctttgagtggtggttcccaggaattataggagcaggtctgatggccattccagcaacaacaatgtccttgacagcaagaaaaagagcgtgctgcaacaacagaactggaatgtttctttcatcacttttcagtgtgatcacagtcattggtgctctgtattgcatgctgatatccatccaggctctcttaaaaggtcctctcatgtgtaattctccaagcaacagtaatgccaattgtgaattttcattgaaaaacatcagtgacattcatccagaatccttcaacttgcagtggtttttcaatgactcttgtgcacctcctactggtttcaataaacccaccagtaacgacaccatggcgagtggctggagagcatctagtttccacttcgattctgaagaaaacaaacataggcttatccacttctcagtatttttaggtctattgcttgttggaattctggaggtcctgtttgggctcagtcagatagtcatcggtttccttggctgtctgtgtggagtctctaagcgaagaagtcaaattgtgtagtttaatgggaataaaatgtaagtatcagtagtttgaattaatttgagaagtacacttgttttcaaagtcatctttgagatgatttaaaaaatcaacccttcacgtagaaagcacgttgtaaatgcataacactctcatatcagtggttgatttgggaaaggtggagagaattttcaattagttttgtgttgtactattcaaattttttacctcttcactgtgtgtagagaaaggagaagggaaggaggatgagaaggaacggaagtcatcctgaaaataaaagtacaggactttttttttttttttttgagacagggtctcaaaaaaggctggagtacagtagtacagtggtgctatctcagcttactgcagcctcaacctcctgggctcaggtgattctcccatctcagcctccctagtagctgggactacaggtgcgtgccactatgccaagctaatttttgtatttttagtagagatgggggttttccatattgcccaggctggtcccgaactcatggactcaagtgatctgcctgcctcagcctcctaaagtgctgcgattacaggcatgagccatcgcgcctaaaggacaggacctttttattgtatttctttaaagaataaatacataacctgaatgcaatcaagtctttagatctaattctcagcttgcagggaacactaggacaaatccaaaaagtgggtcagcgggcacagaatggcccaattttcaacaggaaaatgttataaaagaaaaatatttttgagggaactgttatagattaagagaatagaggcatgtttcagctaaacacatgtaaactttgtcagagataattgggaggagtatgtagaagaatcggattattgttaattttggtaggtctgataatggttttatagtataaaggctgagtaccccttatccaaaatgattaagatcagaagtgttttggctttcacatttttttggattttggaattttgcctataataatgagacatcttggggatgggatgcaagtctaaccacaaaattcatttatgtctcatacacactttgaacacctggcctgaaggtaatttcacacaatattttaaataactttgtgcatgaaacacaattttgactgcattttgactgcaactcatcacatgaggtcaggtatggaattttccacttgtggtgttacgttactggctcaaaaagttttggatctcggagcattctggattttgaatttttggattagtgatgctcaacctgtatacagaaatgtcctcatttttaaaaaaagaaatgcatatttatatgttttaaaattacttcaaccaaaagcaacggggagatgtttactgttatatttaggtgacaggtacatggcaattcattataccctcctattttcctatgtttacattattcattaattaaaaaacaatacctagaaaaacccaagactttcaaaagctattttctatatgtgccaatctttaaaaaacaggataacaagggtatttatcacattaaaatgttgtaaaacagcaaagctaaaaatctaaaa

SEQ ID NO: 193026 - DNA, 542 bp, Homo sapiens
  Payload ID: 18113
  Gene Name: transmembrane 4 L six family member 20
  ENST ID: ENST00000449706
  CDS Start-End: 500-542
aaacaggcacgtgtgttgggcagatactaaaaagtggtcatcattctcctcttcagttataagctaattctcttttcagctttatactgaaatatcttccccttcatcacatacagattaaatttctacatttttacagaattcttcagatacttccttttagccacaaatgtaaggagtactaaacccgagtggaactatgttatgcccactagcaaaagcatgcagcttactcagttttggtcaaatggcaaagactctggaaatcagacacttgattctcacagtcaggtggagtccaaccgatccagttccctacatataaaatgattccctaaacagttcttcaattcaacatcttatgaagacagcaaaaagatttgaaatggcacaacccacattctaagcgttaaattttaaccagaagattgggataaaaggcaacatagtaccatgcaagcatagccactttgacaacgtttctgagccaggggtgaccatgacctgctgcgaaggatggacatcctgcaatggattcagcc

SEQ ID NO: 193027 - DNA, 2101 bp, Homo sapiens
  Payload ID: 18114
  Gene Name: transmembrane 4 L six family member 4
  Uniprot ID: P48230
  ENST ID: ENST00000305354
  CDS Start-End: 905-1513
gtcaactcatcaggaccttttctctccctctctaccaatgctgaccttcctttccccttagccttagtggatgatggtttctttattcctatatggaagacatagctgagaaagttgattaggaaaactgtttttgctaattccatcacatcgtgtagggaaaagatagaacttaattacttaattgcgtaacaagtagagaaacacagcaatcagacaataaaatgaacagtagctttttgccttaaacaattcttttaagtctgagctcaatgatacacaactagaccatcaaattattttgatattgaggaaaacagaagctcttttggataaccctgaattccaggctttcagtggaaaagacaaagacacgcactgtacaccattaagtacttgggagacatgattttaaccaggatgtaactcaattatattagtgatttataaagagtctggagaaaatatttctttatttgggcatgggcactgtcagattaaaggtgcagtggttctaaatgctgtttgttccagccctgtcttcgattgcaacaatgtgagtgtcttgtctgtgctggtggattattaacagaggttattggtctccatggcaaaacgattgaatgattgctctgaacgtaatctcatttatgggggtgcaaaaaacaaagcacttcaggtcagggagaatgtataaatgtccattgccatcgaggttctgctatttttgagaagctgaagcaactccaaggacacagttcacagaaatttggttctcagccccaaaatactgattgaattggagacaattacaaggactctctggccaaaaacccttgaagaggccccgtgaaggaggcagtgaggagcttttgattgctgacctgtgtcgtaccaccccagaatgtgcactgggggctgtgccagatgcctgggggggaccctcattccccttgctttttttggcttcctggctaacatcctgttattttttcctggaggaaaagtgatagatgacaacgaccacctttcccaagagatctggtttttcggaggaatattaggaagcggtgtcttgatgatcttccctgcgctggtgttcttgggcctgaagaacaatgactgctgtgggtgctgcggcaacgagggctgtgggaagcgatttgcgatgttcacctccacgatatttgctgtggttggattcttgggagctggatactcgtttatcatctcagccatttcaatcaacaagggtcctaaatgcctcatggccaatagtacatggggctaccccttccacgacggggattatctcaatgatgaggccttatggaacaagtgccgagagcctctcaatgtggttccctggaatctgaccctcttctccatcctgctggtcgtaggaggaatccagatggttctctgcgccatccaggtggtcaatggcctcctggggaccctctgtggggactgccagtgttgtggctgctgtgggggagatggacccgtttaaacctccgagatgagctgctcagactctacagcatgacgactacaatttcttttcataaaacttcttctcttcttggaattattaattcctatctgcttcctagctgataaagcttagaaaaggcagttattccttctttccaaccagctttgctcgagttagaattttgttattttcaaataaaaaatagtttggccacttaacaaatttgatttataaatctttcaaattagttcctttttagaatttaccaacaggttcaaagcatacttttcatgatttttttattacaaatgtaaaatgtataaagtcacatgtactgccatactacttctttgtatataaagatgtttatatctttggaagttttacataaatcaaaggaagaaagcacatttaaaatgagaaactaagaccaatttctgtttttaagaggaaaaagaatgattgatgtatcctaagtattgttatttgttgtctttttttgctgccttgcttgagttgcttgtgactgatcttttgaggctgtcatcatggctagggttcttttatgtatgttaaattaaaacctgaattcagaggtaacgt

SEQ ID NO: 193028 - DNA, 422 bp, Homo sapiens
  Payload ID: 18114
  Gene Name: transmembrane 4 L six family member 4
  ENST ID: ENST00000465758
  CDS Start-End: 180-422
ttttgagaagctgaagcaactccaaggacacagttcacagaaatttggttctcagccccaaaatactgattgaattggagacaattacaaggactctctggccaaaaacccttgaagaggccccgtgaaggaggcagtgaggagcttttgattgctgacctgtgtcgtaccaccccagaatgtgcactgggggctgtgccagatgcctgggggggaccctcattccccttgctttttttggcttcctggctaacatcctgttattttttcctggaggaaaagtgatagatgacaacgaccacctttcccaagagatctggtttttcggaggaatattaggaagcggtgtcttgatgttcacctccacgatatttgctgtggttggattcttgggagctggatactcgtttatcatctcagcc

SEQ ID NO: 193029 - DNA, 708 bp, Homo sapiens
  Payload ID: 18115
  Gene Name: transmembrane 4 L six family member 5
  Uniprot ID: O14894
  ENST ID: ENST00000270560
  CDS Start-End: 32-625
actcaccgcctgtccttcctgacacctcaccatgtgtacgggaaaatgtgcccgctgtgtggggctctccctcattaccctctgcctcgtctgcattgtggccaacgccctcctgctggtacctaatggggagacctcctggaccaacaccaaccatctcagcttgcaagtctggctcatgggcggcttcattggcgggggcctaatggtactgtgtccggggattgcagccgttcgggcagggggcaagggctgctgtggtgctgggtgctgtggaaaccgctgcaggatgctgcgctcggtcttctcctcggcgttcggggtgcttggtgccatctactgcctctcggtgtctggagctgggctccgaaatggacccagatgcttaatgaacggcgagtggggctaccacttcgaagacaccgcgggagcttacttgctcaaccgcactctatgggatcggtgcgaggcgccccctcgcgtggtcccctggaatgtgacgctcttctcgctgctggtggccgcctcctgcctggagatagtactgtgtgggatccagctggtgaacgcgaccattggtgtcttctgcggcgattgcaggaaaaaacaggacacacctcactgaggctccactgaccgccgggttacacctgctccttcctggacgctcactcccttgctcgctagaataaactgctttgcgctctc

SEQ ID NO: 193030 - DNA, 1469 bp, Homo sapiens
  Payload ID: 18116
  Gene Name: transmembrane 6 superfamily member 1
  ENST ID: ENST00000258909
  CDS Start-End: 24-461
gggcgagcggcgcggcggctgcgatgagtgcctctgcggccaccggggtcttcgtgctgtccctctcggccatcccggtcacctatgtcttcaaccacctggcggcccagcatgattcctggactattgtaggggttgctgccctcatcctgttcctggtagcactgctggctcgtgtcctcgtcaaaagaaaaccaccccgggacccactgttctatgtgtatgcagtttttggatttaccagcgtggtgaacctcatcataggactggagcaagatggaatcattgacgggttcatgacacactacttgagagagggtgaaccgtatctgaacaccgcatatgggcacatgatctgctactgggatggctctgctcattatctgatgtacctggtgatggtggcagccatagcatgggaatgctggcatatatgttctattctgttccttactttgtgactgcactgtatggcttagtggttcctggatgttcctggatgcctgacatcacattgatacatgctggaggtctggctcaggctcagttttctcacattggtgcatctcttcatgctagaactgcttatgtctacagagtccctgaagaagcaaaaatcctttttttagcattaaacatagcatatggagttcttcctcagctcttggcctatcgttgtatctacaaaccagagttcttcataaaaacaaaggcagaagaaaaagtggaataaaaatattacttcatgttcctcctttctaaattactaacttttgttatactggtactgatattttgtcccatttcactctcttctcatacgtgagtacttaagaatatgtacattcttgctctgcactgtatgtgtgagctatatggtattgtgtaaattttttttgaaggaaaatggaaattcttgagaaacagtttgtttaaagaaatatattcaaaatcatttgtgaataaacttgatcatccatctcaatattgtttgacatataaaataattataagtgtaaaaaattacaatttagtgccaacagtagtgagcatgaaatgaaactattcaaaagagaatatggcctgtgcatattaaaaaattcaaaacagtgaatgcagactggaggagtaacttttgcaaataagatgaatatgcttcattattaaactcaatataaaaggcaaatcatcagaatatttttaaatgttgtttgaaaaatgttttcccaaggaaagtttattatttgctgctgtttcaagaaaattacttttactaaatttttttgtgtgaatttaaacagctaaatagggatcagtaactttatctctatccttaatgaacatttgttttattggtggctggaaatatttctattgtatttctgtgtatatttttaataaaattatttttggcctcttataaagacaaatcttattaaatttgaaacatttcatatatacacataaaa

SEQ ID NO: 193031 - DNA, 2074 bp, Homo sapiens
  Payload ID: 18116
  Gene Name: transmembrane 6 superfamily member 1
  Uniprot ID: Q9BZW5
  ENST ID: ENST00000322019
  CDS Start-End: 275-1387
gtggcgcccctggcaggagcactgcaaggacgcctcccgggactgcaccgcggccctgcgcacttggggcgacggggccaggcgcgggggacggctgcgggctgggagggcgcgcggaggagacaccgctgaggggacgccgctgagggcgccacgcggggggcgcggctgaggcgcctcgaagggcaagcgccaagggggcgcgggcgccgccggaagctggggcggggcgcccagcgggatgcggtgaagggcgagcggcgcggcggctgcgatgagtgcctctgcggccaccggggtcttcgtgctgtccctctcggccatcccggtcacctatgtcttcaaccacctggcggcccagcatgattcctggactattgtaggggttgctgccctcatcctgttcctggtagcactgctggctcgtgtcctcgtcaaaagaaaaccaccccgggacccactgttctatgtgtatgcagtttttggatttaccagcgtggtgaacctcatcataggactggagcaagatggaatcattgacgggttcatgacacactacttgagagagggtgaaccgtatctgaacaccgcatatgggcacatgatctgctactgggatggctctgctcattatctgatgtacctggtgatggtggcagccatagcatgggaggaaacttatagaaccattggcctatattgggttggatctattattatgagtgttgttgtttttgtgccaggaaacattgtagggaagtatggaacacgaatttgccctgcttttttcttaagcataccatatacttgtcttcctgtctgggctggtttcagaatctataatcagccatcagaaaattataattacccctcaaaggttattcaagaagcccaagcgaaagacctgctgagaagaccatttgatttaatgttggttgtgtgtctcctcctggcaactggattttgcctgttcagaggtttgattgctttggattgcccatctgagctctgccgattatatacgcaatttcaagagccctatctaaaggatcctgctgcttatcctaaaattcagatgctggcatatatgttctattctgttccttactttgtgactgcactgtatggcttagtggttcctggatgttcctggatgcctgacatcacattgatacatgctggaggtctggctcaggctcagttttctcacattggtgcatctcttcatgctagaactgcttatgtctacagagtccctgaagaagcaaaaatcctttttttagcattaaacatagcatatggagttcttcctcagctcttggcctatcgttgtatctacaaaccagagttcttcataaaaacaaaggcagaagaaaaagtggaataaaaatattacttcatgttcctcctttctaaattactaacttttgttatactggtactgatattttgtcccatttcactctcttctcatacgtgagtacttaagaatatgtacattcttgctctgcactgtatgtgtgagctatatggtattgtgtaaattttttttgaaggaaaatggaaattcttgagaaacagtttgtttaaagaaatatattcaaaatcatttgtgaataaacttgatcatccatctcaatattgtttgacatataaaataattataagtgtaaaaaattacaatttagtgccaacagtagtgagcatgaaatgaaactattcaaaagagaatatggcctgtgcatattaaaaaattcaaaacagtgaatgcagactggaggagtaacttttgcaaataagatgaatatgcttcattattaaactcaatataaaaggcaaatcatcagaatatttttaaatgttgtttgaaaaatgttttcccaaggaaagtttattatttgctgctgtttcaagaaaattacttttactaaatttttttgtgtgaatttaaacagctaaatagggatcagtaactttatctctatccttaatgaacatttgttttattggtggctggaaatatttctattgtatttctgtgtatatttttaataaaattatttttggcctctta

SEQ ID NO: 193032 - DNA, 1808 bp, Homo sapiens
  Payload ID: 18116
  Gene Name: transmembrane 6 superfamily member 1
  ENST ID: ENST00000379384
  CDS Start-End: 34-435
atgcggtgaagggcgagcggcgcggcggctgcgatgagtgcctctgcggccaccggggtcttcgtgctgtccctctcggccatcccggtcacctatgtcttcaaccacctggcggcccagcatgattcctggactattgtaggggttgctgccctcatcctgttcctggtagcactgctggctcgtgtcctcgtcaaaagaaaaccaccccgggacccactgttctatgtgtatgcagtttttggatttaccagcgtggtgaacctcatcataggactggagcaagatggaatcattgacgggttcatgacacactacttgagagagggtgaaccgtatctgaacaccgcatatgggcacatgatctgctactgggatggctctgctcattatctgatgtacctggtgatggtggcagccatagcatgggagtaagtcagttcacctggtgtgtgcctttgccaccttagcaaccgataagcggggaaacttatagaaccattggcctatattgggttggatctattattatgagtgttgttgtttttgtgccaggaaacattgtagggaagtatggaacacgaatttgccctgcttttttcttaagcataccatatacttgtcttcctgtctgggctggtttcagaatctataatcagccatcagaaaattataattacccctcaaaggttattcaagaagcccaagcgaaagacctgctgagaagaccatttgatttaatgttggttgtgtgtctcctcctggcaactggattttgcctgttcagaggtttgattgctttggattgcccatctgagctctgccgattatatacgcaatttcaagagccctatctaaaggatcctgctgcttatcctaaaattcagatgctggcatatatgttctattctgttccttactttgtgactgcactgtatggcttagtggttcctggatgttcctggatgcctgacatcacattgatacatgctggaggtctggctcaggctcagttttctcacattggtgcatctcttcatgctagaactgcttatgtctacagagtccctgaagaagcaaaaatcctttttttagcattaaacatagcatatggagttcttcctcagctcttggcctatcgttgtatctacaaaccagagttcttcataaaaacaaaggcagaagaaaaagtggaataaaaatattacttcatgttcctcctttctaaattactaacttttgttatactggtactgatattttgtcccatttcactctcttctcatacgtgagtacttaagaatatgtacattcttgctctgcactgtatgtgtgagctatatggtattgtgtaaattttttttgaaggaaaatggaaattcttgagaaacagtttgtttaaagaaatatattcaaaatcatttgtgaataaacttgatcatccatctcaatattgtttgacatataaaataattataagtgtaaaaaattacaatttagtgccaacagtagtgagcatgaaatgaaactattcaaaagagaatatggcctgtgcatattaaaaaattcaaaacagtgaatgcagactggaggagtaacttttgcaaataagatgaatatgcttcattattaaactcaatataaaaggcaaatcatcagaatatttttaaatgttgtttgaaaaatgttttcccaaggaaagtttattatttgctgctgtttcaagaaaattacttttactaaatttttttgtgtgaatttaaacagctaaatagggatcagtaactttatctctatccttaatgaac

SEQ ID NO: 193033 - DNA, 1638 bp, Homo sapiens
  Payload ID: 18116
  Gene Name: transmembrane 6 superfamily member 1
  ENST ID: ENST00000379390
  CDS Start-End: 110-676
cggctgaggcgcctcgaagggcaagcgccaagggggcgcgggcgccgccggaagctggggcggggcgcccagcgggatgcggtgaagggcgagcggcgcggcggctgcgatgagtgcctctgcggccaccggggtcttcgtgctgtccctctcggccatcccggtcacctatgtcttcaaccacctggcggcccagcatgattcctggactattgtaggggttgctgccctcatcctgttcctggtagcactgctggctcgtgtcctcgtcaaaagaaaaccaccccgggacccactgttctatgtgtatgcagtttttggatttaccagcgtggtgaacctcatcataggactggagcaagatggaatcattgacgggttcatgacacactacttgagagagggtgaaccgtatctgaacaccgcatatgggcacatgatctgctactgggatggctctgctcattatctgatgtacctggtgatggtggcagccatagcatgggaggaaacttatagaaccattggcctatattgggttggatctattattatgagtgttgttgtttttgtgccaggaaacattgtagatgctggcatatatgttctattctgttccttactttgtgactgcactgtatggcttagtggttcctggatgttcctggatgcctgacatcacattgatacatgctggaggtctggctcaggctcagttttctcacattggtgcatctcttcatgctagaactgcttatgtctacagagtccctgaagaagcaaaaatcctttttttagcattaaacatagcatatggagttcttcctcagctcttggcctatcgttgtatctacaaaccagagttcttcataaaaacaaaggcagaagaaaaagtggaataaaaatattacttcatgttcctcctttctaaattactaacttttgttatactggtactgatattttgtcccatttcactctcttctcatacgtgagtacttaagaatatgtacattcttgctctgcactgtatgtgtgagctatatggtattgtgtaaattttttttgaaggaaaatggaaattcttgagaaacagtttgtttaaagaaatatattcaaaatcatttgtgaataaacttgatcatccatctcaatattgtttgacatataaaataattataagtgtaaaaaattacaatttagtgccaacagtagtgagcatgaaatgaaactattcaaaagagaatatggcctgtgcatattaaaaaattcaaaacagtgaatgcagactggaggagtaacttttgcaaataagatgaatatgcttcattattaaactcaatataaaaggcaaatcatcagaatatttttaaatgttgtttgaaaaatgttttcccaaggaaagtttattatttgctgctgtttcaagaaaattacttttactaaatttttttgtgtgaatttaaacagctaaatagggatcagtaactttatctctatccttaatgaacatttgttttattggtggctggaaatatttctattgtatttctgtgtatatttttaataaaattatttttggcctcttataaagacaaatcttattaaatttgaaacatttcatatatacacataaaa

SEQ ID NO: 193034 - DNA, 856 bp, Homo sapiens
  Payload ID: 18116
  Gene Name: transmembrane 6 superfamily member 1
  ENST ID: ENST00000565982
  CDS Start-End: 358-856
gtgctgtccctctcggccatcccggtcacctatgtcttcaaccacctggcggcccagcatgagtgagtgagccggcgcggcgggggtcgcgccgaggggcggcgggagttggctcgccgcgacgggagcctcgcaacttttccgagggggctgggaccgtccgccgcgggacagagttcctggactattgtaggggttgctgccctcatcctgttcctggtagcactgctggctcgtgtcctcgtcaaaagaaaaccaccccgggacccactgttctatgtgtatgcagtttttggatttaccagcgtggtgaacctcatcataggactggagcaagatggaatcattgacgggttcatgacacactacttgagagagggtgaaccgtatctgaacaccgcatatgggcacatgatctgctactgggatggctctgctcattatctgatgtacctggtgatggtggcagccatagcatgggaggaaacttatagaaccattggcctatattgggttggatctattattatgagtgttgttgtttttgtgccaggaaacattgtagggaagtatggaacacgaatttgccctgcttttttcttaagcataccatatacttgtcttcctgtctgggctggtttcagaatctataatcagccatcagaaaattataattacccctcaaaggttattcaagaagcccaagcgaaagacctgctgagaagaccatttgatttaatgttggttgtgtgtctcctcctggcaactggattttgcctgttcagaggtttgattgctttggattgcccatctgagctctgccgattatatacgcaatttcaagagccctatctaa

SEQ ID NO: 193035 - DNA, 407 bp, Homo sapiens
  Payload ID: 18116
  Gene Name: transmembrane 6 superfamily member 1
  ENST ID: ENST00000561551
  CDS Start-End: 1-92
tgtatggcttagtggttcctggatgttcctggatgcctgacatcacattgatacatgctggaggtctggctcagccagctgccatgctgtgagctgcctcatggtgagatccatggggcaaggcatcagaggaggcctctgggaaacaactcatgaggaactgaggcctccagtccaacaaccgtgaggagctgaatcctgccaggaacaatttgagtgatcttagaagaggatccatccccagttgagccttaagatgatctgagttcctgctgacacctggactgcattttggtatctcagttccttttgcaagagacccagagccagaggatttagcaagttgcacctgaatggactgttgatgagtcttgaaaagatgagataataaatgctgctttaagtca

SEQ ID NO: 193036 - DNA, 1020 bp, Homo sapiens
  Payload ID: 18116
  Gene Name: transmembrane 6 superfamily member 1
  Uniprot ID: Q9BZW5
  ENST ID: ENST00000565774
  CDS Start-End: 1-1020
atgagtgcctctgcggccaccggggtcttcgtgctgtccctctcggccatcccggtcacctatgtcttcaaccacctggcggcccagcatgattcctggactattgtaggggttgctgccctcatcctgttcctggtagcactgctggctcgtgtcctcgtcaaaagaaaaccaccccgggacccactgttctatgtgtatgcagtttttggatttaccagcgtggtgaacctcatcataggactggagcaagatggaatcattgacgggttcatgacacactacttgagagagggtgaaccgtatctgaacaccgcatatgggcacatgatctgctactgggatggctctgctcattatctgatgtacctggtgatggtggcagccatagcatgggaggaaacttatagaaccattggcctatattgggttggatctattattatgagtgttgttgtttttgtgccaggaaacattgtagggaagtatggaacacgaatttgccctgcttttttcttaagcataccatatacttgtcttcctgtctgggctggtttcagaatctataatcagccatcagaaaattataattacccctcaaaggttattcaagaagcccaagcgaaagacctgctgagaagaccatttgatttaatgttggttgtgtgtctcctcctggcaactggattttgcctgttcagaggtttgatgctggcatatatgttctattctgttccttactttgtgactgcactgtatggcttagtggttcctggatgttcctggatgcctgacatcacattgatacatgctggaggtctggctcaggctcagttttctcacattggtgcatctcttcatgctagaactgcttatgtctacagagtccctgaagaagcaaaaatcctttttttagcattaaacatagcatatggagttcttcctcagctcttggcctatcgttgtatctacaaaccagagttcttcataaaaacaaaggcagaagaaaaagtggaataa

SEQ ID NO: 193037 - DNA, 1505 bp, Homo sapiens
  Payload ID: 18117
  Gene Name: transmembrane 6 superfamily member 2
  Uniprot ID: Q9BZW4
  ENST ID: ENST00000389363
  CDS Start-End: 74-1207
actcgccgccaacgaggagccgagcgccctggagaacgcgtcggggctgagccggggtccagcagccgccgctatggacatcccgccgctggccggcaagatcgcggcgctgtcgctgagcgccctcccggtgtcctacgcgctcaaccacgtctcggcgctctcgcaccccctgtgggtggcattgatgagcgccctaatcctgggtctgcttttcgtggcggtctacagcttgtcccatggcgaggtctcctatgacccactctatgctgtcttcgctgtcttcgccttcacctcggttgtggacctcatcatcgctcttcaggaagacagctatgtggtgggcttcatggagttctacaccaaggagggagagccatacctgcgcacagcgcacggagtcttcatctgctactgggatggcactgttcactacctcctctacctggccatggccggcgccatctgcagaaggaagagataccggaattttggactctactggctgggttccttcgccatgagcatcctggtgttccttacaggaaacattcttggcaaatacagctccgagatcaggcctgccttcttcctcaccatcccctacctgctggtgccatgctgggctggcatgaaggtcttcagccagccccgggcgctaacccgctgcaccgccaacatggtgcaagaggaacaaagaaagggactcctgcagcgtccggctgacctggcccttgtcatatatctcatccttgctggcttcttcactctgttccggggcctggtggtgcttgattgccccacagatgcctgctttgtctatatctaccagtatgagccatacctgcgggaccctgtggcctaccctaaggtgcagatgctgatgtacatgttttatgtcctgcctttctgcggcctggctgcctatgctctcaccttccctggttgctcctggcttccagactgggccttggtgtttgctggaggcatcggccaggcacagttctcgcacatgggggcttccatgcacctgcgcacacccttcacctaccgtgtgcctgaggacacctggggctgcttcttcgtgtgcaatctgctgtatgcgctgggcccccacctgctggcctaccgttgccttcagtggcccgcattcttccaccagccaccaccctccgaccccctagccctccacaagaagcagcattgagagagctgtggactcaggacccaggactctgtttacgtgcccagtcagccctacctggggaagcgggggttgggtgttttagagacaggagggacatctccgggtgtctttagtcttggctatggtagtttcagtccagtgggtgggatggagaccaacgaccaagtgttcctgcaaggagagcctcccacagctgtcaccatgctccaactcccacacaaacgcttctaccccttccagaacttacccatcatccccccatggatcctttcagtaaaaaccctttcaatttccaaaa

SEQ ID NO: 193038 - DNA, 1722 bp, Homo sapiens
  Payload ID: 18118
  Gene Name: transmembrane 7 superfamily member 2
  Uniprot ID: O76062
  ENST ID: ENST00000279263
  CDS Start-End: 163-1419
gggacgagagcggtccttgtctgcgttccgtgtccaggcaggtgcaggcgccgcggggccggatcctccgcgcggccgagtccatctcctgggaaatggggcggacagtgtttccttgactgactattgtgagcgccctctctctccggcggagcggagaccatggcccccactcagggcccccgggccccgctggaattcggagggcccctgggcgccgcggctctgctactgctgctgcccgccaccatgttccacctgctcctggcggcccgttcgggccccgcgcgcctgctgggtccacccgcgtccctgccggggctggaggtgctgtggagcccacgggcgctgctgctgtggctcgcctggctcggcctgcaggcggcgctctacctactgccggcgcgcaaggtggccgaggggcaggaattgaaggacaagagtcgcctgcgctatcctattaacggcttccaggccctggtgctgacagccctgttggtggggctggggatgtcagcggggctgcctctgggggcgctcccggaaatgctcctgcccttggcgtttgtcgccaccctcaccgctttcatcttcagcctctttctctacatgaaggcgcaggtagccccagtttcggccctggcacctggggggaactcaggcaatccgatttacgacttttttctgggacgagagctcaaccctcgtatctgtttcttcgacttcaaatatttctgtgaactgcgacccggcctcatcggctgggtcctcatcaacctggccctgttgatgaaggaggcagagcttcgaggcagtccctcactggccatgtggctggtcaatggcttccagttgctctacgtgggtgatgccctctggcacgaggaggccgtcctcaccaccatggatatcacacatgacgggtttggcttcatgctggcgtttggggacatggcctgggtgcccttcacctacagcctgcaggcccagttcctgctgcaccacccgcagcccctggggttgcccatggcctctgtcatctgcctcatcaatgctactggttactacatcttccgtggggcgaattcccagaaaaacactttccgaaagaatccttctgaccccagagtggctgggcttgagaccatctctacagccacagggcggaaactgctggtgtctgggtggtggggtatggtccgccatcccaactatcttggagacctcatcatggctctggcttggtccttgccctgcggggtgtcacacctgctgccctacttctacctcctctacttcaccgcgctgctggtgcaccgtgaggcccgggatgagcggcagtgcctgcagaagtacggcctggcctggcaggagtactgccggcgtgtgccttaccgcatcatgccctacatctactgaagcggctccaccaccccaggtgggggcatgtgcccactcatccaccagcacacccaggaccaggagcctcgacacacttgggactcaagggcttgcaccccacccagccctgaggatgaacaacctcagagaagaggtggtttagagcaaggaaaaaaatgaaaccagtgaccaaaatcggagatgctcttcctcctttggataaacactgggaacccttggtgcacttctctcccctaggactggctgggtcagcactgatcagggagaagctgagcagtggcttgtgggcccaggaatctg

SEQ ID NO: 193039 - DNA, 1490 bp, Homo sapiens
  Payload ID: 18118
  Gene Name: transmembrane 7 superfamily member 2
  Uniprot ID: O76062
  ENST ID: ENST00000345348
  CDS Start-End: 133-1308
tgtccaggcaggtgcaggcgccgcggggccggatcctccgcgcggccgagtccatctcctgggaaatggggcggacagtgtttccttgactgactattgtgagcgccctctctctccggcggagcggagaccatggcccccactcagggcccccgggccccgctggaattcggagggcccctgggcgccgcggctctgctactgctgctgcccgccaccatgttccacctgctcctggcggcccgttcgggccccgcgcgcctgctgggtccacccgcgtccctgccggggctggaggtgctgtggagcccacgggcgctgctgctgtggctcgcctggctcggcctgcaggcggcgctctacctactgccggcgcgcaaggtggccgaggggcaggaattgaaggacaagagtcgcctgcgctatcctattaacggcttccaggccctggtgctgacagccctgttggtggggctggggatgtcagcggggctgcctctgggggcgctcccggaaatgctcctgcccttggcgtttgtcgccaccctcaccgctttcatcttcagcctctttctctacatgaaggcgcaggtagccccagtttcggccctggcacctggggggaactcaggcaatccgatttacgacttttttctgggacgagagctcaaccctcgtatctgtttcttcgacttcaaatatttctgtgaactgcgacccggcctcatcggctgggtcctcatcaacctggccctgttgatgaaggaggcagagcttcgaggcagtccctcactggccatgtggctggtcaatggcttccagttgctctacgtgggtgatgccctctggcacgaggaggccgtcctcaccaccatggatatcacacatgacgggtttggcttcatgctggcgtttggggacatggcctgggtgcccttcacctacagcctgcaggcccagttcctgctgcaccacccgcagcccctggggttgcccatggcctctgtcatctgcctcatcaatgggcttgagaccatctctacagccacagggcggaaactgctggtgtctgggtggtggggtatggtccgccatcccaactatcttggagacctcatcatggctctggcttggtccttgccctgcggggtgtcacacctgctgccctacttctacctcctctacttcaccgcgctgctggtgcaccgtgaggcccgggatgagcggcagtgcctgcagaagtacggcctggcctggcaggagtactgccggcgtgtgccttaccgcatcatgccctacatctactgaagcggctccaccaccccaggtgggggcatgtgcccactcatccaccagcacacccaggaccaggagcctcgacacacttgggactcaagggcttgcaccccacccagccctgaggatgaacaacctcagagaagaggtggtttagagcaaggaaaaaaatgaaaccagtgaccaaaatcgga

SEQ ID NO: 193040 - DNA, 945 bp, Homo sapiens
  Payload ID: 18118
  Gene Name: transmembrane 7 superfamily member 2
  ENST ID: ENST00000531321
  CDS Start-End: 132-945
tccaggcaggtgcaggcgccgcggggccggatcctccgcgcggccgagtccatctcctgggaaatggggcggacagtgtttccttgactgactattgcgccgcggctctgctactgctgctgcccgccaccatgttccacctgctcctggcggcccgttcgggccccgcgcgcctgctgggtccacccgcgtccctgccggggctggaggtgctgtggagcccacgggcgctgctgctgtggctcgcctggctcggcctgcaggcggcgctctacctactgccggcgcgcaaggtggccgaggggcaggaattgaaggacaagagtcgcctgcgctatcctattaacggcaatccgatttacgacttttttctgggacgagagctcaaccctcgtatctgtttcttcgacttcaaatatttctgtgaactgcgacccggcctcatcggctgggtcctcatcaacctggccctgttgatgaaggaggcagagcttcgaggcagtccctcactggccatgtggctggtcaatggcttccagttgctctacgtgggtgatgccctctggcacgaggaggccgtcctcaccaccatggatatcacacatgacgggtttggcttcatgctggcgtttggggacatggcctgggtgcccttcacctacagcctgcaggcccagttcctgctgcaccacccgcagcccctggggttgcccatggcctctgtcatctgcctcatcaatgctactggttactacatcttccgtggggcgaattcccagaaaaacactttccgaaagaatccttctgaccccagagtggctgggcttgagaccatctctacagccacagggcggaaactgctggtgtctgggtggtggggtatggtccgccatcccaactatcttggagacctcatcatggctctggcttggtccttgccctgcg

SEQ ID NO: 193041 - DNA, 544 bp, Homo sapiens
  Payload ID: 18118
  Gene Name: transmembrane 7 superfamily member 2
  ENST ID: ENST00000527968
  CDS Start-End: 1-544
ccgatttacgacttttttctgggacgagagctcaaccctcgtatctgtttcttcgacttcaaatatttctgtgaactgcgacccggcctcatcggctgggtcctcatcaacctggccctgttgatgaaggaggcagagcttcgaggcagtccctcactggccatgtggctggtcaatggcttccagttgctctacgtgggtgatgccctctggcacgaggaggccgtcctcaccaccatggatatcacacatgacgggtttggcttcatgctggcgtttggggacatggcctgggtgcccttcacctacagcctgcaggcccagttcctgctgcaccacccgcagcccctggggttgcccatggcctctgtcatctgcctcatcaatgctactggttactacatcttccgtggggcgaattcccagaaaaacactttccgaaagaatccttctgaccccagagtggctggggtgtcacacctgctgccctacttctacctcctctacttcaccgcgctgctggtgcaccgtgaggcccgggatg

SEQ ID NO: 193042 - DNA, 829 bp, Homo sapiens
  Payload ID: 18118
  Gene Name: transmembrane 7 superfamily member 2
  ENST ID: ENST00000526809
  CDS Start-End: 172-829
aaaaaccctgggacgagagcggtccttgtctgcgttccgtgtccaggcaggtgcaggcgccgcggggccggatcctccgcgcggccgagtccatctcctgggaaatggggcggacagtgtttccttgactgactattgtgagcgccctctctctccggcggagcggagaccatggcccccactcagggcccccgggccccgctggaattcggagggcccctgggcgccgcggctctgctactgctgctgcccgccaccatgttccacctgctcctggcggcccgttcgggccccgcgcgcctgctgggtccacccgcgtccctgccggggctggaggtgctgtggagcccacgggcgctgctgctgtggctcgcctggctcggcctgcaggcggcgctctacctactgccggcgcgcaaggtcctcatcaacctggccctgttgatgaaggaggcagagcttcgaggcagtccctcactggccatgtggctggtcaatggcttccagttgctctacgtgggtgatgccctctggcacgaggaggccgtcctcaccaccatggatatcacacatgacgggtttggcttcatgctggcgtttggggacatggcctgggtgcccttcacctacagcctgcaggcccagttcctgctgcaccacccgcagcccctggggttgcccatggcctctgtcatctgcctcatcaatgctactggttactacatcttccgtggggcgaattcccagaaaaacactttccgaaagaatccttctgaccccagagtggctgggcttgagaccatctctacagccacagggcggaaactgc

SEQ ID NO: 193043 - DNA, 913 bp, Homo sapiens
  Payload ID: 18118
  Gene Name: transmembrane 7 superfamily member 2
  ENST ID: ENST00000534371
  CDS Start-End: 145-913
gtctgcgttccgtgtccaggcaggtgcaggcgccgcggggccggatcctccgcgcggccgagtccatctcctgggaaatggggcggacagtgtttccttgactgactattgtgagcgccctctctctccggcggagcggagaccatggcccccactcagggcccccgggccccgctggaattcggagggcccctgggcgccgcggctctgctactgctgctgcccgccaccatgttccacctgctcctggcggcccgttcgggccccgcgcgcctgctgggtccacccgcgtccctgccggggctggaggtgctgtggagcccacgggcgctgctgctgtggctcgcctggctcggcctgcaggcggcgctctacctactgccggcgcgcaaggcgcaggtagccccagtttcggccctggcacctggggggaactcaggcaatccgatttacgacttttttctgggacgagagctcaaccctcgtatctgtttcttcgacttcaaatatttctgtgaactgcgacccggcctcatcggctgggtcctcatcaacctggccctgttgatgaaggaggcagagcttcgaggcagtccctcactggccatgtggctggtcaatggcttccagttgctctacgtgggtgatgccctctggcacgaggaggccgtcctcaccaccatggatatcacacatgacgggtttggcttcatgctggcgtttggggacatggcctgggtgcccttcacctacagcctgcaggcccagttcctgctgcaccacccgcagcccctggggttgcccatggcctctgtcatctgcctcatcaatgctactggttactacatcttccgtggggcgaattcccagaaaaacactttccgaaagaatccttctgaccccagagtggctg

SEQ ID NO: 193044 - DNA, 365 bp, Homo sapiens
  Payload ID: 18118
  Gene Name: transmembrane 7 superfamily member 2
  ENST ID: ENST00000530750
  CDS Start-End: 19-365
tccggcggagcggagaccatggcccccactcagggcccccgggccccgctggaattcggagggcccctgggcgccgcggctctgctactgctgctgcccgccaccatgttccacctgctcctggcggcccgttcgggccccgcgcgcctgctgggtccacccgcgtccctgccggggctggaggtgctgtggagcccacgggcgctgctgctgtggctcgcctggctcggcctgcaggcggcgctctacctactgccggcgcgcaaggtggccgaggggcaggaattgaaggacaagagtcgcctgcgctatcctattaacggcaatccgatttacgacttttttctgggacgagagctcaaccc

SEQ ID NO: 193045 - DNA, 749 bp, Homo sapiens
  Payload ID: 18118
  Gene Name: transmembrane 7 superfamily member 2
  ENST ID: ENST00000529414
  CDS Start-End: 127-749
ggcaggtgcaggcgccgcggggccggatcctccgcgcggccgagtccatctcctgggaaatggggcggacagtgtttccttgactgactattgtgagcgccctctctctccggcggagcggagaccatggcccccactcagggcccccgggccccgctggaattcggagggcccctgggcgccgcggctctgctactgctgctgcccgccaccatgttccacctgctcctggcggcccgttcgggccccgcgcgcctgctgggtccacccgcgtccctgccggggctggaggtgctgtggagcccacgggcgctgctgctgtggctcgcctggctcggcctgcaggcggcgctctacctactgccggcgcgcaaggtggccgaggggcaggaattgaaggacaagagtcgcctgcgctatcctattaacggcttccaggccctggtgctgacagccctgttggtggggctggggatgtcagcggggctgcctctgggggcgctcccggaaatgctcctgcccttggcgtttgtcgccaccctcaccgctttcatcttcagcctctttctctacatgaaggcgcaggtagccccagtttcggccctggcacctggggggaactcagagctcaaccctcgtatctgtttcttcgacttcaaatatttctgtgaactgcgacccggcctcatcggctgggtcctcatcaacctggccctgttgatgaaggaggcagagcttcgaggcagtcc

SEQ ID NO: 193046 - DNA, 1014 bp, Homo sapiens
  Payload ID: 18118
  Gene Name: transmembrane 7 superfamily member 2
  ENST ID: ENST00000525385
  CDS Start-End: 139-1014
ttccgtgtccaggcaggtgcaggcgccgcggggccggatcctccgcgcggccgagtccatctcctgggaaatggggcggacagtgtttccttgactgactattgcgccgcggctctgctactgctgctgcccgccaccatgttccacctgctcctggcggcccgttcgggccccgcgcgcctgctgggtccacccgcgtccctgccggggctggaggtgctgtggagcccacgggcgctgctgctgtggctcgcctggctcggcctgcaggcggcgctctacctactgccggcgcgcaaggtggccgaggggcaggaattgaaggacaagagtcgcctgcgctatcctattaacggcttccaggccctggtgctgacagccctgttggtggggctggggatgtcagcggggctgcctctgggggcgctcccggaaatgctcctgcccttggcgtttgtcgccaccctcaccgctttcatcttcagcctctttctctacatgaaggcgcaggtagccccagtttcggccctggcacctggggggaactcaggcaatccgatttacgacttttttctgggacgagagctcaaccctcgtatctgtttcttcgacttcaaatatttctgtgaactgcgacccggcctcatcggctgggtcctcatcaacctggccctgttgatgaaggaggcagagcttcgaggcagtccctcactggccatgtggctggtcaatggcttccagttgctctacgtgggtgatgccctctggcacgaggaggccgtcctcaccaccatggatatcacacatgacgggtttggcttcatgctggcgtttggggacatggcctgggtgcccttcacctacagcctgcaggcccagttcctgctgcaccacccgcagcccctggggttgcccatggcctctgtcatctgcctcatcaatgctactggttactacatcttccgtggggcgaattcccagaaaaacactttccgaaagaatccttctgacccc

SEQ ID NO: 193047 - DNA, 570 bp, Homo sapiens
  Payload ID: 18118
  Gene Name: transmembrane 7 superfamily member 2
  ENST ID: ENST00000526085
  CDS Start-End: 126-570
gcaggtgcaggcgccgcggggccggatcctccgcgcggccgagtccatctcctgggaaatggggcggacagtgtttccttgactgactattgtgagcgccctctctctccggcggagcggagaccatggcccccactcagggcccccgggccccgctggaattcggagggcccctgggcaatccgatttacgacttttttctgggacgagagctcaaccctcgtatctgtttcttcgacttcaaatatttctgtgaactgcgacccggcctcatcggctgggtcctcatcaacctggccctgttgatgaaggaggcagagcttcgaggcagtccctcactggccatgtggctggtcaatggcttccagttgctctacgtgggtgatgccctctggcacgaggaggccgtcctcaccaccatggatatcacacatgacgggtttggcttcatgctggcgtttggggacatggcctgggtgcccttcacctacagcctgcaggcccagttcctgctgcaccacccgcagcccctggggttgcccatggcctctgtcatctgcctcatcaatg

SEQ ID NO: 193048 - DNA, 843 bp, Homo sapiens
  Payload ID: 18118
  Gene Name: transmembrane 7 superfamily member 2
  ENST ID: ENST00000524690
  CDS Start-End: 1-280
ggaattcggagggcccctgggcgccgcggctctgctactgctgctgcccgccaccatgttccacctgctcctggcggcccgttcgggccccgcgcgcctgctgggtccacccgcgtccctgccggggctggaggtgctgtggagcccacgggcgctgctgctgtggctcgcctggctcggcctgcaggcggcgctctacctactgccggcgcgcaaggtggccgaggggcaggaattgaaggacaagagtcgcctgcgctatcctattaacggtgcctaggggacgggccctcgcgctggagcttccaggccctggtgctgacagccctgttggtggggctggggatgtcagcggggctgcctctgggggcgctcccggaaatgctcctgcccttggcgtttgtcgccaccctcaccgctttcatcttcagcctctttctctacatgaaggcgcaggtagccccagtttcggccctggcacctggggggaactcaggcaatccgatttacgacttttttctgggacgagagctcaaccctcgtatctgtttcttcgacttcaaatatttctgtgaactgcgacccggcctcatcggctgggtcctcatcaacctggccctgttgatgaaggaggcagagcttcgaggcagtccctcactggccatgtggctggtcaatggcttccagttgctctacgtgggtgatgccctctggcacgaggaggccgtcctcaccaccatggatatcacacatgacgggtttggcttcatgctggcgtttggggacatggcctgggtgcccttcacctacagcctgcaggcccagttcctgctgcaccacccg

SEQ ID NO: 193049 - DNA, 1671 bp, Homo sapiens
  Payload ID: 18118
  Gene Name: transmembrane 7 superfamily member 2
  ENST ID: ENST00000529601
  CDS Start-End: 139-408
gttccgtgtccaggcaggtgcaggcgccgcggggccggatcctccgcgcggccgagtccatctcctgggaaatggggcggacagtgtttccttgactgactattgtgagcgccctctctctccggcggagcggagaccatggcccccactcagggcccccgggccccgctggaattcggagggcccctgggcgccgcggctctgctactgctgctgcccgccaccatgttccacctgctcctggcggcccgttcgggccccgcgcgcctgctgggtccacccgcgtccctgccggggctggaggtgctgtggagcccacgggcgctgctgctgtggctcgcctggctcggcctgcaggcggcgctctacctactgccggcgcgcaaggcttccaggccctggtgctgacagccctgttggtggggctggggatgtcagcggggctgcctctgggggcgctcccggaaatgctcctgcccttggcgtttgtcgccaccctcaccgctttcatcttcagcctctttctctacatgaaggcgcaggtagccccagtttcggccctggcacctggggggaactcaggcaatccgatttacgacttttttctgggacgagagctcaaccctcgtatctgtttcttcgacttcaaatatttctgtgaactgcgacccggcctcatcggctgggtcctcatcaacctggccctgttgatgaaggaggcagagcttcgaggcagtccctcactggccatgtggctggtcaatggcttccagttgctctacgtgggtgatgccctctggcacgaggaggccgtcctcaccaccatggatatcacacatgacgggtttggcttcatgctggcgtttggggacatggcctgggtgcccttcacctacagcctgcaggcccagttcctgctgcaccacccgcagcccctggggttgcccatggcctctgtcatctgcctcatcaatgctactggttactacatcttccgtggggcgaattcccagaaaaacactttccgaaagaatccttctgaccccagagtggctgggcttgagaccatctctacagccacagggcggaaactgctggtgtctgggtggtggggtatggtccgccatcccaactatcttggagacctcatcatggctctggcttggtccttgccctgcggggtgtcacacctgctgccctacttctacctcctctacttcaccgcgctgctggtgcaccgtgaggcccgggatgagcggcagtgcctgcagaagtacggcctggcctggcaggagtactgccggcgtgtgccttaccgcatcatgccctacatctactgaagcggctccaccaccccaggtgggggcatgtgcccactcatccaccagcacacccaggaccaggagcctcgacacacttgggactcaagggcttgcaccccacccagccctgaggatgaacaacctcagagaagaggtggtttagagcaaggaaaaaaatgaaaccagtgaccaaaatcggagatgctcttcctcctttggataaacactgggaacccttggtgcacttctctcccctaggactggctgggtcagcactgatcagggagaagctgagcagtggcttgtgggcccaggaatctggggtctggtgggacaatagctatccctc

SEQ ID NO: 193050 - DNA, 729 bp, Homo sapiens
  Payload ID: 18118
  Gene Name: transmembrane 7 superfamily member 2
  ENST ID: ENST00000524986
  CDS Start-End: 60-729
tccttgtctgcgttccgtgtccaggcgccgcggctctgctactgctgctgcccgccaccatgttccacctgctcctggcggcccgttcgggccccgcgcgcctgctgggtccacccgcgtccctgccggggctggaggtgctgtggagcccacgggcgctgctgctgtggctcgcctggctcggcctgcaggcggcgctctacctactgccggcgcgcaaggtggccgaggggcaggaattgaaggacaagagtcgcctgcgctatcctattaacggcttccaggccctggtgctgacagccctgttggtggggctggggatgtcagcggggctgcctctgggggcgctcccggaaatgctcctgcccttggcgtttgtcgccaccctcaccgctttcatcttcagcctctttctctacatgaaggcgcaggtagccccagtttcggccctggcacctggggggaactcaggcaatccgatttacgacttttttctgggacgagagctcaaccctcgtatctgtttcttcgacttcaaatatttctgtgaactgcgacccggcctcatcggctgggtcctcatcaacctggccctgttgatgaaggaggcagagcttcgaggcagtccctcactggccatgtggctggtcaatggcttccagttgctctacgtgggtgatgccctctggcacgaggaggccgtcctcaccaccatggatatcacacatg

SEQ ID NO: 193051 - DNA, 692 bp, Homo sapiens
  Payload ID: 18118
  Gene Name: transmembrane 7 superfamily member 2
  ENST ID: ENST00000528802
  CDS Start-End: 1-626
tttttctgggacgagagctcaaccctcgtatctgtttcttcgacttcaaatatttctgtgaactgcgacccggcctcatcggctgggtcctcatcaacctggccctgttgatgaaggaggcagagcttcgaggcagtccctcactggccatgtggctggtcaatggcttccagttgctctacgtgggtgatgccctctggcacgaggaggccgtcctcaccaccatggatatcacacatgacgggtttggcttcatgctggcgtttggggacatggcctgggtgcccttcacctacagcctgcaggcccagttcctgctgcaccacccgcagcccctggggttgcccatggcctctgtcatctgcctcatcaatgctactggttactacatcttccgtggggcgaattcccagaaaaacactttccgaaagaatccttctgaccccagagtggctgggcttgagaccatctctacagccacagggcggaaactgctggtgtctgggtggtggggtatggtccgccatcccaactatcttggagacctcatcatggctctggcttggtccttgccctgcgaccctggcgcttttgctgctgagccccgatgcccacatgagccatgaggggtgtcacacctgctgccctacttctacctcctctacttcaccgcgctgctggtgcaccgtgag

SEQ ID NO: 193052 - DNA, 1305 bp, Homo sapiens
  Payload ID: 18118
  Gene Name: transmembrane 7 superfamily member 2
  ENST ID: ENST00000529292
  CDS Start-End: 128-535
aggcaggtgcaggcgccgcggggccggatcctccgcgcggccgagtccatctcctgggaaatggggcggacagtgtttccttgactgactattgtgagcgccctctctctccggcggagcggagaccatggcccccactcagggcccccgggccccgctggaattcggagggcccctgggcgccgcggctctgctactgctgctgcccgccaccatgttccacctgctcctggcggcccgttcgggccccgcgcgcctgctgggtccacccgcgtccctgccggggctggaggtgctgtggagcccacgggcgctgctgctgtggctcgcctggctcggcctgcaggcggcgctctacctactgccggcgcgcaaggtggccgaggggcaggaattgaaggacaagagtcgcctgcgctatcctattaacggtcctcatcaacctggccctgttgatgaaggaggcagagcttcgaggcagtccctcactggccatgtggctggtcaatggcttccagttgctctacgtgggtgatgccctctggcacgaggaggccgtcctcaccaccatggatatcacacatgacgggtttggcttcatgctggcgtttggggacatggcctgggtgcccttcacctacagcctgcaggcccagttcctgctgcaccacccgcagcccctggggttgcccatggcctctgtcatctgcctcatcaatgctactggttactacatcttccgtggggcgaattcccagaaaaacactttccgaaagaatccttctgaccccagagtggctgggcttgagaccatctctacagccacagggcggaaactgctggtgtctgggtggtggggtatggtccgccatcccaactatcttggagacctcatcatggctctggcttggtccttgccctgcggggtgtcacacctgctgccctacttctacctcctctacttcaccgcgctgctggtgcaccgtgaggcccgggatgagcggcagtgcctgcagaagtacggcctggcctggcaggagtactgccggcgtgtgccttaccgcatcatgccctacatctactgaagcggctccaccaccccaggtgggggcatgtgcccactcatccaccagcacacccaggaccaggagcctcgacacacttgggactcaagggcttgcaccccacccagccctgaggatgaacaacctcagagaagaggtggtttagagcaaggaaaaaaatgaaaccagtgaccaaaatcggagatgctcttcctcctttggataaacactgggaaccctt

SEQ ID NO: 193053 - DNA, 2709 bp, Homo sapiens
  Payload ID: 18119
  Gene Name: transmembrane 7 superfamily member 3
  Uniprot ID: Q9NS93
  ENST ID: ENST00000343028
  CDS Start-End: 227-1939
gttgggggtcaggtgccggaagaggaaacctctcgctggggctaggagttcggcggggcgcgcgccggcggctgcggagctggcaggtgcgaagcgtctgcacctggcgggcgatggcgcccgatgcgggcgccccgggatagcgtgggcgaggctgcggggccccggcgcgcacgcccgcacctctccccagccctggcgtgggcccagcccggcccaggcagcaatggggttcctgcagctgctggtcgtagcggtgctggcatccgaacaccgggtggctggtgcagccgaggtcttcgggaattccagcgagggtcttattgaattttctgtggggaaatttagatacttcgagctcaataggccctttccagaggaagctattttgcatgatatttcaagcaatgtgacttttcttattttccaaatacactcacagtatcagaatacaactgtttccttttctccgactctcctttccaattcctcggaaacaggcactgccagtggactggttttcatccttagaccagagcagagtacatgcacttggtacttggggacttcaggcatacagcctgtccagaatatggctatcctactctcctactcagaaagagatcctgtccctggaggctgtaatttggagttcgatttagatattgatcccaacatttacttggagtataatttctttgaaacgactatcaagtttgccccagcaaacctaggctatgcgagaggcgtagatcccccaccatgtgacgctgggacagaccaggactccaggtggaggttgcagtatgatgtctatcagtattttctgcctgagaatgacctcactgaggagatgttgctgaagcatctgcagaggatggtcagtgtgccccaggtgaaggccagtgctctcaaggtggttaccctaacagctaatgataagacaagtgtttccttctcctccctcccgggacaaggtgtcatatacaatgtcattgtttgggacccgtttctaaatacatctgctgcctacattcctgctcacacatacgcttgcagctttgaggcaggagagggtagttgtgcttccctaggaagagtgtcttccaaagtgttcttcactctttttgccctgcttggtttcttcatttgtttctttggacacagattctggaaaacagaattattcttcataggctttatcatcatgggattcttcttttatatactgattacaagactgacacctatcaagtatgatgtgaatctgattctgacagctgtcactggaagcgtcggtggaatgttcttggtagctgtgtggtggcgatttggaatcctctcgatctgcatgctctgtgttggactagtgctggggttcctcatctcgtcagtgactttctttactccactgggaaacctaaagatttttcatgatgatggtgtattctgggtcactttctcttgcatagctatcctcattccagtagttttcatgggctgcctaagaatactgaacatactgacttgtggagtcattggctcctattcggtggttttagccattgacagttactggtccacaagcctttcctacatcactttgaacgtactcaagagagcgctcaacaaggatttccacagagctttcacaaatgtgccttttcaaactaatgacttcattatcctggcagtatggggcatgctggctgtaagtggaattacgttacagattcgaagagagagaggacgaccgttcttccctccccacccatacaagttatggaagcaagagagagagcgccgagtgacaaacattctggaccctagctaccacattcctccattgagagagaggctctatggccgattaacccagattaaagggctcttccagaaggagcagccagctggagagagaacgcctttgcttctgtagatgcccaggggcttggtcagtgtgcctcagctttggagttcatgcctggagtggttcaacagtctctggtgcaagtctaataagagatcaggcatatatatctgttctttgcataatattatggtgcccttattgatatatggtaagggtgtactaggggattaggatgattgtaagagaatgagaaagatgaccaaaaggttggtggtagggaggctttttcttatttccaaatacttgagaaattaccttttggtttacaaatctatgatcaacttattccattaaatagatacattaaaaaaattaaaaactgattcttctgcagagcactggtgtttctttttataaccccttgaaacaagtctctcacctgagcctgtctaaactttcggagggagtttattattgagtctttatctgtgacagtatttggagatttagggatttgatacttaggcctttgaattttagaatacaaaaagagaagcaagccagacatggtggctcacacctgtaatcccaatactgggaagccaaggtgggagtatcgcttgagcccaggagtttgagaccgacatgggcaacatgacaagaccccatctctacaaaaaaattaaaaaattagccaggcatggtggcacatgcctactcccagctcccaaggagactgagatgggaggatccctggagccctgaagattgaggctacagtgagccttgattgtgtcactgcactccagcttgggtgacagagaccctgtctcgag

SEQ ID NO: 193054 - DNA, 537 bp, Homo sapiens
  Payload ID: 18119
  Gene Name: transmembrane 7 superfamily member 3
  ENST ID: ENST00000535423
  CDS Start-End: 427-537
aaacctctcgctggggctaggagttcggcggggcgcgcgccggcggctgcggagctggcaggtcttattgaattttctgtggggaaatttagatacttcgagctcaataggccctttccagaggaagctattttgcatgatatttcaagcaatgtgacttttcttattttccaaatacactcacagtatcagaatacaactgtttccttttctccgatttggaataggacatgcacactggatcagctcagtaatttatgttttggtcgacttcctattcatgacaatgtttcttctggactgcagactctcctttccaattcctcggaaacaggcactgccagtggactggttttcatccttagaccagagcagagtacatgcacttggtacttggggacttcaggcatacagcctgtccagaatatggctatcctactctcctactcagaaagagatcctgtccctggaggctgtaatttggagttcgatttagatattgatcccaacatttacttggagtataatttctttgaa

SEQ ID NO: 193055 - DNA, 883 bp, Homo sapiens
  Payload ID: 18119
  Gene Name: transmembrane 7 superfamily member 3
  ENST ID: ENST00000535260
  CDS Start-End: 1-601
gttgctgaagcatctgcagaggatggtcagtgtgccccaggtgaaggccagtgctctcaaggtggttaccctaacagctaatgataagacaagtgtttccttctcctccctcccgggacaaggtgtcatatacaatgtcattgtttgggacccgtttctaaatacatctgctgcctacattcctgctcacacatacgcttgcagctttgaggcaggagagggtagttgtgcttccctaggaagagtgtcttccaaagtgttcttcactctttttgccctgcttggtttcttcatttgtttctttggacacagattctggaaaacagaattattcttcataggctttatcatcatgggattcttcttttatatactgattacaagactgacacctatcaagtatgatgtgaatctgattctgacagctgtcactggaagcgtcggtggaatgttcttggtagctgtgtggtggcgatttggaatcctctcgatctgcatgctctgtgttggactagtgctggggttcctcatctcgtcagtgactttctttactccactggagacaggatctctttctgtcacccatgctggactgcagtgacactatcatagctcactgcaacctcaaactctaaggctcaagccatcctcttacatcagcctcccaagtagctgggactacaggtgtgtgctgccatgcctggaaacctaaagatttttcatgatgatggtgtattctgggtcactttctcttgcatagctatcctcattccagtagttttcatgggctgcctaagaatactgaacatactgacttgtggagtcattggctcctattcggtggttttagccattgacagttactggtccacaagcctttcct

SEQ ID NO: 193056 - DNA, 579 bp, Homo sapiens
  Payload ID: 18119
  Gene Name: transmembrane 7 superfamily member 3
  ENST ID: ENST00000545600
  CDS Start-End: 231-579
gcgcgttgggggtcaggtgccggaagaggaaacctctcgctggggctaggagttcggcggggcgcgcgccggcggctgcggagctggcaggtgcgaagcgtctgcacctggcgggcgatggcgcccgatgcgggcgccccgggatagcgtgggcgaggctgcggggccccggcgcgcacgcccgcacctctccccagccctggcgtgggcccagcccggcccaggcagcaatggggttcctgcagctgctggtcgtagcggtgctggcatccgaacaccgggtggctggtgcagccgaggtcttcgggaattccagcgaggtttatctcgttgtaggtcttattgaattttctgtggggaaatttagatacttcgagctcaataggccctttccagaggaagctattttgcatgatatttcaagcaatgtgacttttcttattttccaaatacactcacagtatcagaatacaactgtttccttttctccgactctcctttccaattcctcggaaacaggcactgccagtggactggttttcatccttagaccagagcagagtacatgcacttggtact

SEQ ID NO: 193057 - DNA, 541 bp, Homo sapiens
  Payload ID: 18119
  Gene Name: transmembrane 7 superfamily member 3
  ENST ID: ENST00000545303
  CDS Start-End: 1-434
gtgtgccccaggtgaaggccagtgctctcaaggtggttaccctaacagctaatgataagacaagtgtttccttctcctccctcccgggacaaggtgtcatatacaatgtcattgtttgggacccgtttctaaatacatctgctgcctacattcctgctcacacatacgcttgcagctttgaggcaggagagggtagttgtgcttccctaggaagagtgtcttccaaagtgttcttcactctttttgccctgcttggtttcttcatttgtttctttggacacagattctggaaaacagaattattcttcataggctttatcatcatgggattcttcttttatatactgattacaagactgacacctatcaagtatgatgctgaacatactgacttgtggagtcattggctcctattcggtggttttagccattgacagttactggtccacaagcctttcctacatcactttgaacgtactcaagagagcgctcaacaaggatttccacagagctttcacaaatgtgccttttcaaactaatg

SEQ ID NO: 193058 - DNA, 623 bp, Homo sapiens
  Payload ID: 18119
  Gene Name: transmembrane 7 superfamily member 3
  ENST ID: ENST00000512808
  CDS Start-End: 278-623
tttttttttttttttttttgacggagtctcgctctgtcgcctaggctggagtgcagtggcatgatcttggctgactgcaacctccgacacccgggttcaagcaattctcctgcctcagcctccagagtagctgggattacaggcgcccgccaccacacccagctagtttttgtatttttagtacaggcggggtttcaccatgttgttcaggctggtctcgaactcctgacctcgtgatctgcccgccttggcctcccagagtgctgggattacaggcatgagccaccgcgcccggccgatttcaggtcttattgaattttctgtggggaaatttagatacttcgagctcaataggccctttccagaggaagctattttgcatgatatttcaagcaatgtgacttttcttattttccaaatacactcacagtatcagaatacaactgtttccttttctccgactctcctttccaattcctcggaaacaggcactgccagtggactggttttcatccttagaccagagcagagtacatgcacttggtacttggggacttcaggcatacagcctgtccagaatatggctatcctactctcctactcagaaagagatcctgtccctg

SEQ ID NO: 193059 - DNA, 737 bp, Homo sapiens
  Payload ID: 18119
  Gene Name: transmembrane 7 superfamily member 3
  ENST ID: ENST00000542019
  CDS Start-End: 206-355
gaggaaacctctcgctggggctaggagttcggcggggcgcgcgccggcggctgcggagctggcaggtgcgaagcgtctgcacctggcgggcgatggcgcccgatgcgggcgccccgggatagcgtgggcgaggctgcggggccccggcgcgcacgcccgcacctctccccagccctggcgtgggcccagcccggcccaggcagcaatggggttcctgcagctgctggtcgtagcggtgctggcatccgaacaccgggtggctggtgcagccgaggtcttcgggaattccagcgaggactctcctttccaattcctcggaaacaggcactgccagtggactggttttcatccttagaccagagcagagtacatgcacttggtacttggggacttcaggcatacagcctgtccagaatatggctatcctactctcctactcagaaagagatcctgtccctggaggctgtaatttggagttcgatttagatattgatcccaacatttacttggagtataatttctttgaaacgactatcaagtttgccccagcaaacctaggctatgcgagaggcgtagatcccccaccatgtgacgctgggacagaccaggactccaggtggaggttgcagtatgatgtctatcagtattttctgcctgagaatgacctcactgaggagatgttgctgaagcatctgcagaggatggtcagtgtgccccaggtgaaggccagtgctctc

SEQ ID NO: 193060 - DNA, 762 bp, Homo sapiens
  Payload ID: 18119
  Gene Name: transmembrane 7 superfamily member 3
  ENST ID: ENST00000543882
  CDS Start-End: 1-459
gaaacgactatcaagtttgccccagcaaacctaggctatgcgagaggcgtagatcccccaccatgtgacgctgggacagaccaggactccaggtggaggttgcagtatgatgtctatcagtattttctgcctgagaatgacctcactgaggagatgttgctgaagcatctgcagaggatggtcagtgtgccccaggtgaaggccagtgctctcaaggtggttaccctaacagctaatgataagacaagtgtttccttctcctccctcccgggacaaggtgtcatatacaatgtcattgtttgggacccgtttctaaatacatctgctgcctacattcctgctcacacatacgcttgcagctttgaggcaggagagggtagttgtgcttccctagctgtgctgtacctgcttctctgcctctccacctcatcaccctcctttatcactggattattttaaagcaaatccctggtcatcatgttactcacaaatatttcagaagagtgtcttccaaagtgttcttcactctttttgccctgcttggtttcttcatttgtttctttggacacagattctggaaaacagaattattcttcataggctttatcatcatgggattcttcttttatatactgattacaagactgacacctatcaagtatgatggaaacctaaagatttttcatgatgatggtgtattctgggtcactttctcttgcatagctatcctcattccagtagttttcatgggctgcctaagaa

SEQ ID NO: 193061 - DNA, 573 bp, Homo sapiens
  Payload ID: 18119
  Gene Name: transmembrane 7 superfamily member 3
  ENST ID: ENST00000539741
  CDS Start-End: 314-573
agaggaaacctctcgctggggctaggagttcggcggggcgcgcgccggcggctgcggagctggcaggtcttattgaattttctgtggggaaatttagatacttcgagctcaataggccctttccagaggaagctattttgcatgatatttcaagcaatgtgacttttcttattttccaaatacactcacagtatcagaatacaactgtttccttttctccggcactgccagtggactggttttcatccttagaccagagcagagtacatgcacttggtacttggggacttcaggcatacagcctgtccagaatatggctatcctactctcctactcagaaagagatcctgtccctggaggctgtaatttggagttcgatttagatattgatcccaacatttacttggagtataatttctttgaaacgactatcaagtttgccccagcaaacctaggctatgcgagaggcgtagatcccccaccatgtgacgctgggacagaccaggactccaggtggaggttgcagtatgatgtctatcagtattttctgcctgagaatgacctcactgagga

SEQ ID NO: 193062 - DNA, 568 bp, Homo sapiens
  Payload ID: 18119
  Gene Name: transmembrane 7 superfamily member 3
  ENST ID: ENST00000543655
  CDS Start-End: 160-568
ttttccaaatacactcacagtatcagaatacaactgtttccttttctccgaggcgtagatcccccaccatgtgacgctgggacagaccaggactccaggtggaggttgcagtatgatgtctatcagtattttctgcctgagaatgacctcactgaggagatgttgctgaagcatctgcagaggatggtcagtgtgccccaggtgaaggccagtgctctcaaggtggttaccctaacagctaatgataagacaagtgtttccttctcctccctcccgggacaaggtgtcatatacaatgtcattgtttgggacccgtttctaaatacatctgctgcctacattcctgctcacacatacgcttgcagctttgaggcaggagagggtagttgtgcttccctaggaagagtgtcttccaaagtgttcttcactctttttgccctgcttggtttcttcatttgtttctttggacacagattctggaaaacagaattattcttcataggctttatcatcatgggattcttcttttatatactgattacaagactgacacctatcaagtatgatg

SEQ ID NO: 193063 - DNA, 577 bp, Homo sapiens
  Payload ID: 18119
  Gene Name: transmembrane 7 superfamily member 3
  ENST ID: ENST00000543803
  CDS Start-End: 192-577
ctggggctaggagttcggcggggcgcgcgccggcggctgcggagctggcaggtgcgaagcgtctgcacctggcgggcgatggcgcccgatgcgggcgccccgggatagcgtgggcgaggctgcggggccccggcgcgcacgcccgcacctctccccagccctggcgtgggcccagcccggcccaggcagcaatggggttcctgcagctgctggtcgtagcggtgctggcatccgaacaccgggtggctggtgcagccgaggtcttcgggaattccagcgaggatcctgtccctggaggctgtaatttggagttcgatttagatattgatcccaacatttacttggagtataatttctttgaaacgactatcaagtttgccccagcaaacctaggctatgcgagaggcgtagatcccccaccatgtgacgctgggacagaccaggactccaggtggaggttgcagtatgatgtctatcagtattttctgcctgagaatgacctcactgaggagatgttgctgaagcatctgcagaggatggtcagtgtgccccaggtgaaggccagtgctctcaaggt

SEQ ID NO: 193064 - DNA, 244 bp, Homo sapiens
  Payload ID: 18119
  Gene Name: transmembrane 7 superfamily member 3
  ENST ID: ENST00000537406
  CDS Start-End: 1-244
ttttatatactgattacaagactgacacctatcaagtatgatggaaacctaaagatttttcatgatgatggtgtattctgggtcactttctcttgcatagctatcctcattccagtagttttcatgggctgcctaagaatactgaacatactgacttgtggagtcattggctcctattcggtggttttagccattgacagttactggtccacaagcctttcctacatcactttgaacgtactca

SEQ ID NO: 193065 - DNA, 601 bp, Homo sapiens
  Payload ID: 18119
  Gene Name: transmembrane 7 superfamily member 3
  ENST ID: ENST00000543088
  CDS Start-End: 402-601
gtgacgcagcgagagcccgggaggaggcgcgggaacgcgcgttgggggtcaggtgccggaagaggaaacctctcgctggggctaggagttcggcggggcgcgcgccggcggctgcggagctggcaggtcttattgaattttctgtggggaaatttagatacttcgagctcaataggccctttccagaggaagctattttgcatgatatttcaagcaatgtgacttttcttattttccaaatacactcacagtatcagaatacaactgtttccttttctccgactctcctttccaattcctcggaaacaggcactgccagtggactggttttcatccttagaccagagcagagtacatgcacttggtacttggggacttcaggcatacagcctgtccagaatatggctatcctactctcctactcagaaagagatcctgtccctggaggctgtaatttggagttcgatttagatattgatcccaacatttacttggagtataatttctttgaaacgactatcaagtttgccccagcaaacctaggctatgcgagaggcgtagatcccccaccatgtgacgctgggacagaccaggactccag

SEQ ID NO: 193066 - DNA, 788 bp, Homo sapiens
  Payload ID: 18119
  Gene Name: transmembrane 7 superfamily member 3
  ENST ID: ENST00000535819
  CDS Start-End: 380-788
gttcggcggggcgcgcgccggcggctgcggagctggcaggtgcgaagcgtctgcacctggcgggcgatggcgcccgatgcgggcgccccgggatagcgtgggcgaggctgcggggccccggcgcgcacgcccgcacctctccccagccctggcgtgggcccagcccggcccaggcagcaatggggttcctgcagctgctggtcgtagcggtgctggcatccgaacaccgggtggctggtgcagccgaggtcttcgggaattccagcgaggaggcgtagatcccccaccatgtgacgctgggacagaccaggactccaggtggaggttgcagtatgatgtctatcagtattttctgcctgagaatgacctcactgaggagatgttgctgaagcatctgcagaggatggtcagtgtgccccaggtgaaggccagtgctctcaaggtggttaccctaacagctaatgataagacaagtgtttccttctcctccctcccgggacaaggtgtcatatacaatgtcattgtttgggacccgtttctaaatacatctgctgcctacattcctgctcacacatacgcttgcagctttgaggcaggagagggtagttgtgcttccctaggaagagtgtcttccaaagtgttcttcactctttttgccctgcttggtttcttcatttgtttctttggacacagattctggaaaacagaattattcttcataggctttatcatcatgggattcttcttttatatactgattacaagactgacacctatcaagtatgatg

SEQ ID NO: 193067 - DNA, 666 bp, Homo sapiens
  Payload ID: 18119
  Gene Name: transmembrane 7 superfamily member 3
  ENST ID: ENST00000545344
  CDS Start-End: 1-666
gtttgggacccgtttctaaatacatctgctgcctacattcctgctcacacatacgcttgcagctttgaggcaggagagggtagttgtgcttccctagaattattcttcataggctttatcatcatgggattcttcttttatatactgattacaagactgacacctatcaagtatgatgtgaatctgattctgacagctgtcactggaagcgtcggtggaatgttcttggtagctgtgtggtggcgatttggaatcctctcgatctgcatgctctgtgttggactagtgctggggttcctcatctcgtcagtgactttctttactccactgggaaacctaaagatttttcatgatgatggtgtattctgggtcactttctcttgcatagctatcctcattccagtagttttcatgggctgcctaagaatactgaacatactgacttgtggagtcattggctcctattcggtggttttagccattgacagttactggtccacaagcctttcctacatcactttgaacgtactcaagagagcgctcaacaaggatttccacagagctttcacaaatgtgccttttcaaactaatgacttcattatcctggcagtatggggcatgctggctgtaagtggaattacgttacagattcgaagagagagagga

SEQ ID NO: 193068 - DNA, 2452 bp, Homo sapiens
  Payload ID: 18120
  Gene Name: transmembrane 9 superfamily member 1
  Uniprot ID: O15321
  ENST ID: ENST00000261789
  CDS Start-End: 360-2180
gacgtgtcctgggccgcgctgccgatcgccgggaggacccccgcctcgccgaagacgggcggggcaagccgagcctcacggggtccccggagctgggccgggcctccagatggagaaggcgcaacggggagttcttgagtaagccagagcggtgtccagcgcggtgtagccgcagccgccgctgtcaggcgcagcaacgggcaaccccgtagaagtcggtcggcaggtcctctccaacccgccgctaccgcgccgctgtgggagagaccccagcaggagcccaaaggcagctacgggggcgcgaaggccgctggcgccgcctcggccagcccttcccgcgcggttccactgccttaaggatgacagtcgtagggaaccctcgaagttggagctgccagtggttgccaatcctgatactgttgctgggcacaggccatgggccaggggtggaaggcgtgacacactacaaggccggcgaccctgttattctgtatgtcaacaaagtgggaccctaccataaccctcaggaaacttaccactactatcagcttccagtctgctgccctgagaagatacgtcacaaaagccttagcctgggtgaagtgctggatggggaccgaatggctgagtctttgtatgagatccgctttcgggaaaacgtggagaagagaattctgtgccacatgcagctcagttctgcacaggtggagcagctgcgccaggccattgaagaactgtactactttgaatttgtggtagatgacttgccaatccggggctttgtgggctacatggaggagagtggtttcctgccacacagccacaagataggactctggacccatttggacttccacctagaattccatggagaccgaattatatttgccaatgtttcagtgcgggacgtcaagccccacagcttggatgggttacgacctgacgagttcctaggccttacccacacttatagcgtgcgctggtctgagacttcagtggagcgtcggagtgacaggcgccgtggtgacgatggtggtttctttcctcgaacactggaaatccattggttgtccatcatcaactccatggtgcttgtgtttttactggtgggttttgtggctgtcattctaatgcgtgtgcttcggaatgacctggctcggtacaacttagatgaggagaccacctctgcaggttctggtgatgactttgaccagggtgacaatggctggaaaattatccatacagatgtcttccgcttccccccataccgtggtctgctctgtgctgtgcttggcgtgggtgcccagttcctggcccttggcactggcattattgtcatggcactgctgggcatgttcaatgtgcaccgtcatggggccattaactcagcagccatcttgttgtatgccctgacctgctgcatctctggctacgtgtccagccacttctaccggcagattggaggcgagcgttgggtgtggaacatcattctcaccaccagtctcttctctgtgcctttcttcctgacgtggagtgtggtgaactcagtgcattgggccaatggttcgacacaggctctgccagccacaaccatcctgctgcttctgacggtttggctgctggtgggctttcccctcactgtcattggaggcatctttgggaagaacaacgccagcccctttgatgcaccctgtcgcaccaagaacatcgcccgggagattccaccccagccctggtacaagtctactgtcatccacatgactgttggaggcttcctgcctttcagtgccatctctgtggagctgtactacatctttgccacagtatggggtcgggagcagtacactttgtacggcatcctcttctttgtcttcgccatcctgctgagtgtgggggcttgcatctccattgcactcacctacttccagttgtctggggaggattaccgctggtggtggcgatctgtgctgagtgttggctccaccggcctcttcatcttcctctactcagttttctattatgcccggcgctccaacatgtctggggcagtacagacagtagagttcttcggctactccttactcactggttatgtcttcttcctcatgctgggcaccatctcctttttttcttccctaaagttcatccggtatatctatgttaacctcaagatggactgagttctgtatggcagaactattgctgttctctccctttcttcatgccctgttgaactctcctaccagcttctcttctgattgactgaattgtgtgatggcattgttgccttcccttttgccctttgggcattccttccccagagagggcctggaaattataaatctctatcacataaggattatatatttgaactttttaagttgcctttagttttggtcctgatttttctttttacaattaccaaaataaaatttattaagaaaaaggctca

SEQ ID NO: 193069 - DNA, 2055 bp, Homo sapiens
  Payload ID: 18120
  Gene Name: transmembrane 9 superfamily member 1
  Uniprot ID: O15321
  ENST ID: ENST00000396854
  CDS Start-End: 291-1760
cgagcctcacggggtccccggagctgggccgggcctccagatggagaaggcgcaacggggagttcttgagtaagccagagcggtgtccagcgcggtgtagccgcagccgccgctgtcaggcgcagcaacgggcaaccccgtagaagtcggtcggcaggtcctctccaacccgccgctaccgcgccgctgtgggagagaccccagcaggagcccaaaggcagctacgggggcgcgaaggccgctggcgccgcctcggccagcccttcccgcgcggttccactgccttaaggatgacagtcgtagggaaccctcgaagttggagctgccagtggttgccaatcctgatactgttgctgggcacaggccatgggccaggggtggaaggcgtgacacactacaaggccggcgaccctgttattctgtatgtcaacaaagtgggaccctaccataaccctcaggaaacttaccactactatcagcttccagtctgctgccctgagaagatacgtcacaaaagccttagcctgggtgaagtgctggatggggaccgaatggctgagtctttgtatgagatccgctttcgggaaaacgtggagaagagaattctgtgccacatgcagctcagttctgcacaggtggagcagctgcgccaggccattgaagaactgtactactttgaatttgtggtagatgacttgccaatccggggctttgtgggctacatggaggagagtggtttcctgccacacagccacaagataggactctggacccatttggacttccacctagaattccatggagaccgaattatatttgccaatgtttcagtgcgggacgtcaagccccacagcttggatgggttacgacctgacgagttcctaggccttacccacacttatagcgtgcgctggtctgagacttcagtggagcgtcggagtgacaggcgccgtggtgacgatggtggtttctttcctcgaacactggaaatccattggttgtccatcatcaactccatggtgcttgtgtttttactggtgggttttgtggctgtcattctaatgcgtgtgcttcggaatgacctggctcggtacaacttagatgaggagaccacctctgcaggttctggtgatgactttgaccagggtgacaatggctggaaaattatccatacagatgtcttccgcttccccccataccgtggtctgctctgtgctgtgcttggcgtgggtgcccagttcctggcccttggcactggcattattgtcatggcactgctgggcatgttcaatgtgcaccgtcatggggccattaactcagcagccatcttgttgtatgccctgacctgctgcatctctggctacgtgtccagccacttctaccggcagattggaggcgagcgttgggtgtggaacatcattctcaccaccagtctcttctctgtgcctttcttcctgacgtggagtgtggtgaactcagtgcattgggccaatggttcgacacaggctctgccagccacaaccatcctgctgcttctgacggtttggctgctggtgggctttcccctcactgtcattggaggcatctttgggaagaacaacgccagcccctttgatgcaccctgtcgcaccaagaacatcgcccgggagattccaccccagccctggtacaagtctactgtcatccacatgactgttggaggcttcctgcctttcaggtatcctccctttattccatggctattactgtcaggttcctgacctcaatttttcctgtccctactcatccagtaccctaacccaacccgttgatccctggttcagtggtaccattcagagatcattaaatggttcctcctatccccaagcaggactgagcttgaatgatatgagagtgtctcacttataaagctctccggagacatttcccccttcaccttcctggtttctgactttaatgcctatggacatcatgtggggtttaaagcccatttgatgacccatttactttgttgaatacctctttgtgccaggcaaagaataaagtggaataaaa

SEQ ID NO: 193070 - DNA, 961 bp, Homo sapiens
  Payload ID: 18120
  Gene Name: transmembrane 9 superfamily member 1
  ENST ID: ENST00000528895
  CDS Start-End: 60-961
gcgcggtgaggaccccggggctgtggcgggaagggacccgaggttccactgccttaaggatgacagtcgtagggaaccctcgaagttggagctgccagtggttgccaatcctgatactgttgctgggcacaggccatgggccaggggtggaaggcgtgacacactacaaggccggcgaccctgttattctgtatgtcaacaaagtgggaccctaccataaccctcaggaaacttaccactactatcagcttccagtctgctgccctgagaagatacgtcacaaaagccttagcctgggtgaagtgctggatggggaccgaatggctgagtctttgtatgagatccgctttcgggaaaacgtggagaagagaattctgtgccacatgcagctcagttctgcacaggtggagcagctgcgccaggccattgaagaactgtactactttgaatttgtggtagatgacttgccaatccggggctttgtgggctacatggaggagagtggtttcctgccacacagccacaagataggactctggacccatttggacttccacctagaattccatggagaccgaattatatttgccaatgtttcagtgcgggacgtcaagccccacagcttggatgggttacgacctgacgagttcctaggccttacccacacttatagcgtgcgctggtctgagacttcagtggagcgtcggagtgacaggcgccgtggtgacgatggtggtttctttcctcgaacactggaaatccattggttgtccatcatcaactccatggtgcttgtgtttttactggtgggttttgtggctgtcattctaatgcgtgtgcttcggaatgacctggctcggtacaacttagatgaggagaccacctctgcaggttctggtgatgactttgaccagggtgacaatggctggaaaattatccatacagatgtcttccgcttccc

SEQ ID NO: 193071 - DNA, 2107 bp, Homo sapiens
  Payload ID: 18120
  Gene Name: transmembrane 9 superfamily member 1
  ENST ID: ENST00000529332
  CDS Start-End: 126-1388
caacccgccgctaccgcgccgctgtgggagagaccccagcaggagcccaaaggcagctacgggggcgcgaaggccgctggcgccgcctcggccagcccttcccgcgcggttccactgccttaaggatgacagtcgtagggaaccctcgaagttggagctgccagtggttgccaatcctgatactgttgctgggcacaggccatgggccaggggtggaaggcgtgacacactacaaggccggcgaccctgttattctgtatgtcaacaaagtgggaccctaccataaccctcaggaaacttaccactactatcagcttccagtctgctgccctgagaagatacgtcacaaaagccttagcctgggtgaagtgctggatggggaccgaatggctgagtctttgtatgagatccgctttcgggaaaacgtggagaagagaattctgtgccacatgcagctcagttctgcacaggtggagcagctgcgccaggccattgaagaactgtactactttgaatttgtggtagatgacttgccaatccggggctttgtgggctacatggaggagagtggtttcctgccacacagccacaagataggactctggacccatttggacttccacctagaattccatggagaccgaattatatttgccaatgtttcagtgcgggacgtcaagccccacagcttggatgggttacgacctgacgagttcctaggccttacccacacttatagcgtgcgctggtctgagacttcagtggagcgtcggagtgacaggcgccgtggtgacgatggtggtttctttcctcgaacactggaaatccattggttgtccatcatcaactccatggtgcttgtgtttttactggtgggttttgtggctgtcattctaatgcgtgtgcttcggaatgacctggctcggtacaacttagatgaggagaccacctctgcaggttctggtgatgactttgaccagggtgacaatggctggaaaattatccatacagatgtcttccgcttccccccataccgtggtctgctctgtgctgtgcttggcgtgggtgcccagttcctggcccttggcactggcattattgtcatggcactgctgggcatgttcaatgtgcaccgtcatggggccattaactcagcagccatcttgttgtatgccctgacctgctgcatctctggctacgtgtccagccacttctaccggcagattggaggcgagcgttgggtgtggaacatcattctcaccaccagtctcttctctggctctgccagccacaaccatcctgctgcttctgacggtttggctgctggtgggctttcccctcactgtcattggaggcatctttgggaagaacaacgccagcccctttgatgcaccctgtcgcaccaagaacatcgcccgggagattccaccccagccctggtacaagtctactgtcatccacatgactgttggaggcttcctgcctttcagtgccatctctgtggagctgtactacatctttgccacagtatggggtcgggagcagtacactttgtacggcatcctcttctttgtcttcgccatcctgctgagtgtgggggcttgcatctccattgcactcacctacttccagttgtctggggaggattaccgctggtggtggcgatctgtgctgagtgttggctccaccggcctcttcatcttcctctactcagttttctattatgcccggcgctccaacatgtctggggcagtacagacagtagagttcttcggctactccttactcactggttatgtcttcttcctcatgctgggcaccatctcctttttttcttccctaaagttcatccggtatatctatgttaacctcaagatggactgagttctgtatggcagaactattgctgttctctccctttcttcatgccctgttgaactctcctaccagcttctcttctgattgactgaattgtgtgatggcattgttgccttcccttttgccctttgggcattccttccccagagagggcctggaaattataaatctctatcacataaggattatatatttgaactttttaagttgcctttagttttggtcctga

SEQ ID NO: 193072 - DNA, 882 bp, Homo sapiens
  Payload ID: 18120
  Gene Name: transmembrane 9 superfamily member 1
  ENST ID: ENST00000525592
  CDS Start-End: 156-882
gacgtgtcctgggccgcgctgccgatcgccgggaggacccccgcctcgccgaagacgggcggggcaagccgagcctcacggggtccccggagctgggccgggcctccagatggagaaggcgcaacggggagttcttgagttccactgccttaaggatgacagtcgtagggaaccctcgaagttggagctgccagtggttgccaatcctgatactgttgctgggcacaggccatgggccaggggtggaaggcgtgacacactacaaggccggcgaccctgttattctgtatgtcaacaaagtgggaccctaccataaccctcaggaaacttaccactactatcagcttccagtctgctgccctgagaagatacgtcacaaaagccttagcctgggtgaagtgctggatggggaccgaatggctgagtctttgtatgagatccgctttcgggaaaacgtggagaagagaattctgtgccacatgcagctcagttctgcacaggtggagcagctgcgccaggccattgaagaactgtactactttgaatttgtggtagatgacttgccaatccggggctttgtgggctacatggaggagagtggtttcctgccacacagccacaagataggactctggacccatttggacttccacctagaattccatggagaccgaattatatttgccaatgtttcagtgcgggacgtcaagccccacagcttggatgggttacgacctgacgagttcctaggccttacccacacttatagcgtgcgctggtctgagacttcagtggagcgtcggagtgacaggcgccgtggtgacgatggtggtttctttcctcgaacactggaaatccattggttgtccatcatcaactcca

SEQ ID NO: 193073 - DNA, 2425 bp, Homo sapiens
  Payload ID: 18120
  Gene Name: transmembrane 9 superfamily member 1
  ENST ID: ENST00000528669
  CDS Start-End: 390-2159
cccaaaggcagctacgggggcgcgaaggccgctggcgccgcctcggccagcccttcccgcgcggtgaggaccccggggctgtggcgggaagggacccgaggtgcgagaccgagcggcgttgccatggaaacgggccagggcgcgtagtagaggccccgggccagacgggctgcgggtggggtgaaccccaggttgggaggatgagagagcagaggtggagcggggtctttgggatagagagacgtggggtagggtgaggcggggagggggccaatgggagcaagtggagccaggggacctcagttcgaggcacctgacctggggtttctgtaacctccctggtttctataacctcaggattcccccaaacaggttccactgccttaaggatgacagtcgtagggaaccctcgaagttggagctgccagtggttgccaatcctgatactgttgctgggcacaggccatgggccaggggtggaaggcgtgacacactacaaggccggcgaccctgttattctgtatgtcaacaaagtgggaccctaccataaccctcaggaaacttaccactactatcagcttccagtctgctgccctgagaagatacgtcacaaaagccttagcctgggtgaagtgctggatggggaccgaatggctgagtctttgtatgagatccgctttcgggaaaacgtggagaagagaattctgtgccacatgcagctcagttctgcacaggtggagcagctgcgccaggccattgaagaactgtactactttgaatttgtggtagatgacttgccaatccggggctttgtgggctacatggaggagagtggtttcctgccacacagccacaagataggactctggacccatttggacttccacctagaattccatggagaccgaattatatttgccaatgtttcagtgcgggacgtcaagccccacagcttggatgggttacgacctgacgagttcctaggccttacccacacttatagcgtgcgctggtctgagacttcagtggagcgtcggagtgacaggcgccgtggtgacgatggtggtttctttcctcgaacactggaaatccattggttgtccatcatcaactccatggtgcttgtgtttttactggtgggttttgtggctgtcattctaatgcgtgtgcttcggaatgacctggctcggtacaacttagatgaggagaccacctctgcaggttctggtgatgactttgaccagggtgacaatggctggaaaattatccatacagatgtcttccgcttccccccataccgtggtctgctctgtgctgtgcttggcgtgggtgcccagttcctggcccttggcactggcattattgtcatggcactgctgggcatgttcaatgtgcaccgtcatggggccattaactcagcagccatcttgttgtatgccctgacctgctgcatctctggctacgtgtccagccacttctaccggcagattggaggcgagcgttgggtgtggaacatcattctcaccaccagtctcttctctgtgcctttcttcctgacgtggagtgtggtgaactcagtgcattgggccaatggttcgacacaggctctgccagccacaaccatcctgctgcttctgacggtttggctgctggtgggctttcccctcactgtcattggaggcatctttgggaagaacaacgccagcccctttgatgcaccctgtcgcaccaagaacatcgcccgggagattccaccccagccctgtgccatctctgtggagctgtactacatctttgccacagtatggggtcgggagcagtacactttgtacggcatcctcttctttgtcttcgccatcctgctgagtgtgggggcttgcatctccattgcactcacctacttccagttgtctggggaggattaccgctggtggtggcgatctgtgctgagtgttggctccaccggcctcttcatcttcctctactcagttttctattatgcccggcgctccaacatgtctggggcagtacagacagtagagttcttcggctactccttactcactggttatgtcttcttcctcatgctgggcaccatctcctttttttcttccctaaagttcatccggtatatctatgttaacctcaagatggactgagttctgtatggcagaactattgctgttctctccctttcttcatgccctgttgaactctcctaccagcttctcttctgattgactgaattgtgtgatggcattgttgccttcccttttgccctttgggcattccttccccagagagggcctggaaattataaatctctatcacataaggattatatatttgaactttttaagttgcctttagttttggtcctgatttttctttttacaattaccaaaataaaatttattaagaaaaa

SEQ ID NO: 193074 - DNA, 904 bp, Homo sapiens
  Payload ID: 18120
  Gene Name: transmembrane 9 superfamily member 1
  ENST ID: ENST00000528010
  CDS Start-End: 275-904
ggcctccagatggagaaggcgcaacggggagttcttgagtaagccagagcggtgtccagcgcggtgtagccgcagccgccgctgtcaggcgcagcaacgggcaaccccgtagaagtcggtcggcaggtcctctccaacccgccgctaccgcgccgctgtgggagagaccccagcaggagcccaaaggcagctacgggggcgcgaaggccgctggcgccgcctcggccagcccttcccgcgcggattcccccaaacaggttccactgccttaaggatgacagtcgtagggaaccctcgaagttggagctgccagtggttgccaatcctgatactgttgctgggcacaggccatgggccaggggtggaaggcgtgacacactacaaggccggcgaccctgttattctgtatgtcaacaaagtgggaccctaccataaccctcaggaaacttaccactactatcagcttccagtctgctgccctgagaagatacgtcacaaaagccttagcctgggtgaagtgctggatggggaccgaatggctgagtctttgtatgagatccgctttcgggaaaacgtggagaagagaattctgtgccacatgcagctcagttctgcacaggtggagcagctgcgccaggccattgaagaactgtactactttgaatttgtggtagatgacttgccaatccggggctttgtgggctacatggaggagagtggtttcctgccacacagccacaagataggactctggacccatttggacttccacctagaattccatggagaccgaattatatttgccaatgtttcagtgcgggacgtcaagccccacagcttggatgggttacgacctgacgagttcctaggccttacccacacttatagcgtgcgctggtctgag

SEQ ID NO: 193075 - DNA, 1938 bp, Homo sapiens
  Payload ID: 18120
  Gene Name: transmembrane 9 superfamily member 1
  ENST ID: ENST00000524835
  CDS Start-End: 365-1924
gaagacgggcggggcaagccgagcctcacggggtccccggagctgggccgggcctccagatggagaaggcgcaacggggagttcttgagtaagccagagcggtgtccagcgcggtgtagccgcagccgccgctgtcaggcgcagcaacgggcaaccccgtagaagtcggtcggcaggtcctctccaacccgccgctaccgcgccgctgtgggagagaccccagcaggagcccaaaggcagctacgggggcgcgaaggccgctggcgccgcctcggccagcccttcccgcgcgcttccagtctgctgccctgagaagatacgtcacaaaagccttagcctgggtgaagtgctggatggggaccgaatggctgagtctttgtatgagatccgctttcgggaaaacgtggagaagagaattctgtgccacatgcagctcagttctgcacaggtggagcagctgcgccaggccattgaagaactgtactactttgaatttgtggtagatgacttgccaatccggggctttgtgggctacatggaggagagtggtttcctgccacacagccacaagataggactctggacccatttggacttccacctagaattccatggagaccgaattatatttgccaatgtttcagtgcgggacgtcaagccccacagcttggatgggttacgacctgacgagttcctaggccttacccacacttatagcgtgcgctggtctgagacttcagtggagcgtcggagtgacaggcgccgtggtgacgatggtggtttctttcctcgaacactggaaatccattggttgtccatcatcaactccatggtgcttgtgtttttactggtgggttttgtggctgtcattctaatgcgtgtgcttcggaatgacctggctcggtacaacttagatgaggagaccacctctgcaggttctggtgatgactttgaccagggtgacaatggctggaaaattatccatacagatgtcttccgcttccccccataccgtggtctgctctgtgctgtgcttggcgtgggtgcccagttcctggcccttggcactggcattattgtcatggcactgctgggcatgttcaatgtgcaccgtcatggggccattaactcagcagccatcttgttgtatgccctgacctgctgcatctctggctacgtgtccagccacttctaccggcagattggaggcgagcgttgggtgtggaacatcattctcaccaccagtctcttctctgtgcctttcttcctgacgtggagtgtggtgaactcagtgcattgggccaatggttcgacacaggctctgccagccacaaccatcctgctgcttctgacggtttggctgctggtgggctttcccctcactgtcattggaggcatctttgggaagaacaacgccagcccctttgatgcaccctgtcgcaccaagaacatcgcccgggagattccaccccagccctggtacaagtctactgtcatccacatgactgttggaggcttcctgcctttcagtgccatctctgtggagctgtactacatctttgccacagtatggggtcgggagcagtacactttgtacggcatcctcttctttgtcttcgccatcctgctgagtgtgggggcttgcatctccattgcactcacctacttccagttgtctggggaggattaccgctggtggtggcgatctgtgctgagtgttggctccaccggcctcttcatcttcctctactcagttttctattatgcccggcgctccaacatgtctggggcagtacagacagtagagttcttcggctactccttactcactggttatgtcttcttcctcatgctgggcaccatctcctttttttcttccctaaagttcatccggtatatctatgttaacctcaagatggactgagttctgtatggcag

SEQ ID NO: 193076 - DNA, 1065 bp, Homo sapiens
  Payload ID: 18120
  Gene Name: transmembrane 9 superfamily member 1
  ENST ID: ENST00000530468
  CDS Start-End: 294-1065
ctccagatggagaaggcgcaacggggagttcttgagtaagccagagcggtgtccagcgcggtgtagccgcagccgccgctgtcaggcgcagcaacgggcaaccccgtagaagtcggtcggcaggtcctctccaacccgccgctaccgcgccgctgtgggagagaccccagcaggagcccaaaggcagctacgggggcgcgaaggccgctggcgccgcctcggccagcccttcccgcgcggtgaggaccccggggctgtggcgggaagggacccgaggttccactgccttaaggatgacagtcgtagggaaccctcgaagttggagctgccagtggttgccaatcctgatactgttgctgggcacaggccatgggccaggggtggaaggcgtgacacactacaaggccggcgaccctgttattctgtatgtcaacaaagtgggaccctaccataaccctcaggaaacttaccactactatcagcttccagtctgctgccctgagaagatacgtcacaaaagccttagcctgggtgaagtgctggatggggaccgaatggctgagtctttgtatgagatccgctttcgggaaaacgtggagaagagaattctgtgccacatgcagctcagttctgcacaggtggagcagctgcgccaggccattgaagaactgtactactttgaatttgtggtagatgacttgccaatccggggctttgtgggctacatggaggagagtggtttcctgccacacagccacaagataggactctggacccatttggacttccacctagaattccatggagaccgaattatatttgccaatgtttcagtgcgggacgtcaagccccacagcttggatgggttacgacctgacgagttcctaggccttacccacacttatagcgtgcgctggtctgagacttcagtggagcgtcggagtgacaggcgccgtggtgacgatggtggtttctttcctcgaacactggaaatccattggttgtccatcatcaactccatggtgcttgtgtttttactggtgggttttgtggctgtcattctaa

SEQ ID NO: 193077 - DNA, 505 bp, Homo sapiens
  Payload ID: 18120
  Gene Name: transmembrane 9 superfamily member 1
  ENST ID: ENST00000532632
  CDS Start-End: 105-505
cagcaggagcccaaaggcagctacgggggcgcgaaggccgctggcgccgcctcggccagcccttcccgcgcggattcccccaaacaggttccactgccttaaggatgacagtcgtagggaaccctcgaagttggagctgccagtggttgccaatcctgatactgttgctgggcacagccctggtacaagtctactgtcatccacatgactgttggaggcttcctgcctttcagtgccatctctgtggagctgtactacatctttgccacagtatggggtcgggagcagtacactttgtacggcatcctcttctttgtcttcgccatcctgctgagtgtgggggcttgcatctccattgcactcacctacttccagttgtctggggaggattaccgctggtggtggcgatctgtgctgagtgttggctccaccggcctcttcatcttcctctactcagttttctattatgcccggcgctccaacatgtctggggcagtacagacag

SEQ ID NO: 193078 - DNA, 721 bp, Homo sapiens
  Payload ID: 18120
  Gene Name: transmembrane 9 superfamily member 1
  ENST ID: ENST00000530563
  CDS Start-End: 99-721
ggggctgtggcgggaagggacccgagcttccagtctgctgccctgagaagatacgtcacaaaagccttagcctgggtgaagtgctggatggggaccgaatggctgagtctttgtatgagatccgctttcgggaaaacgtggagaagagaattctgtgccacatgcagctcagttctgcacaggtggagcagctgcgccaggccattgaagaactgtactactttgaatttgtggtagatgacttgccaatccggggctttgtgggctacatggaggagagtggtttcctgccacacagccacaagataggactctggacccatttggacttccacctagaattccatggagaccgaattatatttgccaatgtttcagtgcgggacgtcaagccccacagcttggatgggttacgacctgacgagttcctaggccttacccacacttatagcgtgcgctggtctgagacttcagtggagcgtcggagtgacaggcgccgtggtgacgatggtggtttctttcctcgaacactggaaatccattggttgtccatcatcaactccatggtgcttgtgtttttactggtgggttttgtggctgtcattctaatgcgtgtgcttcggaatgacctggctcggtacaacttagatgaggagaccacctctgcaggttctggtgatgactttgaccagggtgacaatggctggaaaattatccatac

SEQ ID NO: 193079 - DNA, 3430 bp, Homo sapiens
  Payload ID: 18121
  Gene Name: transmembrane 9 superfamily member 2
  Uniprot ID: Q99805
  ENST ID: ENST00000376387
  CDS Start-End: 191-2182
gcatgctctgttgcggtccgcttcggtttctgttgcgggacccggggtgtctcctagcgcaaccggaactagccttctgggggccggcttcctttatctctggcggccttgtagtcgtctccgagactccccacccctccttccctcttgaccccctaggtttgattgccctttccccgaaacaactatcatgagcgcgaggctgccggtgttgtctccacctcggtggccgcggctgttgctgctgtcgctgctcctgctgggggcggttcctggcccgcgccggagcggcgctttctacctgcccggcctggcgcccgtcaacttctgcgacgaagaaaaaaagagcgacgagtgcaaggccgaaatagaactatttgtgaacagacttgattcagtggaatcagttcttccttatgaatacacagcgtttgatttttgccaagcatcagaaggaaagcgcccatctgaaaatcttggtcaggtactattcggggaaagaattgaaccttcaccatataagtttacgtttaataagaaggagacctgtaagcttgtttgtacaaaaacataccatacagagaaagctgaagacaaacaaaagttagaattcttgaaaaaaagcatgttattgaattatcaacatcactggattgtggataatatgcctgtaacgtggtgttacgatgttgaagatggtcagaggttctgtaatcctggatttcctattggctgttacattacagataaaggccatgcaaaagatgcctgtgttattagttcagatttccatgaaagagatacattttacatcttcaaccatgttgacatcaaaatatactatcatgttgttgaaactgggtccatgggagcaagattagtggctgctaaacttgaaccgaaaagcttcaaacatacccatatagataaaccagactgctcagggccccccatggacataagtaacaaggcttctggggagataaaaattgcctatacttactctgttagcttcgaggaagatgataagatcagatgggcgtctagatgggactatattctggagtctatgcctcatacccacattcagtggtttagcattatgaattccctggtcattgttctcttcttatctggaatggtagctatgattatgttacggacactgcacaaagatattgctagatataatcagatggactctacggaagatgcccaggaagaatttggctggaaacttgttcatggtgatatattccgtcctccaagaaaagggatgctgctatcagtctttctaggatccgggacacagattttaattatgacctttgtgactctatttttcgcttgcctgggatttttgtcacctgccaaccgaggagcgctgatgacgtgtgctgtggtcctgtgggtgctgctgggcacccctgcaggctatgttgctgccagattctataagtcctttggaggtgagaagtggaaaacaaatgttttattaacatcatttctttgtcctgggattgtatttgctgacttctttataatgaatctgatcctctggggagaaggatcttcagcagctattccttttgggacactggttgccatattggccctttggttctgcatatctgtgcctctgacgtttattggtgcatactttggttttaagaagaatgccattgaacacccagttcgaaccaatcagattccacgtcagattcctgaacagtcgttctacacgaagcccttgcctggtattatcatgggagggattttgccctttggctgcatctttatacaacttttcttcattctgaatagtatttggtcacaccagatgtattacatgtttggcttcctatttctggtgtttatcattttggttattacctgttctgaagcaactatacttctttgctatttccacctatgtgcagaggattatcattggcaatggcgttcattccttacgagtggctttactgcagtttatttcttaatctatgcagtacactacttcttttcaaaactgcagatcacgggaacagcaagcacaattctgtactttggttataccatgataatggttttgatcttctttctttttacaggaacaattggcttctttgcatgcttttggtttgttaccaaaatatacagtgtggtgaaggttgactgaagaagtccagtgtgtccagttaaaacagaaataaattaaactcttcatcaacaaagacctgtttttgtgactgccttgagttttatcagaattattggcctagtaatccttcagaaacaccgtaattctaaataaacctcttcccatacacctttcccccataagatgtgtcttcaacactataaagcatttgtattgtgatttgattaagtatatatttggttgttctcaatgaagagcaaatttaaatattatgtgcatttgtaaatacagtagctataaaattttccatacttctaatggcagaatagaggaggccatattaaataatactgatgaaaggcaggacactgcattgtaaataggattttctaggctcggtaggcagaaagaattatttttctttgaaggaaataactttttatcatggtaattttgaaggatgattcctatgatgtgttcaccaggggaatgtggcttttaaagaaaatcttctattggttgtaactgttcatatcttcttacttttctgtgttgacttcattattcccatggtattggccttttaaactatgtgcctctgagtctttcaatttataaatttgttatcttaataaatattataaaaatgtcttcattgcatcattacctattatatattcaaggaggttctgtaaatacagatctatttaccaaggtgttttgaaatgatttatactattttatcagattttactggattttgttaatgtaacactttctgagttttgatctgaatggaatttcactgtgtaaggcattgtctaaaatgttcactgtgaggcagtagaggaggttgaagtcatgcatatctagacagatgaattatctgcaagtacttaaggtggagccttactacattgtcattaaggagtttctatttttgacttgtttttcaaaatacagtgttttaagtcaggttttattacctggacattagcaatcactagcaagtcttcatctttatgatttcattgttttaatttagatttcacaaacagttttacttctaagagttaagaaatgcactgtctttcacattcatctgactaattgaaatccatttatgtagaatataggaatggggggtgattctgaagtatcggtctgcttgtatctgtgagcatattcatttgtattttagggtctctctgcttgctgcttaggagagcaaatcagatactgtcattaaacttacaactaaaatta

SEQ ID NO: 193080 - DNA, 6141 bp, Homo sapiens
  Payload ID: 18122
  Gene Name: transmembrane 9 superfamily member 3
  Uniprot ID: Q9HD45
  ENST ID: ENST00000371142
  CDS Start-End: 218-1987
gaggaagaggctgaggaggcgcggggggcgggggaggctcaggagcgggcggtgacggcgacggcggcggcagaggaggcagcggctgggccgggccccgtgcgtctgtccgcgccccgtggatgcgaatcggccgcggcggaggcggcggcggcggaggaggcggcggcgggaggaggagtcggtgagccggctccgggccggaggggcgcggaggatgaggccgctgcctggcgctcttggcgtggcggcggccgccgcgctgtggctgctgctgctgctgctgccccggacccgggcggacgagcacgaacacacgtatcaagataaagaggaagttgtcttatggatgaatactgttgggccctaccataatcgtcaagaaacatataagtacttttcacttccattctgtgtggggtcaaaaaaaagtatcagtcattaccatgaaactctgggagaagcacttcaaggggttgaattggaatttagtggtctggatattaaatttaaagatgatgtgatgccagccacttactgtgaaattgatttagataaagaaaagagagatgcatttgtatatgccataaaaaatcattactggtaccagatgtacatagatgatttaccaatatggggtattgttggtgaggctgatgaaaatggagaagattactatctttggacctataaaaaacttgaaataggttttaatggaaatcgaattgttgatgttaatctaactagtgaaggaaaggtgaaactggttccaaatactaaaatccagatgtcatattcagtaaaatggaaaaagtcagatgtgaaatttgaagatcgatttgacaaatatcttgatccgtccttttttcaacatcggattcattggttttcaattttcaactccttcatgatggtgatcttcttggtgggcttagtttcaatgattttaatgagaacattaagaaaagattatgctcggtacagtaaagaggaagaaatggatgatatggatagagacctaggagatgaatatggatggaaacaggtgcatggagatgtatttagaccatcaagtcacccactgatattttcctctctgattggttctggatgtcagatatttgctgtgtctctcatcgttattattgttgcaatgatagaagatttatatactgagaggggatcaatgctcagtacagccatatttgtctatgctgctacgtctccagtgaatggttattttggaggaagtctgtatgctagacaaggaggaaggagatggataaagcagatgtttattggggcattccttatcccagctatggtgtgtggcactgccttcttcatcaatttcatagccatttattaccatgcttcaagagccattccttttggaacaatggtggccgtttgttgcatctgtttttttgttattcttcctctaaatcttgttggtacaatacttggccgaaatctgtcaggtcagcccaactttccttgtcgtgtcaatgctgtgcctcgtcctataccggagaaaaaatggttcatggagcctgcggttattgtttgcctgggtggaattttaccttttggttcaatctttattgaaatgtatttcatcttcacgtctttctgggcatataagatctattatgtctatggcttcatgatgctggtgctggttatcctgtgcattgtgactgtctgtgtgactattgtgtgcacatattttctactaaatgcagaagattaccggtggcaatggacaagttttctctctgctgcatcaactgcaatctatgtttacatgtattccttttactactattttttcaaaacaaagatgtatggcttatttcaaacatcattttactttggatatatggcggtatttagcacagccttggggataatgtgtggagcgattggttacatgggaacaagtgcctttgtccgaaaaatctatactaatgtgaaaattgactagagacccaagaaaacctggaactttggatcaatttctttttcataggggtggaacttgcacagcaaaaacaaacaaacgcaagaagagatttgggctttaacacactgggtactttgtgggtctctctttcgtcggtggcttaaagtaacatctatttccattgatcctaggttcttcctgactgctttctccaactgttcacagcaaatgcttggattttatgcagtaggcattactacagtacatggctaatcttcccaaaaactagctcattaaagatgaaatagaccagctctcttcagtgaagaggacaaatagtttatttaaagcatttgttccaataaaataaatagagggaaacttggatgctaaaattacatgaataggaatcttcctggcacttagtgtttctatgttattgaaaaatgatgttccagaaagattacttttttcctcttatttttactgccattgtcgacctattgtgggacatttttatatattgaatctgggttcttttttgactttttttttttcccaatccaacagcatccttttttttaaaagagagaattagaaaatattaaatcctgcatgtaatatatctgctgtcatcttagttggaccaacttcccatttatttatcttaaaactatacagttacatcttaattccatccaaagaagatacagtttgaagacagaagtgtactctctacaatgcaatttactgtacagttagaaagcaaagtgttaaatggagaagatacttgtttttattaaacattttgagatttagataaactacattttaactgaatgtctaaagtgattatcttttttccccccaagttagtcttaaatcttttgggtttgaatgaaggttttacataagaaattattaaaaacaaggggggtgggtaataaatgtatataacattaaataatgtaacgtaggtgtagattcccaaatgcatttggatgtacagatcgactacagagtacttttttcttatgatgattggtgtagaaatgtgtgatttgggtgggcttttacatcttgcctaccattgcatgaaacattggggtttcttcaaaatgtgtgtgtcatacttcttttgggaggggggttgttttcttctgtttattttctgagactcctacaggagccaaatttgtaatttagagacacttaattttgttaatcctgtctgggacacttaagtaacatctaaagcattattgctttagaatgttcaaataaaatttcctgaccaaattgttttgtggaaatagatgtgtttgcaatttgaagatatctttctgtccagaaggcaaaattaccgaatgccatttttaaaagtatgctataaactatgctactctcatacaggggacccgtattttaaaatctccagacttgcttacatctagattatccagcacaatcataaagtgaatgacaaaccctttgaatgaaattgtggcacaaaatctgttcaggttggtgtaccgtgtaaagtggggatggggtaaaagtggttaacgtactgttggatcaacaaataaaggttacagttttgtaagagaagtgatttgaatacatttttctggaactattcataatatgaagttttcctagaaccactgagtttctagtttaatagtttgctatgcaaatgaccacctaaaacaatactttatattgttatttttagaaagactcaaaacacctgtatttaaaccttaatatgaaaatcatgcaattaatagttacacaagatgttttcattacaaaatatgtacctatctattgatggactctacatcctatattgtgacatgtaagtcctttaaaaggtgaaaagtatgatttcttaccacttaagtatgattgatatgatccaacaaatttgatcagaagctgtaggtaaatcctcttctgaagccaaaatggtatattaaatataatttattggtacttccattttctcttccttcttacttgcctttaagatcttataaaaaagaaactaaaagttaatatttagttgcctatattatgtaaccttttaactatatataaagtacttttttggtttctttctcaccacttttattcaaaagtacttttaacataccaatacatagtctgtctgatgggagtataaattggacagtaaggttttgtcttaataaaatgaaatttgtttctcatgatatgaatcttgcaggtaagatgtagggtttattgaaaatgtgtgggttaaatgctttcaggtacaccaattctttctactaaattgagctctatttgaagttctttggaatctgtggtgaaaaataattttctgatttccaaatacattaagagcattaaatgaatattaatcacctttaaagtcttttagaaaaggacttgtattggtttttggctgcatagaggggttgaataagtgtatgtatgtgtgtgcgtgtgtgtgtgtcttcttaaagaagatgtaattcacaaatagtttagctccctagcgctcagttgtagaatagaaaatagaacattattcaagttaattgaaaggtgaggtttttatacccccactaatgctgtgtatctgtctttcgtttgttaacattatttgcttaatttctttcaactcacactttggataatactatcaaaaactaaggctaaacattccttgtgtatctttaagcatgcttctcctgaaatttaactacattagtagttgacatttgtatacatatatcctaatacaagagtaggataaggtggaaatgtaatggcctgagggatggtgaagcattcttttagtatttttcatcatgttgggctcctagattgtactggggttgcccataaatcaaaccccatactcttagaattcattatattatggtgatatccgaacctagtgaatggtatgcttgggtgttttccattgagagtggatggacctctttataaagttggttgctgcaaaatccagttcttccaaaagccactttatttagggtttattcacaagtcatatccattttggtacagtgtttgtttcctaatatttattaaccaccttataccaaatgtcttgcaaagaaatgttattaaaaccttgaatttttacaaatgtaaaaaacaaaaagtgtattaatgtatttgttcaggaaaagctacataccgaagggcttttgtatatgaattctgtggtggggagacccatttgtaatctatatggcagttccatctgggttttaagtttagatttcaccgtgtcttagtgcttcattctattggtttattggaacatgtaataaataggagtagtgatgtattaaaacacaagtattcattaatgttttatatcttcactaaaattctatagttatgaaactatcaatcaaggtgttatatttcagtcagaagtgaaaatttatgaagagtatttggaagtgtgtacagaaataaactagacttacaggtaggctagatcagaacgttaacatatgaacctgcagaaatctggtaagacttaaattcagtgtgaggaataactctagttctctcctatgagcatttcctaaaagccatctgatttggcattcttactggagctgcagacagaaatctacaaagacaaaagtaaacaaaattaagttattattccactgttaggaatggaaataaacttgtgaagtctgtttattttgaagtattggtgaactaggcttgctaattgataactgcagcagtttgtgtttactccagttcatcagcttaggtcatttgaaagatataagagcttaaggcaagaaagaaataacatggaattctatttgaaggacaacagaacattcttggaaaagcagctccagttggtttttcaactgtcaaacttgaatgtgtaagtccccacagagcatggacagtcggtgcagagttccaaggaaacaattattgcctgatgaccacttccattttgtatacactctttggttcgtataggccatattccaactggctttttagtaatagaaatccagtatataatgtatcaaatacaattgaggttctaacctagtgtgttaatttatctgaatttggatttttaaaaagtaataaaaagttaaatgtac

SEQ ID NO: 193081 - DNA, 868 bp, Homo sapiens
  Payload ID: 18122
  Gene Name: transmembrane 9 superfamily member 3
  ENST ID: ENST00000443638
  CDS Start-End: 108-868
cgtgattcattcacagcggcagacgagcgccaggaaagggttatttgatctgatccctcaagttccggaggcagcagtatcaagataaagaggaagttgtcttatggatgaatactgttgggccctaccataatcgtcaagaaacatataagtacttttcacttccattctgtgtggggtcaaaaaaaagtatcagtcattaccatgaaactctgggagaagcacttcaaggggttgaattggaatttagtggtctggatattaaatttaaagatgatgtgatgccagccacttactgtgaaattgatttagataaagaaaagagagatgcatttgtatatgccataaaaaatcattactggtaccagatgtacatagatgatttaccaatatggggtattgttggtgaggctgatgaaaatggagaagattactatctttggacctataaaaaacttgaaataggttttaatggaaatcgaattgttgatgttaatctaactagtgaaggaaaggtgaaactggttccaaatactaaaatccagatgtcatattcagtaaaatggaaaaagtcagatgtgaaatttgaagatcgatttgacaaatatcttgatccgtccttttttcaacatcggattcattggttttcaattttcaactccttcatgatggtgatcttcttggtgggcttagtttcaatgattttaatgagaacattaagaaaagattatgctcggtacagtaaagaggaagaaatggatgatatggatagagacctaggagatgaatatggatggaaacaggtgcatggagatgtatttagaccatcaagtcacccactgatattttcctctctgattggttctgg

SEQ ID NO: 193082 - DNA, 4032 bp, Homo sapiens
  Payload ID: 18123
  Gene Name: transmembrane 9 superfamily protein member 4
  ENST ID: ENST00000217315
  CDS Start-End: 341-2218
ccaagatggcgacggcgatggtgagtgaaggagactccgggagcgggagctggagcggggccctccggggtatcccaggatcttccagcaccccatgcctggccctgagccacctccgggacccctgactcaggcctgagggctacctctgactgggcttgtcttccccgaaatccacctccctggccctgcccctgcactcaggcttgtgaaggccccgagttttgggggaggcgccgtttcggaggaagacctcggctgctgccttcgccggttcccattctacttttggtctccgcccactgattggttgccgtggtctttactgcttttctccctgatgtgtgaaacaagcgccttctatgtgcctggggtcgcgcctatcaacttccaccagaacgatcccgtagaaatcaaggctgtgaagctcaccagctctcgaacccagctaccttatgaatactattcactgcccttctgccagcccagcaagataacctacaaggcagagaatctgggagaggtgctgagaggggaccggattgtcaacacccctttccaggttctcatgaacagcgagaagaagtgtgaagttctgtgcagccagtccaacaagccagtgaccctgacagtggagcagagccgactcgtggccgagcggatcacagaagactactacgtccacctcattgctgacaacctgcctgtggccacccggctggagctctactccaaccgagacagcgatgacaagaagaaggaaaaagatgtgcagtttgaacacggctaccggctcggcttcacagatgtcaacaagatctacctgcacaaccacctctcattcatcctttactatcatcgggaggacatggaagaggaccaggagcacacgtaccgtgtcgtccgcttcgaggtgattccccagagcatcaggctggaggacctcaaagcagatgagaagagttcgtgcactctgcctgagggtaccaactcctcgccccaagaaattgaccccaccaaggagaatcagctgtacttcacctactctgtccactgggaggaaagtgatatcaaatgggcctctcgctgggacacttacctgaccatgagtgacgtccagatccactggttttctatcattaactccgttgttgtggtcttcttcctgtcaggtatcctgagcatgattatcattcggaccctccggaaggacattgccaactacaacaaggaggatgacattgaagacaccatggaggagtctgggtggaagttggtgcacggcgacgtcttcaggcccccccagtaccccatgatcctcagctccctgctgggctcaggcattcagctgttctgtatgatcctcatcgtcatctttgtagccatgcttgggatgctgtcgccctccagccggggagctctcatgaccacagcctgcttcctcttcatgttcatgggggtgtttggcggattttctgctggccgtctgtaccgcactttaaaaggccatcggtggaagaaaggagccttctgtacggcaactctgtaccctggtgtggtttttggcatctgcttcgtattgaattgcttcatttggggaaagcactcatcaggagcggtgccctttcccaccatggtggctctgctgtgcatgtggttcgggatctccctgcccctcgtctacttgggctactacttcggcttccgaaagcagccatatgacaaccctgtgcgcaccaaccagattccccggcagatccccgagcagcggtggtacatgaaccgatttgtgggcatcctcatggctgggatcttgcccttcggcgccatgttcatcgagctcttcttcatcttcagtgctatctgggagaatcagttctattacctctttggcttcctgttccttgttttcatcatcctggtggtatcctgttcacaaatcagcatcgtcatggtgtacttccagctgtgtgcagaggattaccgctggtggtggagaaatttcctagtctccgggggctctgcattctacgtcctggtttatgccatcttttatttcgttaacaagctggacatcgtggagttcatcccctctctcctctactttggctacacggccctcatggtcttgtccttctggctgctaacgggtaccatcggcttctatgcagcctacatgtttgttcgcaagatctatgctgctgtgaagatagactgattggagtggaccacggccaagcttgctccgtcctcggacaggaagccaccctgcgtgggggactgcaggcacgcaaaataaaataactcctgctcgtttggaatgtaactcctggcacagtgttcctggatcctggggctgcgtggggggcgggagggcctgtagataatcttgcgtttttcgtcatcttattccagttctgtgggggatgagtttttttgtgggttgctttttcttcagtgctaagaaagttccctccaacaggaactctctgacctgtttattcaggtgtatttctggtttggatttttttttccttctttgttttaacaaatggatccaggatggataaatccaccgagataagggttttggtcactgtctccacctcagttcctcagggctgttggccaccctatgactaactggaagaggacacgccagagcttcagtgaggtttccgagcctctccctgcccatcctcaccactgaggccacgacaaagcacagctccagctcggacagcaccctcagtgccagccagcctctgccagacctctctttccctcttctccccagcctcctccagggctgcccaaggcagggtttccagccaggcctcggggtcatcttttcaccaggagcaaacccaagtcttagttgctacaagaaaatcccctggaagtactgggggccaggttccccagacagcaggaattgcccctgttcagagcagccggagtttgctggaccacaaggaagaagagaagagacttgcagtgaactgtttttgtgccaagaaaccctggacctggggccaagtatttcccaagccaagcatccacttgtctgtgtctgggaagggatggccaaggccgctagggtccttacccctcaggatcactccccagccctttcctcaggaggtaccgctctccaaggtgtgctagcagtgggccctgcccaacttcaggcagaacagggaggcccagagattacagatcccctcctgtaagtggccaggcattctctccctgccctctctggcctctggggtcatactcacttctttagccagccccatcccctccaccccacacctgagttcttgcctcctccttttggggacacccaaaacactgcttgtgagaaggaagatggaaggtaagttctgtcgttctttccccaatccccaggaatggacaagaagccaacttagaaagaagggtctcacgtggctggcctggctcctccgtagacccctgttcttttcaacctctgcccacccgtgcatgtcatcacaaacatttgctcttaagttacaagagaccacatccacccagggattagggttcaagtagcagctgctaacccttgcaccagcccttgtgggactcccaacacaagacaaagctcaggatgctggtgatgctaggaagatgtccctcccctcactgccccacattctcccagtggctctaccagcctcacccatcaaaccagtgaatttctcaatcttgcctcacagtgactgcagcgccaagcggcatccaccaagcatcaagttggagaaaagggaacccaagcagtagagagcgatattggagtcttttgttcattcaaatcttggatttttttttttccctaagagattctctttttagggggaatgggaaacggacacctcataaagggttcaaagatcatcaatttttctgactttttaaatcattatcattattatttttaattaaaaaaatgcctgtatgcctttttttggtcggattgtaaataaatataccattgtcctactg

SEQ ID NO: 193083 - DNA, 3978 bp, Homo sapiens
  Payload ID: 18123
  Gene Name: transmembrane 9 superfamily protein member 4
  Uniprot ID: Q92544
  ENST ID: ENST00000398022
  CDS Start-End: 236-2164
agtttctgccaggagctaatatggcttccttagttacaccgttctctctcttcacctaatcagcgaccttactttcccagaccagactgtcgagcaggagctaagactccttttcccctctgctgaccgccactacaggagcggttgaagccagacgaccaccttgtggagttaaactccgtaaccagggagcaccacttccgctgacgtcattacggcgacacgtggatccaagatggcgacggcgatggattggttgccgtggtctttactgcttttctccctgatgtgtgaaacaagcgccttctatgtgcctggggtcgcgcctatcaacttccaccagaacgatcccgtagaaatcaaggctgtgaagctcaccagctctcgaacccagctaccttatgaatactattcactgcccttctgccagcccagcaagataacctacaaggcagagaatctgggagaggtgctgagaggggaccggattgtcaacacccctttccaggttctcatgaacagcgagaagaagtgtgaagttctgtgcagccagtccaacaagccagtgaccctgacagtggagcagagccgactcgtggccgagcggatcacagaagactactacgtccacctcattgctgacaacctgcctgtggccacccggctggagctctactccaaccgagacagcgatgacaagaagaaggaaaaagatgtgcagtttgaacacggctaccggctcggcttcacagatgtcaacaagatctacctgcacaaccacctctcattcatcctttactatcatcgggaggacatggaagaggaccaggagcacacgtaccgtgtcgtccgcttcgaggtgattccccagagcatcaggctggaggacctcaaagcagatgagaagagttcgtgcactctgcctgagggtaccaactcctcgccccaagaaattgaccccaccaaggagaatcagctgtacttcacctactctgtccactgggaggaaagtgatatcaaatgggcctctcgctgggacacttacctgaccatgagtgacgtccagatccactggttttctatcattaactccgttgttgtggtcttcttcctgtcaggtatcctgagcatgattatcattcggaccctccggaaggacattgccaactacaacaaggaggatgacattgaagacaccatggaggagtctgggtggaagttggtgcacggcgacgtcttcaggcccccccagtaccccatgatcctcagctccctgctgggctcaggcattcagctgttctgtatgatcctcatcgtcatctttgtagccatgcttgggatgctgtcgccctccagccggggagctctcatgaccacagcctgcttcctcttcatgttcatgggggtgtttggcggattttctgctggccgtctgtaccgcactttaaaaggccatcggtggaagaaaggagccttctgtacggcaactctgtaccctggtgtggtttttggcatctgcttcgtattgaattgcttcatttggggaaagcactcatcaggagcggtgccctttcccaccatggtggctctgctgtgcatgtggttcgggatctccctgcccctcgtctacttgggctactacttcggcttccgaaagcagccatatgacaaccctgtgcgcaccaaccagattccccggcagatccccgagcagcggtggtacatgaaccgatttgtgggcatcctcatggctgggatcttgcccttcggcgccatgttcatcgagctcttcttcatcttcagtgctatctgggagaatcagttctattacctctttggcttcctgttccttgttttcatcatcctggtggtatcctgttcacaaatcagcatcgtcatggtgtacttccagctgtgtgcagaggattaccgctggtggtggagaaatttcctagtctccgggggctctgcattctacgtcctggtttatgccatcttttatttcgttaacaagctggacatcgtggagttcatcccctctctcctctactttggctacacggccctcatggtcttgtccttctggctgctaacgggtaccatcggcttctatgcagcctacatgtttgttcgcaagatctatgctgctgtgaagatagactgattggagtggaccacggccaagcttgctccgtcctcggacaggaagccaccctgcgtgggggactgcaggcacgcaaaataaaataactcctgctcgtttggaatgtaactcctggcacagtgttcctggatcctggggctgcgtggggggcgggagggcctgtagataatcttgcgtttttcgtcatcttattccagttctgtgggggatgagtttttttgtgggttgctttttcttcagtgctaagaaagttccctccaacaggaactctctgacctgtttattcaggtgtatttctggtttggatttttttttccttctttgttttaacaaatggatccaggatggataaatccaccgagataagggttttggtcactgtctccacctcagttcctcagggctgttggccaccctatgactaactggaagaggacacgccagagcttcagtgaggtttccgagcctctccctgcccatcctcaccactgaggccacgacaaagcacagctccagctcggacagcaccctcagtgccagccagcctctgccagacctctctttccctcttctccccagcctcctccagggctgcccaaggcagggtttccagccaggcctcggggtcatcttttcaccaggagcaaacccaagtcttagttgctacaagaaaatcccctggaagtactgggggccaggttccccagacagcaggaattgcccctgttcagagcagccggagtttgctggaccacaaggaagaagagaagagacttgcagtgaactgtttttgtgccaagaaaccctggacctggggccaagtatttcccaagccaagcatccacttgtctgtgtctgggaagggatggccaaggccgctagggtccttacccctcaggatcactccccagccctttcctcaggaggtaccgctctccaaggtgtgctagcagtgggccctgcccaacttcaggcagaacagggaggcccagagattacagatcccctcctgtaagtggccaggcattctctccctgccctctctggcctctggggtcatactcacttctttagccagccccatcccctccaccccacacctgagttcttgcctcctccttttggggacacccaaaacactgcttgtgagaaggaagatggaaggtaagttctgtcgttctttccccaatccccaggaatggacaagaagccaacttagaaagaagggtctcacgtggctggcctggctcctccgtagacccctgttcttttcaacctctgcccacccgtgcatgtcatcacaaacatttgctcttaagttacaagagaccacatccacccagggattagggttcaagtagcagctgctaacccttgcaccagcccttgtgggactcccaacacaagacaaagctcaggatgctggtgatgctaggaagatgtccctcccctcactgccccacattctcccagtggctctaccagcctcacccatcaaaccagtgaatttctcaatcttgcctcacagtgactgcagcgccaagcggcatccaccaagcatcaagttggagaaaagggaacccaagcagtagagagcgatattggagtcttttgttcattcaaatcttggatttttttttttccctaagagattctctttttagggggaatgggaaacggacacctcataaagggttcaaagatcatcaatttttctgactttttaaatcattatcattattatttttaattaaaaaaatgcctgtatgcctttttttggtcggattgtaaataaatataccattgtcctactg

SEQ ID NO: 193084 - DNA, 550 bp, Homo sapiens
  Payload ID: 18123
  Gene Name: transmembrane 9 superfamily protein member 4
  ENST ID: ENST00000450829
  CDS Start-End: 14-271
acgtggatccaagatggcgacggcgatggattggttgccgtggtctttactgcttttctccctgatgtgtgaaacaagcgccttctatgtgcctggggtcgcgcctatcaacttccaccagaacgatcccgtagaaatcaaggctgtgaagctcaccagctctcgaacccagctaccttatgaatactattcactgcccttctgccagcccagcaagataacctacaaggcagagaatctgggaaggagaaaggagagaactggttcttgagcaagcccctgaaagggctgccttctccgtcagggctacgcatggctcagatgtttctggaacctctagctgacaaatttatctactgccaggttctcatgaacagcgagaagaagtgtgaagttctgtgcagccagtccaacaagccagtgaccctgacagtggagcagagccgactcgtggccgagcggatcacagaagactactacgtccacctcattgctgacaacctgcctgtggccacccggctggagctctactccaaccgagacagcgatg

SEQ ID NO: 193085 - DNA, 553 bp, Homo sapiens
  Payload ID: 18123
  Gene Name: transmembrane 9 superfamily protein member 4
  ENST ID: ENST00000417389
  CDS Start-End: 310-516
agactccgggagcgggagctggagcggggccctccggggtatcccaggatcttccagcaccccatgcctggccctgagccacctccgggacccctgactcaggcctgagggctacctctgactgggcttgtcttccccgaaatccacctccctggccctgcccctgcactcaggcttgtgaaggccccgagttttgggggaggcgccgtttcggaggaagacctcggctgctgccttcgccggttcccattctacttttggtctccgcccactgattggttgccgtggtctttactgcttttctccctgatgtgtgaaacaagcgccttctatgtgcctggggtcgcgcctatcaacttccaccagaacgatcccgtagaaatcaaggctgtgaagctcaccagctctcgaacccagctaccttatgaatactattcactgcccttctgccagcccagcaagataacctacaaggcagagaatctgggttctcatgaacagcgagaagaagtgtgaagttctgtgcagccagtccaacaagccagtgaccctg

SEQ ID NO: 193086 - DNA, 563 bp, Homo sapiens
  Payload ID: 18123
  Gene Name: transmembrane 9 superfamily protein member 4
  ENST ID: ENST00000442842
  CDS Start-End: 25-282
attacggcgacacgtggatccaagatggcgacggcgatggattggttgccgtggtctttactgcttttctccctgatgtgtgaaacaagcgccttctatgtgcctggggtcgcgcctatcaacttccaccagaacgatcccgtagaaatcaaggctgtgaagctcaccagctctcgaacccagctaccttatgaatactattcactgcccttctgccagcccagcaagataacctacaaggcagagaatctgggaaggagaaaggagagaactggttcttgagcaagcccctgaaagggctgccttctccgtcagggctacgcatggctcagatgtttctggaacctctagctgacaaatttatctactgccaggagaggtgctgagaggggaccggattgtcaacacccctttccaggttctcatgaacagcgagaagaagtgtgaagttctgtgcagccagtccaacaagccagtgaccctgacagtggagcagagccgactcgtggccgagcggatcacagaagactactacgtccacctcattgctgacaacctgcctg

SEQ ID NO: 193087 - DNA, 5992 bp, Homo sapiens
  Payload ID: 18124
  Gene Name: transmembrane and coiled-coil domain family 1
  Uniprot ID: O94876
  ENST ID: ENST00000393238
  CDS Start-End: 342-2303
gacacagtgtccatcctcccagattggatctctttttcatatggatcttctgtttctatgtctttttaaaaaataactttttgggaaaccttttggattacaactgttcatcctcacctatgcaaagaaagggaagctattgctgggattttgaggagcttttcctaaaaggattgtacaccttagaagtgcttaaggaagagtgatgaagataggcatgaagccttcgtctcacagctgcatgcgtagtcactgttgaagcaaatgcctacctaatttgacactcttggtgtgtttaaaaaatttttttgagtttgcaaataagcatattaagtctactgatggagccttcgggcagtgaacagttatttgaggaccctgatcctggaggcaaatcccaagatgcagaggccagaaagcagacagaatcagaacaaaaattgtctaaaatgacccacaatgctttggagaacattaacgtgattggccaaggcttgaagcatctcttccagcaccagcgcaggaggtcatcagtgtctccacatgatgtgcagcaaattcaggcagatccagaacctgaaatggatctggaaagccagaacgcatgtgctgagattgatggtgtccccacccaccccacagctctgaatcgtgtcctgcagcagattcgagtgccacccaagatgaagagagggacaagcttgcatagtaggcggggcaagccagaggccccaaagggaagtccccaaatcaacaggaagtctggtcaggagatgacagctgttatgcagtcaggccgacccaggtcttcatccacaactgatgcacctaccagctctgctatgatggaaatagcttgtgctgctgctgctgctgctgctgcatgtctaccaggagaggagggaactgcggagcggatcgaacggttggaagtaagcagccttgcccaaacatccagtgcagtggcctccagtaccgatggcagcatccacacagactctgtggatggaacaccagaccctcagcgcacaaaggctgccattgctcacctgcagcagaagatcctgaagctcacagaacaaatcaagattgcacaaacagcccgggacgacaacgttgctgaatacttgaagcttgccaacagtgcagacaaacagcaggctgcccgcatcaagcaagtctttgagaagaagaaccagaaatctgcccaaactatcctccagctgcaaaagaaacttgagcactaccacaggaagctcagagaggtagagcagaatgggatcccccggcagccaaaggatgtcttcagggacatgcaccagggtctgaaggatgtaggagcaaaggtgactggcttcagtgaaggtgtggtggatagtgtcaaaggtgggttttccagcttctcccaggccacccattcagcagcaggcgctgtagtctcaaagcccagagagattgcctcactcattcggaacaaatttggcagtgcagacaacatccccaacctgaaggactctttagaggaagggcaagtggatgatgcggggaaggctttgggagtgatttcaaactttcagtctagcccaaaatatggtagtgaagaagattgttctagtgccacttcaggctcagtgggagccaacagcaccacagggggcatcgctgtaggagcatccagctccaaaacaaacaccctggacatgcagagctcaggatttgatgcactactacatgagatccaggagatccgggaaacccaggccagactagaggaatcctttgagactctcaaggaacattatcagagggactattccttaataatgcagaccttacaggaggagcgatatagatgtgaacgattggaagaacagctaaatgacctaacagagctccaccagaatgaaatcttgaacttgaagcaggaactggcaagcatggaagaaaaaatcgcgtatcagtcctatgaacgggcccgggacatccaggaggccctggaggcatgccagacgcgcatctccaagatggagctgcagcagcagcagcagcaggtggtgcagctagaagggctggagaatgccactgcccggaaccttctgggcaaactcatcaacatcctcctggctgtcatggcagtccttttggtctttgtctccactgtagccaactgtgtggtccccctcatgaagactcgcaacaggacgttcagcactttattccttgtggtttttattgcctttctctggaagcactgggacgccctcttcagctatgtggaacggttcttttcatcccctagatgatgctggcacagaaggcattgttccctaccctctggcgagtgcatgcagcagagagttagacagcaacttacctactctgaagttttctacaacaaaaaaagagttgagtgaatctgtttacatttagaataatgtttttttcttcaagagacgcaattgcaatagtattttttagattttatccaagaagttttttgggcgaaaatcttggatcatttttatgtagcatgattttccttgggatgcaaatcttaaaacagtcctttaatatgaaccaacaatctggagcacaccgaagggcaatctaaattgtggcttgaaggactgcactaaaacccactaaaaagatgcgaaaacctgatgagggcaaaccagttaaacctaacaccctgccttgtctgggctcatcacctctccctatcccagactaactttactgtgaaatcctaccacattccatgtctgaatttttggattcggggtggattttcgttgtccgtggaagaacacatggatctctctggctttctcacccaagttggccacttacgctaatcctggaagtatgatcacttttgaacctgccccttaaccttgacgaggatacaaaagtgaaagcatcatcccccaaaggatcactgcacagtcctactacagtatttttaagtagccctctaaatacttaattttaagcaaaatcccttggccgcacttttaaggtttttttatatgtgtatagttaccaacctaaaaataaaaaatccgaacagcatacttgaagaatgtaatactcaaactctcagtgcttccttatggtttctaataggattttttattattgttattattattattgggtttttttggacagggttgggagggtcttttatttttcctttgaaataaagaagtgatgtttttaaatgaagaaatgtgtggatatttaagtgtgctgctccctcttgtcttgaaacagtttgagtaagaaagtcttgctgtaaatgctgccctctgccgcctttgttttgagatgcagtttaaactccctctggctgctgctgctgctttttggtgtcccgacatacctacgcccccgttttatgggtttggcttagttgaagaggaaagggttgtgcaaggagagcaggaggctgtttccaaaaaccagtgtagtaggatagggattttttttttttttttttgccccaagaaaacgttcacccagtgatcttgggctggggttgtctttaggaaaagttgagactataagagtcataaataagtccttgtgtttccttaatttattttgttaacacccctaattacaaccaaagtgatgatgtggagtcttctgtcttcattttggccccagcattcttaatttcaaagctttattctgtctgcctaagagaatcaaccaaaggtgattctcctaaagagcagtgaaggaaatgtcaggttagcaggacccaagttttgggtgtgaaatgttgccagcttcctataatgtaaacggacttgttaacctaacctaattatgctcagtggacttctatagatggttttgaaaaatgaactgagctgccttcccccgtcgcataaccagttccatcatcctggtggaacttgaacatttagagtttatctagagagcttggttaatctttccatattatttgtagtattggtcacaaatgctgttccctcttagcctcattctgtgcaaccaagtgcatataagatgccctgaaaagagtaacaaagtatgctttgcctgtttccacttaccaggaaattccttcagaactagattagcattgccctgcctgtctgaaaggacagtttacctaatggtgccagcctccttttgctttggcaagctggatttctcagagccagcatgttgtttccataactactttgatattttaactcaggtactccagtcttcaccccaacctcagctgattgtagtacacctgctagctctgttgccccctcaaaactgcacccagagcagggccacaagggtgctttttttctttaaaaaaaaaaaaattagaaccaattcatgttcatgccaaaaacaaattgtccccaagcctatatgtattaaaatgttaactttgcctaaaaatattgcagtgactttttaggcaggagtgccaaaggacactatgaactttttgaactgacagtttctcctaactttctgctttagcgtaattgctcagagtagagagcccccacaaagttatttaaaagatgccctagcagcaatccaccagtttttctaagctagaacctttgagtcccccaaactgcctgaagacttaagttttgtgggcactggaagtcactttgatagatggattgaaactgttcctatttgccctgggacggtttctatctatcaaaggaaggttttcacctgtagaaagccccctgcctccagccaaatagtcccatgctgactttctatcttcctttctcaaactgtcttaggaaggaccttcagtgcagatcaggtgcagtaatggctttcttgtcccttaattattcaccagacccagaagttgtacgcatttaatgctgtttgtaaccatgcatctgttttcattctttgctgtaccttttgctgcccatcctgttacttttgagtttctttcattgtggttgttcttgggttcttttgtcttgtcagagctcttctataacctcgctctaatggcttaacagttgttctgggtggaaacgtcccctcatttgaatgctcctctaaaaaaaaaagaaaagaaaactgtattcattccctttaaaatgaaacattcctggtttatttgtccatgcctctagcctgggtgagtgaagctggctgtgttggcctgggtgattgttcaggttgtagaatgcgcattttacattgtttatgataattgaagggtacttctgtctgctccaatttccattccttggtatactcagtatgtcctagtaaggaaggctttccactctactggctccttaagaagcaaaagtaggttaaattttatacttcactgactagggtcttctctctcccctgttctgaatggagtaaaagtctgatgccaagacaaatattgggagcgagccttcctcactagccatgtccaaataatgagcgtattttcatgtggtcttcactgcatttggttttgtttctgatttcatgttcctttgaggtacagtcagatgaaaatgctgagttctgagagagttccaatgaggagctgcctttcagctttggaaaatatgcaactaaaacaaaaccaaacattattgtaatctgacacaggcaaaattatggttcccacaccccaaccccaaatgaaacctgggattttgaatgtggctctaagagttaacattgctgtctgtatgtcgtgtatgctaggtgatatcctcagtagggattgactactagactgtgtgttttatcaaagtgtgtaagaataaaaactcacttgcacgaattgaaacgtaaagaaatgacacttgtgaacgtgtgaacgttaacactgtagttgatagatcttaagctgctaattgttgagagagatttaaatttatgttctgtctggtcgctgcagattctcagcagcacttttactgtatatagaaattgaaataaagacctcagctattaa

SEQ ID NO: 193088 - DNA, 5484 bp, Homo sapiens
  Payload ID: 18124
  Gene Name: transmembrane and coiled-coil domain family 1
  ENST ID: ENST00000426664
  CDS Start-End: 178-1797
ggcggccgcagtggaaggagcaggcgcttgagctcgagcgacggcgctggcggagacgccggctgctcctcccctccccgccgcttttcctaaaaggattgtacaccttagaagtgcttaaggaagagtgatgaagctctgaatcgtgtcctgcagcagattcgagtgccacccaagatgaagagagggacaagcttgcatagtaggcggggcaagccagaggccccaaagggaagtccccaaatcaacaggaagtctggtcaggagatgacagctgttatgcagtcaggccgacccaggtcttcatccacaactgatgcacctaccagctctgctatgatggaaatagcttgtgctgctgctgctgctgctgctgcatgtctaccaggagaggagggaactgcggagcggatcgaacggttggaagtaagcagccttgcccaaacatccagtgcagtggcctccagtaccgatggcagcatccacacagactctgtggatggaacaccagaccctcagcgcacaaaggctgccattgctcacctgcagcagaagatcctgaagctcacagaacaaatcaagattgcacaaacagcccgggacgacaacgttgctgaatacttgaagcttgccaacagtgcagacaaacagcaggctgcccgcatcaagcaagtctttgagaagaagaaccagaaatctgcccaaactatcctccagctgcaaaagaaacttgagcactaccacaggaagctcagagaggtagagcagaatgggatcccccggcagccaaaggatgtcttcagggacatgcaccagggtctgaaggatgtaggagcaaaggtgactggcttcagtgaaggtgtggtggatagtgtcaaaggtgggttttccagcttctcccaggccacccattcagcagcaggcgctgtagtctcaaagcccagagagattgcctcactcattcggaacaaatttggcagtgcagacaacatccccaacctgaaggactctttagaggaagggcaagtggatgatgcggggaaggctttgggagtgatttcaaactttcagtctagcccaaaatatggtagtgaagaagattgttctagtgccacttcaggctcagtgggagccaacagcaccacagggggcatcgctgtaggagcatccagctccaaaacaaacaccctggacatgcagagctcaggatttgatgcactactacatgagatccaggagatccgggaaacccaggccagactagaggaatcctttgagactctcaaggaacattatcagagggactattccttaataatgcagaccttacaggaggagcgatatagatgtgaacgattggaagaacagctaaatgacctaacagagctccaccagaatgaaatcttgaacttgaagcaggaactggcaagcatggaagaaaaaatcgcgtatcagtcctatgaacgggcccgggacatccaggaggccctggaggcatgccagacgcgcatctccaagatggagctgcagcagcagcagcagcaggtggtgcagctagaagggctggagaatgccactgcccggaaccttctgggcaaactcatcaacatcctcctggctgtcatggcagtccttttggtctttgtctccactgtagccaactgtgtggtccccctcatgaagactcgcaacaggacgttcagcactttattccttgtggtttttattgcctttctctggaagcactgggacgccctcttcagctatgtggaacggttcttttcatcccctagatgatgctggcacagaaggcattgttccctaccctctggcgagtgcatgcagcagagagttagacagcaacttacctactctgaagttttctacaacaaaaaaagagttgagtgaatctgtttacatttagaataatgtttttttcttcaagagacgcaattgcaatagtattttttagattttatccaagaagttttttgggcgaaaatcttggatcatttttatgtagcatgattttccttgggatgcaaatcttaaaacagtcctttaatatgaaccaacaatctggagcacaccgaagggcaatctaaattgtggcttgaaggactgcactaaaacccactaaaaagatgcgaaaacctgatgagggcaaaccagttaaacctaacaccctgccttgtctgggctcatcacctctccctatcccagactaactttactgtgaaatcctaccacattccatgtctgaatttttggattcggggtggattttcgttgtccgtggaagaacacatggatctctctggctttctcacccaagttggccacttacgctaatcctggaagtatgatcacttttgaacctgccccttaaccttgacgaggatacaaaagtgaaagcatcatcccccaaaggatcactgcacagtcctactacagtatttttaagtagccctctaaatacttaattttaagcaaaatcccttggccgcacttttaaggtttttttatatgtgtatagttaccaacctaaaaataaaaaatccgaacagcatacttgaagaatgtaatactcaaactctcagtgcttccttatggtttctaataggattttttattattgttattattattattgggtttttttggacagggttgggagggtcttttatttttcctttgaaataaagaagtgatgtttttaaatgaagaaatgtgtggatatttaagtgtgctgctccctcttgtcttgaaacagtttgagtaagaaagtcttgctgtaaatgctgccctctgccgcctttgttttgagatgcagtttaaactccctctggctgctgctgctgctttttggtgtcccgacatacctacgcccccgttttatgggtttggcttagttgaagaggaaagggttgtgcaaggagagcaggaggctgtttccaaaaaccagtgtagtaggatagggattttttttttttttttttgccccaagaaaacgttcacccagtgatcttgggctggggttgtctttaggaaaagttgagactataagagtcataaataagtccttgtgtttccttaatttattttgttaacacccctaattacaaccaaagtgatgatgtggagtcttctgtcttcattttggccccagcattcttaatttcaaagctttattctgtctgcctaagagaatcaaccaaaggtgattctcctaaagagcagtgaaggaaatgtcaggttagcaggacccaagttttgggtgtgaaatgttgccagcttcctataatgtaaacggacttgttaacctaacctaattatgctcagtggacttctatagatggttttgaaaaatgaactgagctgccttcccccgtcgcataaccagttccatcatcctggtggaacttgaacatttagagtttatctagagagcttggttaatctttccatattatttgtagtattggtcacaaatgctgttccctcttagcctcattctgtgcaaccaagtgcatataagatgccctgaaaagagtaacaaagtatgctttgcctgtttccacttaccaggaaattccttcagaactagattagcattgccctgcctgtctgaaaggacagtttacctaatggtgccagcctccttttgctttggcaagctggatttctcagagccagcatgttgtttccataactactttgatattttaactcaggtactccagtcttcaccccaacctcagctgattgtagtacacctgctagctctgttgccccctcaaaactgcacccagagcagggccacaagggtgctttttttctttaaaaaaaaaaaaattagaaccaattcatgttcatgccaaaaacaaattgtccccaagcctatatgtattaaaatgttaactttgcctaaaaatattgcagtgactttttaggcaggagtgccaaaggacactatgaactttttgaactgacagtttctcctaactttctgctttagcgtaattgctcagagtagagagcccccacaaagttatttaaaagatgccctagcagcaatccaccagtttttctaagctagaacctttgagtcccccaaactgcctgaagacttaagttttgtgggcactggaagtcactttgatagatggattgaaactgttcctatttgccctgggacggtttctatctatcaaaggaaggttttcacctgtagaaagccccctgcctccagccaaatagtcccatgctgactttctatcttcctttctcaaactgtcttaggaaggaccttcagtgcagatcaggtgcagtaatggctttcttgtcccttaattattcaccagacccagaagttgtacgcatttaatgctgtttgtaaccatgcatctgttttcattctttgctgtaccttttgctgcccatcctgttacttttgagtttctttcattgtggttgttcttgggttcttttgtcttgtcagagctcttctataacctcgctctaatggcttaacagttgttctgggtggaaacgtcccctcatttgaatgctcctctaaaaaaaaaagaaaagaaaactgtattcattccctttaaaatgaaacattcctggtttatttgtccatgcctctagcctgggtgagtgaagctggctgtgttggcctgggtgattgttcaggttgtagaatgcgcattttacattgtttatgataattgaagggtacttctgtctgctccaatttccattccttggtatactcagtatgtcctagtaaggaaggctttccactctactggctccttaagaagcaaaagtaggttaaattttatacttcactgactagggtcttctctctcccctgttctgaatggagtaaaagtctgatgccaagacaaatattgggagcgagccttcctcactagccatgtccaaataatgagcgtattttcatgtggtcttcactgcatttggttttgtttctgatttcatgttcctttgaggtacagtcagatgaaaatgctgagttctgagagagttccaatgaggagctgcctttcagctttggaaaatatgcaactaaaacaaaaccaaacattattgtaatctgacacaggcaaaattatggttcccacaccccaaccccaaatgaaacctgggattttgaatgtggctctaagagttaacattgctgtctgtatgtcgtgtatgctaggtgatatcctcagtagggattgactactagactgtgtgttttatcaaagtgtgtaagaataaaaactcacttgcacgaattgaaacgtaaagaaatgacacttgtgaacgtgtgaacgttaacactgtagttgatagatcttaagctgctaattgttgagagagatttaaatttatgttctgtctggtcgctgcagattctcagcagcacttttactgtatatagaaattgaaataaagacctcagctatt

SEQ ID NO: 193089 - DNA, 5631 bp, Homo sapiens
  Payload ID: 18124
  Gene Name: transmembrane and coiled-coil domain family 1
  ENST ID: ENST00000432054
  CDS Start-End: 953-1942
tttgcattagctgctctagcaaactgcgtgcgcgcgcacacacacggatgcttgtttggcagaagctttctgtttattcagcacagagttctcctaggctcccagatatagaaagctctaagagttgctacaggagatagaattgaaactatacataggctgaggtgggcactgcggaggattggctatgcgagggtattaatgtggtgcggctgtacctgcctgttttgtgaaagtcacttctctgagactgtgaaggtgagaagcccagggatccactagaagcttcactgcggctctttggtgggggaaagcattcccagtggtagctgtcctcatttgcagcgttattctcggaaaccaagtatgtgcagcagtgacagactatgccacagctcctctgcagtttggaagctggaacaaatggaaagagcttatagccaagagaggttgtgatttttttttttttaccatccaagctttctctggcagtgcacaaatgaaggatgagctttgtggcaagcaaaatcagcagactgcctgacagggggttttgatcgaacggttggaagtaagcagccttgcccaaacatccagtgcagtggcctccagtaccgatggcagcatccacacagactctgtggatggaacaccagaccctcagcgcacaaaggctgccattgctcacctgcagcagaagatcctgaagctcacagaacaaatcaagattgcacaaacagcccgggacgacaacgttgctgaatacttgaagcttgccaacagtgcagacaaacagcaggctgcccgcatcaagcaagtctttgagaagaagaaccagaaatctgcccaaactatcctccagctgcaaaagaaacttgagcactaccacaggaagctcagagaggtagagcagaatgggatcccccggcagccaaaggatgtcttcagggacatgcaccagggtctgaaggatgtaggagcaaaggtgactggcttcagtgaaggtgtggtggatagtgtcaaaggtgggttttccagcttctcccaggccacccattcagcagcaggcgctgtagtctcaaagcccagagagattgcctcactcattcggaacaaatttggcagtgcagacaacatccccaacctgaaggactctttagaggaagggcaagtggatgatgcggggaaggctttgggagtgatttcaaactttcagtctagcccaaaatatggtagtgaagaagattgttctagtgccacttcaggctcagtgggagccaacagcaccacagggggcatcgctgtaggagcatccagctccaaaacaaacaccctggacatgcagagctcaggatttgatgcactactacatgagatccaggagatccgggaaacccaggccagactagaggaatcctttgagactctcaaggaacattatcagagggactattccttaataatgcagaccttacaggaggagcgatatagatgtgaacgattggaagaacagctaaatgacctaacagagctccaccagaatgaaatcttgaacttgaagcaggaactggcaagcatggaagaaaaaatcgcgtatcagtcctatgaacgggcccgggacatccaggaggccctggaggcatgccagacgcgcatctccaagatggagctgcagcagcagcagcagcaggtggtgcagctagaagggctggagaatgccactgcccggaaccttctgggcaaactcatcaacatcctcctggctgtcatggcagtccttttggtctttgtctccactgtagccaactgtgtggtccccctcatgaagactcgcaacaggacgttcagcactttattccttgtggtttttattgcctttctctggaagcactgggacgccctcttcagctatgtggaacggttcttttcatcccctagatgatgctggcacagaaggcattgttccctaccctctggcgagtgcatgcagcagagagttagacagcaacttacctactctgaagttttctacaacaaaaaaagagttgagtgaatctgtttacatttagaataatgtttttttcttcaagagacgcaattgcaatagtattttttagattttatccaagaagttttttgggcgaaaatcttggatcatttttatgtagcatgattttccttgggatgcaaatcttaaaacagtcctttaatatgaaccaacaatctggagcacaccgaagggcaatctaaattgtggcttgaaggactgcactaaaacccactaaaaagatgcgaaaacctgatgagggcaaaccagttaaacctaacaccctgccttgtctgggctcatcacctctccctatcccagactaactttactgtgaaatcctaccacattccatgtctgaatttttggattcggggtggattttcgttgtccgtggaagaacacatggatctctctggctttctcacccaagttggccacttacgctaatcctggaagtatgatcacttttgaacctgccccttaaccttgacgaggatacaaaagtgaaagcatcatcccccaaaggatcactgcacagtcctactacagtatttttaagtagccctctaaatacttaattttaagcaaaatcccttggccgcacttttaaggtttttttatatgtgtatagttaccaacctaaaaataaaaaatccgaacagcatacttgaagaatgtaatactcaaactctcagtgcttccttatggtttctaataggattttttattattgttattattattattgggtttttttggacagggttgggagggtcttttatttttcctttgaaataaagaagtgatgtttttaaatgaagaaatgtgtggatatttaagtgtgctgctccctcttgtcttgaaacagtttgagtaagaaagtcttgctgtaaatgctgccctctgccgcctttgttttgagatgcagtttaaactccctctggctgctgctgctgctttttggtgtcccgacatacctacgcccccgttttatgggtttggcttagttgaagaggaaagggttgtgcaaggagagcaggaggctgtttccaaaaaccagtgtagtaggatagggattttttttttttttttttgccccaagaaaacgttcacccagtgatcttgggctggggttgtctttaggaaaagttgagactataagagtcataaataagtccttgtgtttccttaatttattttgttaacacccctaattacaaccaaagtgatgatgtggagtcttctgtcttcattttggccccagcattcttaatttcaaagctttattctgtctgcctaagagaatcaaccaaaggtgattctcctaaagagcagtgaaggaaatgtcaggttagcaggacccaagttttgggtgtgaaatgttgccagcttcctataatgtaaacggacttgttaacctaacctaattatgctcagtggacttctatagatggttttgaaaaatgaactgagctgccttcccccgtcgcataaccagttccatcatcctggtggaacttgaacatttagagtttatctagagagcttggttaatctttccatattatttgtagtattggtcacaaatgctgttccctcttagcctcattctgtgcaaccaagtgcatataagatgccctgaaaagagtaacaaagtatgctttgcctgtttccacttaccaggaaattccttcagaactagattagcattgccctgcctgtctgaaaggacagtttacctaatggtgccagcctccttttgctttggcaagctggatttctcagagccagcatgttgtttccataactactttgatattttaactcaggtactccagtcttcaccccaacctcagctgattgtagtacacctgctagctctgttgccccctcaaaactgcacccagagcagggccacaagggtgctttttttctttaaaaaaaaaaaaattagaaccaattcatgttcatgccaaaaacaaattgtccccaagcctatatgtattaaaatgttaactttgcctaaaaatattgcagtgactttttaggcaggagtgccaaaggacactatgaactttttgaactgacagtttctcctaactttctgctttagcgtaattgctcagagtagagagcccccacaaagttatttaaaagatgccctagcagcaatccaccagtttttctaagctagaacctttgagtcccccaaactgcctgaagacttaagttttgtgggcactggaagtcactttgatagatggattgaaactgttcctatttgccctgggacggtttctatctatcaaaggaaggttttcacctgtagaaagccccctgcctccagccaaatagtcccatgctgactttctatcttcctttctcaaactgtcttaggaaggaccttcagtgcagatcaggtgcagtaatggctttcttgtcccttaattattcaccagacccagaagttgtacgcatttaatgctgtttgtaaccatgcatctgttttcattctttgctgtaccttttgctgcccatcctgttacttttgagtttctttcattgtggttgttcttgggttcttttgtcttgtcagagctcttctataacctcgctctaatggcttaacagttgttctgggtggaaacgtcccctcatttgaatgctcctctaaaaaaaaaagaaaagaaaactgtattcattccctttaaaatgaaacattcctggtttatttgtccatgcctctagcctgggtgagtgaagctggctgtgttggcctgggtgattgttcaggttgtagaatgcgcattttacattgtttatgataattgaagggtacttctgtctgctccaatttccattccttggtatactcagtatgtcctagtaaggaaggctttccactctactggctccttaagaagcaaaagtaggttaaattttatacttcactgactagggtcttctctctcccctgttctgaatggagtaaaagtctgatgccaagacaaatattgggagcgagccttcctcactagccatgtccaaataatgagcgtattttcatgtggtcttcactgcatttggttttgtttctgatttcatgttcctttgaggtacagtcagatgaaaatgctgagttctgagagagttccaatgaggagctgcctttcagctttggaaaatatgcaactaaaacaaaaccaaacattattgtaatctgacacaggcaaaattatggttcccacaccccaaccccaaatgaaacctgggattttgaatgtggctctaagagttaacattgctgtctgtatgtcgtgtatgctaggtgatatcctcagtagggattgactactagactgtgtgttttatcaaagtgtgtaagaataaaaactcacttgcacgaattgaaacgtaaagaaatgacacttgtgaacgtgtgaacgttaacactgtagttgatagatcttaagctgctaattgttgagagagatttaaatttatgttctgtctggtcgctgcagattctcagcagcacttttactgtatatagaaattgaaataaagacctcagctattaa

SEQ ID NO: 193090 - DNA, 402 bp, Homo sapiens
  Payload ID: 18124
  Gene Name: transmembrane and coiled-coil domain family 1
  ENST ID: ENST00000505616
  CDS Start-End: 153-402
gcttgagctcgagcgacggcgctggcggagacgccggctgctcctcccctccccgccgcttttcctaaaaggattgtacaccttagaagtgcttaaggaagagtgatgaagctctgaatcgtgtcctgcagcagattcgagtgccacccaagatgaagagagggacaagcttgcatagtaggcggggcaagccagaggccccaaagggaagtccccaaatcaacaggaagtctggtcaggagatgacagctgttatgcagtcaggccgacccaggtcttcatccacaactgatgcacctaccagctctgctatgatggaaatagcttgtgctgctgctgctgctgctgctgcatgtctaccaggagaggagggaactgcggagcggatcgaacggttggaag

SEQ ID NO: 193091 - DNA, 208 bp, Homo sapiens
  Payload ID: 18124
  Gene Name: transmembrane and coiled-coil domain family 1
  ENST ID: ENST00000510323
  CDS Start-End: 157-208
agaaggcagtatagagactcctatcaaggataaagaagaactaaatagagtttagtaacatcgtaaaaaggatgtgaacgattggaagaacagctaaatgacctaacagagctccaccagaatgaaatcttgaacttgaagcaggaactggcaagcatggaagaaaaaatcgcgtatcagtcctatgaacgggcccgggacatccagg

SEQ ID NO: 193092 - DNA, 203 bp, Homo sapiens
  Payload ID: 18124
  Gene Name: transmembrane and coiled-coil domain family 1
  ENST ID: ENST00000513411
  CDS Start-End: 186-203
aggtaggatgaattggacaaggatgagactcgtgtaggtgaggacagttggaaggatcatgatgtcgtaatcttggagttaggtgaaacagcttttcctaaaaggattgtacaccttagaagtgcttaaggaagagtgatgaagctctgaatcgtgtcctgcagcagattcgagtgccacccaagatgaagagagggacaagc

SEQ ID NO: 193093 - DNA, 2818 bp, Homo sapiens
  Payload ID: 18125
  Gene Name: transmembrane and coiled-coil domain family 2
  ENST ID: ENST00000329800
  CDS Start-End: 190-1599
aagtgggtgcagaatccatgtctttctgaacgacagttctgctgtgagaagctgccattagagagatccagcaggccccaggactcagctggccagccggtgacactgctcactgctcattgtcctcagctgtggacctctgtccccctctgctggccactcacagaatttcctgctggcactgtcaagatgaagtccaaggaggaagagactgctgtcgataagggagacctggtggccctgagcctccccgccggccatggtgacaccgacggccccatcagcctggacgtgcccgatggggcaccggacccccagcggaccaaggccgccattgaccacctgcaccagaagatcctgaagatcaccgagcagatcaagattgagcaggaggctcgcgacgacaatgtggcagagtatctgaaactggccaacaacgcggacaagcagcaggtgtcacgcatcaagcaagtgttcgagaagaagaaccagaagtcagcccagaccatcgcccagctgcacaagaagctggagcactaccgccggcgcctgaaggagattgagcagaacgggccctcgcggcagcccaaggacgtgctgcgggacatgcagcaggggctgaaggacgtgggcgccaacgtgcgcgcaggcatcagcggctttgggggcggcgtggtggagggcgtcaagggcagcctctctggcctctcacaggccacccacaccgccgtggtgtccaagccccgggagtttgccagcctcatccgcaacaagtttggcagtgctgacaacatcgcccacctgaaggaccccctggaagatgggccccctgaggaggcagcccgggcactgagcggcagtgccacactcgtctccagccccaagtatggcagcgatgatgagtgctccagcgccagcgccagctcagccggggcaggcagcaactctggggctgggcctggtggggcgctggggagccctaagtccaatgcactgtatggtgctcctggaaacctggatgctctgctggaagagctacgggagatcaaggagggacagtctcacctggaggactccatggaagacctgaagactcagctgcagagggactacacctacatgacccagtgcctgcaggaggagcgctacaggtacgagcggctggaggagcagctcaacgacctgactgagcttcatcagaacgagatgacgaacctgaagcaggagctggccagcatggaggagaaggtggcctaccagtcctatgagagggcacgggacatccaggaggccgtggagtcctgcctgacccgggtcaccaagctggagctgcagcagcaacagcagcaggtggtacagctggagggcgtggagaatgccaacgcgcgggcgctgctgggcaagttcatcaacgtgatcctggcgctcatggccgtgctgctggtgttcgtgtccaccatcgccaacttcatcacgcccctcatgaagacacgcctgcgcatcaccagcaccaccctcctggtcctcgtcctgttcctcctctggaagcactgggactccctcacctacctcctggagcacgtgttgctgcccagctgagtggccagccacaccaaccctgtgctctctggcccccagctggccacacttctccaggagggacccttggacttctttgtgtgtccagtttggcctcctgcccaaactgtccattccagcagctcctgcccccttctctgtacttgcttctgtctgacaccttctccctgttggcctgaagggagcttagaatgcagccctacctggagatagtgcgggcacctgtggccaagtggagcagaggtggacatggggttggattgttttgattatttatagttacacaaggacttctcccagctgaccctcaggatgccccaagtcaggaagaccattaagaataggaggagagggctctgcctcaactttcctaggaaagagcccacctcggagatagctacggttttctctggtggagatggtgaggatgaaggctggagagtgagggaggaggctctgctggccgcagagaacacagggatgggagggtccctagccttcgggcacctccagggccagagagcaggctcagagcagctagtgtggagctcagcatccccaccccacccctcctccctgtagagctgatttgaggcctccttctggggctgggctctgcaggccaggtgggtgtggcctgtgttttcccttctgttctttctgcctgtactggatctgttattttcagggaaacaggccccagggcccccctgagcctcaccctaagcccttaggcctctgagagtgctgttgggttctatttatttatttatttgttcctttgttccctacccgtgcccccagtgtcttccctgctgagtaccaggagaggtcctgccccatcctctctctgaagccagggcccttccattccatttagcctttggatcatcctggctgggagaagtgggaccgagccacccagccccactatccccaagcagccctacagccgggatgggaggcacgtggcctctcttttatccgtctatttattttgtaagtgtattcgtgtggaggaggttgttgctttatttttttaaggctctggagtgttgtgtatggtttcttttcacatcccagcctcccatgggcacttctaagaagagaggggatttcttggaaaaggagagaggaatcccctagagcagggaaagcagtgcctgccagctgttgtgcaccttcctgagaaataaatatcctctaaattttcaaacca

SEQ ID NO: 193094 - DNA, 2674 bp, Homo sapiens
  Payload ID: 18125
  Gene Name: transmembrane and coiled-coil domain family 2
  ENST ID: ENST00000330675
  CDS Start-End: 1-1455
atgaaccaggttgttcagcccttaatgagcagacactctgcatgtagaggcagccaggcccacctctcatgggtcgataagggagacctggtggccctgagcctccccgccggccatggtgacaccgacggccccatcagcctggacgtgcccgatggggcaccggacccccagcggaccaaggccgccattgaccacctgcaccagaagatcctgaagatcaccgagcagatcaagattgagcaggaggctcgcgacgacaatgtggcagagtatctgaaactggccaacaacgcggacaagcagcaggtgtcacgcatcaagcaagtgttcgagaagaagaaccagaagtcagcccagaccatcgcccagctgcacaagaagctggagcactaccgccggcgcctgaaggagattgagcagaacgggccctcgcggcagcccaaggacgtgctgcgggacatgcagcaggggctgaaggacgtgggcgccaacgtgcgcgcaggcatcagcggctttgggggcggcgtggtggagggcgtcaagggcagcctctctggcctctcacaggccacccacaccgccgtggtgtccaagccccgggagtttgccagcctcatccgcaacaagtttggcagtgctgacaacatcgcccacctgaaggaccccctggaagatgggccccctgaggaggcagcccgggcactgagcggcagtgccacactcgtctccagccccaagtatggcagcgatgatgagtgctccagcgccagcgccagctcagccggggcaggcagcaactctggggctgggcctggtggggcgctggggagccctaagtccaatgcactgtatggtgctcctggaaacctggatgctctgctggaagagctacgggagatcaaggagggacagtctcacctggaggactccatggaagacctgaagactcagctgcagagggactacacctacatgacccagtgcctgcaggaggagcgctacaggtacgagcggctggaggagcagctcaacgacctgactgagcttcatcagaacgagatgacgaacctgaagcaggagctggccagcatggaggagaaggtggcctaccagtcctatgagagggcacgggacatccaggaggccgtggagtcctgcctgacccgggtcaccaagctggagctgcagcagcaacagcagcaggtggtacagctggagggcgtggagaatgccaacgcgcgggcgctgctgggcaagttcatcaacgtgatcctggcgctcatggccgtgctgctggtgttcgtgtccaccatcgccaacttcatcacgcccctcatgaagacacgcctgcgcatcaccagcaccaccctcctggtcctcgtcctgttcctcctctggaagcactgggactccctcacctacctcctggagcacgtgttgctgcccagctgagtggccagccacaccaaccctgtgctctctggcccccagctggccacacttctccaggagggacccttggacttctttgtgtgtccagtttggcctcctgcccaaactgtccattccagcagctcctgcccccttctctgtacttgcttctgtctgacaccttctccctgttggcctgaagggagcttagaatgcagccctacctggagatagtgcgggcacctgtggccaagtggagcagaggtggacatggggttggattgttttgattatttatagttacacaaggacttctcccagctgaccctcaggatgccccaagtcaggaagaccattaagaataggaggagagggctctgcctcaactttcctaggaaagagcccacctcggagatagctacggttttctctggtggagatggtgaggatgaaggctggagagtgagggaggaggctctgctggccgcagagaacacagggatgggagggtccctagccttcgggcacctccagggccagagagcaggctcagagcagctagtgtggagctcagcatccccaccccacccctcctccctgtagagctgatttgaggcctccttctggggctgggctctgcaggccaggtgggtgtggcctgtgttttcccttctgttctttctgcctgtactggatctgttattttcagggaaacaggccccagggcccccctgagcctcaccctaagcccttaggcctctgagagtgctgttgggttctatttatttatttatttgttcctttgttccctacccgtgcccccagtgtcttccctgctgagtaccaggagaggtcctgccccatcctctctctgaagccagggcccttccattccatttagcctttggatcatcctggctgggagaagtgggaccgagccacccagccccactatccccaagcagccctacagccgggatgggaggcacgtggcctctcttttatccgtctatttattttgtaagtgtattcgtgtggaggaggttgttgctttatttttttaaggctctggagtgttgtgtatggtttcttttcacatcccagcctcccatgggcacttctaagaagagaggggatttcttggaaaaggagagaggaatcccctagagcagggaaagcagtgcctgccagctgttgtgcaccttcctgagaaataaatatcctctaaattttcaaacca

SEQ ID NO: 193095 - DNA, 3738 bp, Homo sapiens
  Payload ID: 18125
  Gene Name: transmembrane and coiled-coil domain family 2
  Uniprot ID: O75069
  ENST ID: ENST00000358024
  CDS Start-End: 390-2519
ggccggccgggagggatgcgctgtgccgcccagctcctctccgtcctgcccatgccctgaagcagaaagtttgggggccgggggttgtctcccttctccctcctgcaatgactgcccaaggactcttgctgcccagcctcgactgtgacctgtcttcgctccccaggtcgaaatgaactattccaagctataaccaaggctcccccttctcgcccctccctcacccgcctttaagaattttttttttaattcaagaaattgtggtctgccatctcccctccttgttaataatttagaccccaggcctcatatgaatataagagggggtgcggtcttccccaagacggcgcgctggaaggacagattccccttgccgacccacatacaccatgaagaggtgcagatcggacgagctgcagcaacaacagggcgaggaggatggagctgggctggaagatgccgcttcccacctgccgggcgcggacctccggcctggggagaccacgggtgctaactctgctggcgggccaacttcagacgccggcgctgccgcggcgcccaacccaggtccccgaagcaagcctcctgatttaaagaaaatccagcagctgtcagagggctccatgtttggccacggtctgaagcacctgttccacagccgccgtcggtctcgggaaagggagcaccagacgtctcaggattcccagcagcatcagcagcagcagggtatgtccgaccatgactccccagatgagaaggagcgctctccggagatgcatcgcgtctcctacgccatgtccctgcacgacctgcccgcccggcccaccgccttcaaccgcgtgctgcagcagatccgctcccggccctccatcaagcggggcgccagcctgcacagcagcagtgggggcggcagcagcgggagcagcagccggcgcaccaagagtagctccctggagccccagcgtggcagccctcacctgctgcgcaaggccccccaggacagcagcctggccgccatcctgcaccagcaccagtgccgtccccgctcttcctccaccaccgacactgctctgctgctggccgacggcagcaacgtgtacctcctggctgaggaggccgaaggcatcggggacaaggtcgataagggagacctggtggccctgagcctccccgccggccatggtgacaccgacggccccatcagcctggacgtgcccgatggggcaccggacccccagcggaccaaggccgccattgaccacctgcaccagaagatcctgaagatcaccgagcagatcaagattgagcaggaggctcgcgacgacaatgtggcagagtatctgaaactggccaacaacgcggacaagcagcaggtgtcacgcatcaagcaagtgttcgagaagaagaaccagaagtcagcccagaccatcgcccagctgcacaagaagctggagcactaccgccggcgcctgaaggagattgagcagaacgggccctcgcggcagcccaaggacgtgctgcgggacatgcagcaggggctgaaggacgtgggcgccaacgtgcgcgcaggcatcagcggctttgggggcggcgtggtggagggcgtcaagggcagcctctctggcctctcacaggccacccacaccgccgtggtgtccaagccccgggagtttgccagcctcatccgcaacaagtttggcagtgctgacaacatcgcccacctgaaggaccccctggaagatgggccccctgaggaggcagcccgggcactgagcggcagtgccacactcgtctccagccccaagtatggcagcgatgatgagtgctccagcgccagcgccagctcagccggggcaggcagcaactctggggctgggcctggtggggcgctggggagccctaagtccaatgcactgtatggtgctcctggaaacctggatgctctgctggaagagctacgggagatcaaggagggacagtctcacctggaggactccatggaagacctgaagactcagctgcagagggactacacctacatgacccagtgcctgcaggaggagcgctacaggtacgagcggctggaggagcagctcaacgacctgactgagcttcatcagaacgagatgacgaacctgaagcaggagctggccagcatggaggagaaggtggcctaccagtcctatgagagggcacgggacatccaggaggccgtggagtcctgcctgacccgggtcaccaagctggagctgcagcagcaacagcagcaggtggtacagctggagggcgtggagaatgccaacgcgcgggcgctgctgggcaagttcatcaacgtgatcctggcgctcatggccgtgctgctggtgttcgtgtccaccatcgccaacttcatcacgcccctcatgaagacacgcctgcgcatcaccagcaccaccctcctggtcctcgtcctgttcctcctctggaagcactgggactccctcacctacctcctggagcacgtgttgctgcccagctgagtggccagccacaccaaccctgtgctctctggcccccagctggccacacttctccaggagggacccttggacttctttgtgtgtccagtttggcctcctgcccaaactgtccattccagcagctcctgcccccttctctgtacttgcttctgtctgacaccttctccctgttggcctgaagggagcttagaatgcagccctacctggagatagtgcgggcacctgtggccaagtggagcagaggtggacatggggttggattgttttgattatttatagttacacaaggacttctcccagctgaccctcaggatgccccaagtcaggaagaccattaagaataggaggagagggctctgcctcaactttcctaggaaagagcccacctcggagatagctacggttttctctggtggagatggtgaggatgaaggctggagagtgagggaggaggctctgctggccgcagagaacacagggatgggagggtccctagccttcgggcacctccagggccagagagcaggctcagagcagctagtgtggagctcagcatccccaccccacccctcctccctgtagagctgatttgaggcctccttctggggctgggctctgcaggccaggtgggtgtggcctgtgttttcccttctgttctttctgcctgtactggatctgttattttcagggaaacaggccccagggcccccctgagcctcaccctaagcccttaggcctctgagagtgctgttgggttctatttatttatttatttgttcctttgttccctacccgtgcccccagtgtcttccctgctgagtaccaggagaggtcctgccccatcctctctctgaagccagggcccttccattccatttagcctttggatcatcctggctgggagaagtgggaccgagccacccagccccactatccccaagcagccctacagccgggatgggaggcacgtggcctctcttttatccgtctatttattttgtaagtgtattcgtgtggaggaggttgttgctttatttttttaaggctctggagtgttgtgtatggtttcttttcacatcccagcctcccatgggcacttctaagaagagaggggatttcttggaaaaggagagaggaatcccctagagcagggaaagcagtgcctgccagctgttgtgcaccttcctgagaaataaatatcctctaaattttcaaacca

SEQ ID NO: 193096 - DNA, 892 bp, Homo sapiens
  Payload ID: 18125
  Gene Name: transmembrane and coiled-coil domain family 2
  ENST ID: ENST00000367159
  CDS Start-End: 125-892
tgaaccatttgcaagcctagcctccactggggagaagtctgttctcagagtgaggagctctgcacgcgttggctaaaagggtggcgtggctttgtgaaattgagagctggaggagcccagcagaatgaaccaggttgttcagcccttaatgagcagacactctgcatgtagaggcagccaggcccacctctcatggctgtggacctctgtccccctctgctggccactcacagaatttcctgctggcactgtcaagatgaagtccaaggaggaagagactgctgtcgataagggagacctggtggccctgagcctccccgccggccatggtgacaccgacggccccatcagcctggacgtgcccgatggggcaccggacccccagcggaccaaggccgccattgaccacctgcaccagaagatcctgaagatcaccgagcagatcaagattgagcaggaggctcgcgacgacaatgtggcagagtatctgaaactggccaacaacgcggacaagcagcaggtgtcacgcatcaagcaagtgttcgagaagaagaaccagaagtcagcccagaccatcgcccagctgcacaagaagctggagcactaccgccggcgcctgaaggagattgagcagaacgggccctcgcggcagcccaaggacgtgctgcgggacatgcagcaggggctgaaggacgtgggcgccaacgtgcgcgcaggcatcagcggctttgggggcggcgtggtggagggcgtcaagggcagcctctctggcctctcacaggccacccacaccgccgtggtgtccaagccccgggagtttgccagcctcatccgcaacaagtttggcagtgctgacaacatcgcccacctgaaggaccccctggaagatggg

SEQ ID NO: 193097 - DNA, 3339 bp, Homo sapiens
  Payload ID: 18125
  Gene Name: transmembrane and coiled-coil domain family 2
  Uniprot ID: O75069
  ENST ID: ENST00000545499
  CDS Start-End: 226-2121
accatttatgcctctgtctttcagctccgtgtcaggtctctgtgtttgttccccattattcagcaagcgttttagtgactcacccatccgagattgtttgaataatgtgtgaagtgttattcgcagacaaagggctggagaaatccaagatgctaaccaaaaagtggacagcaggtgaccattagttttccttgctgaaaaatccagcagctgtcagagggctccatgtttggccacggtctgaagcacctgttccacagccgccgtcggtctcgggaaagggagcaccagacgtctcaggattcccagcagcatcagcagcagcagggtatgtccgaccatgactccccagatgagaaggagcgctctccggagatgcatcgcgtctcctacgccatgtccctgcacgacctgcccgcccggcccaccgccttcaaccgcgtgctgcagcagatccgctcccggccctccatcaagcggggcgccagcctgcacagcagcagtgggggcggcagcagcgggagcagcagccggcgcaccaagagtagctccctggagccccagcgtggcagccctcacctgctgcgcaaggccccccaggacagcagcctggccgccatcctgcaccagcaccagtgccgtccccgctcttcctccaccaccgacactgctctgctgctggccgacggcagcaacgtgtacctcctggctgaggaggccgaaggcatcggggacaaggtcgataagggagacctggtggccctgagcctccccgccggccatggtgacaccgacggccccatcagcctggacgtgcccgatggggcaccggacccccagcggaccaaggccgccattgaccacctgcaccagaagatcctgaagatcaccgagcagatcaagattgagcaggaggctcgcgacgacaatgtggcagagtatctgaaactggccaacaacgcggacaagcagcaggtgtcacgcatcaagcaagtgttcgagaagaagaaccagaagtcagcccagaccatcgcccagctgcacaagaagctggagcactaccgccggcgcctgaaggagattgagcagaacgggccctcgcggcagcccaaggacgtgctgcgggacatgcagcaggggctgaaggacgtgggcgccaacgtgcgcgcaggcatcagcggctttgggggcggcgtggtggagggcgtcaagggcagcctctctggcctctcacaggccacccacaccgccgtggtgtccaagccccgggagtttgccagcctcatccgcaacaagtttggcagtgctgacaacatcgcccacctgaaggaccccctggaagatgggccccctgaggaggcagcccgggcactgagcggcagtgccacactcgtctccagccccaagtatggcagcgatgatgagtgctccagcgccagcgccagctcagccggggcaggcagcaactctggggctgggcctggtggggcgctggggagccctaagtccaatgcactgtatggtgctcctggaaacctggatgctctgctggaagagctacgggagatcaaggagggacagtctcacctggaggactccatggaagacctgaagactcagctgcagagggactacacctacatgacccagtgcctgcaggaggagcgctacaggtacgagcggctggaggagcagctcaacgacctgactgagcttcatcagaacgagatgacgaacctgaagcaggagctggccagcatggaggagaaggtggcctaccagtcctatgagagggcacgggacatccaggaggccgtggagtcctgcctgacccgggtcaccaagctggagctgcagcagcaacagcagcaggtggtacagctggagggcgtggagaatgccaacgcgcgggcgctgctgggcaagttcatcaacgtgatcctggcgctcatggccgtgctgctggtgttcgtgtccaccatcgccaacttcatcacgcccctcatgaagacacgcctgcgcatcaccagcaccaccctcctggtcctcgtcctgttcctcctctggaagcactgggactccctcacctacctcctggagcacgtgttgctgcccagctgagtggccagccacaccaaccctgtgctctctggcccccagctggccacacttctccaggagggacccttggacttctttgtgtgtccagtttggcctcctgcccaaactgtccattccagcagctcctgcccccttctctgtacttgcttctgtctgacaccttctccctgttggcctgaagggagcttagaatgcagccctacctggagatagtgcgggcacctgtggccaagtggagcagaggtggacatggggttggattgttttgattatttatagttacacaaggacttctcccagctgaccctcaggatgccccaagtcaggaagaccattaagaataggaggagagggctctgcctcaactttcctaggaaagagcccacctcggagatagctacggttttctctggtggagatggtgaggatgaaggctggagagtgagggaggaggctctgctggccgcagagaacacagggatgggagggtccctagccttcgggcacctccagggccagagagcaggctcagagcagctagtgtggagctcagcatccccaccccacccctcctccctgtagagctgatttgaggcctccttctggggctgggctctgcaggccaggtgggtgtggcctgtgttttcccttctgttctttctgcctgtactggatctgttattttcagggaaacaggccccagggcccccctgagcctcaccctaagcccttaggcctctgagagtgctgttgggttctatttatttatttatttgttcctttgttccctacccgtgcccccagtgtcttccctgctgagtaccaggagaggtcctgccccatcctctctctgaagccagggcccttccattccatttagcctttggatcatcctggctgggagaagtgggaccgagccacccagccccactatccccaagcagccctacagccgggatgggaggcacgtggcctctcttttatccgtctatttattttgtaagtgtattcgtgtggaggaggttgttgctttatttttttaaggctctggagtgttgtgtatggtttcttttcacatcccagcctcccatgggcacttctaagaagagaggggatttcttggaaaaggagagaggaatcccctagagcagggaaagcagtgcctgccagctgttgtgcaccttcctgagaaataaatatcctctaaattttcaaacc

SEQ ID NO: 193098 - DNA, 5877 bp, Homo sapiens
  Payload ID: 18126
  Gene Name: transmembrane and coiled-coil domain family 3
  Uniprot ID: Q9ULS5
  ENST ID: ENST00000261226
  CDS Start-End: 133-1566
gcaccagaggcaacagctgcagcagccgcgccgccccctcgcccgcggctcccagggtgatcccgagcacagccggtggctcgcggcgcggcagccccagaagacgggaaagttcgcggccggagcgcggagatgccgggcagcgacacggcgctcaccgtggaccggacctactcgtaccccggccggcaccaccgctgcaagagccgggtagaacgtcatgacatgaataccttaagcctgcccctgaacatacgccgaggggggtcagacaccaacctcaactttgatgtcccggatggcatcctggacttccacaaggtcaaactcactgcagacagcctgaagcaaaaaattctaaaggtaacagagcagataaaaattgagcaaacatcgcgcgatgggaatgttgcggagtatctgaaactagtgaacaacgcagacaagcagcaggcgggacgtatcaagcaagtctttgagaagaagaatcagaaatcagctcactccatcgcccagctgcagaagaagttagagcagtatcatcgaaagctcagagagatcgagcagaatggagcctctaggagctcaaaggacatttccaaagaccacctgaaggatatacatcgctctttgaaagatgcccacgtgaaatctcgaactgccccccattgcatggagagcagcaaatcgggcatgccaggggtctcacttactccacctgtgttcgttttcaataagtccagagagtttgccaacctgatccggaataagtttggcagcgccgacaacattgctcacttgaaaaattccttagaggagtttaggccagaggcgagtgccagggcctacgggggcagcgctaccatcgtgaacaaacccaagtatggcagtgatgatgaatgttcgagtggcacgtcaggctcggccgacagtaacggaaaccagtcgtttggggctggtggagccagcacactggacagccagggcaagctcgccgtgatcctggaggaactgagggagatcaaggatacccaagctcagctggctgaggacatcgaggcactgaaggtgcagtttaagagagaatatggttttatttctcagaccctgcaagaggaaagatacaggtatgagcgactggaggaccagctgcatgacctgacggacctgcatcagcatgagacagccaacctgaagcaggagctggccagcattgaggagaaggtggcctaccaggcctacgagcgctcgcgggacatccaggaagccttggaatcctgccagactcgcatttctaagctggagctccaccagcaagagcagcaagctctgcagacagacaccgtgaatgctaaagttctcctggggaggtgcatcaacgtgatcctggccttcatgactgtcatcttagtgtgtgtgtccaccatcgcgaagttcgtctcacccatgatgaagagtcgctgccacattcttggcaccttctttgccgtgactcttcttgctatattttgtaaaaactgggaccatatcctgtgtgccatagaaaggatgataataccaagatgaagccactggttcctgccttcaagttctttcaagtttttattttaaagaaaactctgtgcatactaccaaattttacagtgaatgattgtgcggactcgtgtgtaagaaaaactaggactgtgtggtgtaaataactacaattctcttaactccgtagcagttgccaactcagtccttgtacttcgttaacacgaatctgtttcagagctctcctaccttgctcactgccttaatcagaccgatttcctgcccacctgaccagcccagcgtggtaaacctctgtatattgagaccttggcataattggtgatcctgaagaaagaggtctctctcctaagtctctgtcagaattgagcttcacaattgctaatggttgttttctgtgagtcctataaaaagcaaggatatgcatgattcagggaatgaagaatcacaggcttgggcagtgttaaacactgtggcctatggtccccgtgtgatccaccctgcttctctccaggggaccataggtcccgtcatgtactcagtgtccacagcagtcagtcgtgtatgaccctgtaacgtggaaatcttatcacacacctgttatccaacaagtctacctgaggggttttgttacactttaaatgggaaggcatagggatttatgaatggggctttcaccttctcatacccaggcaaccaacacctgattttgtctcaactggctagcaaatgcccagccttcagagtgtgcaggaatgttttcaaatccctcatcagactgtgactttaacattaatttggaatcctgtgagcactactctgaaggtttgtgttttggcaaatcttttttcttttttgagacagggctctgctaaatattgctcaggctggttgcaaactccttgcttcaagggatcctcccacctcagcctcccaagcagccgggactgcaggcacaagccaccatgcctggctgttttttggcaaatcttgattgtgataagcccccctggaggatatgattcactttatgtgattcatcttattcacaggtctgtgagggactgcaaagcttactcaggaaatgaaaacaaatgatggtcatgttgcagttttttccttgaaggacaaccgaaccatagcctctaaagttcaagtgcactgaggtgtcggaacgctgaaagcatgaggaaacgaggacgtagggtgtgactgaatggtggctagattagtgggagcagttcacctggatgaagattgagagcatcgtctttgagaagtgaaagactagcaagaataaaataaattaagtccagtgtttgagccaaggttgccacctgtctcttaacatctcactgaacataagtcctgaggtattaggacgaccatactgcctctgagctgaaaacattcaaaagttcacatccctgtttgggggataccattcaccgccttcagcccagatgatactttcctttaaatctgtgtctctgtgtgtataacaaagaggaagatggaaacaatgttcatggaaactgctgttgagccccttgtcccaccactcccgccatctgctgcaggcaggaaggcatgtgagtgtacgttttcttccaggagacatcaggtccccctggattcaaattaagtgcaatattttgcaaacagctcttcttagggaaatctcctgaaggaaaaaaatgtgacagaatgttccatagtctgagagaatggaatcgttgagcatttagtacaagtccagtgtgtgtgagcgggacttaggcagctcaagcttgcttttttttttaagcgtacaattgagtggttttagtaaattcacaaacttgttcaaccatcaccactatctaattccagactcacgcttttttaaacaataaatgtcatttcatgaaatctttggtgataaagtattttggattcagagaagagctcccttaccagtcccaccctgatctcatggctgtctctcctttcattgtcagactccccctggtctaccgcgttgatgtgtatacactgatctttcaagtctgggagacagataaggaggccaggtgcaaggcagggaggcagagagaatgttgtgcttcctttagcttttgtatttcgatggccagcattaccctttacctgtgggcatcagactcagcgtgggctgagtgctgagtgtaacttacactcctaaatcaagctggggcctgggtgggcccctcttggtatctgtgaatctttccaagcaccacttcggacacaccagggattgagtgctgctgttagtttagagaaggagagatgtctaacccttgaggtgaagggctctgggagggtccaagaagacgtaggcttcattttcacaccagcccacaccattccagtgctcagcctagcaaatgtgctttaatgcacacttctcagacctgtgatccgtgtatcttctccccagtgacagaagtagagaagagaatggaaagcagcacactccgtcccctctagtctggagctgttaacagaatctgctagaaactagctttattctaacataccgtaggatctaaatcctcctacctggatcatgaattcctttgaaataattcatattttcattgactctcactaaatgtcaaataaccttgttttcacttggataggctcaacctacctggcatatttattttgcagtcttgttgaaagttcatgaaactttgtactttttaataagatgatacactcgaaggaaacttttaatctctgcagtttattctctcttaaggaataaacactcccactgtttgttctcttcaatgtgtaaggagattaaatgacattttagaaatattacaattaaaaatagtgatgtagctgtaacatatgctggaattggatatttaatttatgtttgtgtcaactataatcctttccccacccctttcatttatggtaaacatcttgggcaaacccaaagatggaaagtgcttgttgggtgggtaagcaccacctggtctctcagcaaacactcctgagtggttgaagatgctggacattggattctagcactgggtttatctggtgacatagtctcctgtgggtcttgagttggttatttcaagctcaaactctgaatatgattaaaccagaacaccccacccccaactgccaaaaaaaaaaaaaaaaaatggaaatccataatgaaacagcaaaaaagtactccgttgctgggtttggacaatgaacatgggattagtcccaagtttgtagcttggaacggtagcatttttgcctgcgtgatccttgtcagctattcacagaaggaaatcttccgaaactccgtctttcatttcagccggtgaggctgttatccttctctgtcaattagcattcatgtggttttcgctctttccagctctgtcactcttgttttcatttaaatattgccccactctgtgtttattgccttgccatttctctagcatatcaggtttaattatgggctcagtaataatgaggaactagcttccctcaggcaactaattacttttgtcttttttggtcggattgtaccaaattattttgcattgaatgggaatgtttttgcagtgaatccagatatagttgtattggtttggaaaaacatttaaatatatttattcatatgaacatgtgtgattaaacaacctattttacatatttctgtaattctgaggagtgggctgggggtaggaagaaatggcaccacttaaaattcagggcttatatgaagaggtgttttaaggttagcacatgcacaaaggaacgagttggtttaaaaagataaatcactgcaaagaatgaaattggcttattcacatcaaaactagataagatgctaaaaaaaaaagatatgaaacagaactaacctatagtttcctgaaatcagtacagtttaatttataagaagctagaaagtaatgcaccttgattgttttaggaatgatttatgtgttgcaattttaatttatttaaagcatgtctactgtgtttgtcctaagagaaatatttcaacaaaacgtgctctgtgtttaagatatgtttaggcagtagttagcaactctgaaagtagaaactggaaatgtttattgtgaggcttgttgcagaatttccattttgtgagttactacttagtttcatgtcagcctaaaattgtaaattccctgtagatcttcaccccattgtggtgtcatcaatgaatccaaagcaggtgccattatttttttaaataaacacttgatgttagctttggtgttaaataaagaggtagatttcttaaatttt

SEQ ID NO: 193099 - DNA, 4361 bp, Homo sapiens
  Payload ID: 18126
  Gene Name: transmembrane and coiled-coil domain family 3
  ENST ID: ENST00000551457
  CDS Start-End: 155-1495
ccaaagtccaggctgagtcatatggtaggtgctgtttggaatatctagcctgcctgccttgcagattcaaatgcctcgggcaggagggtgagctagctgccgatcctgctctgctcctgggtttgctgtgtggcccttggtagaacgtcatgacatgaataccttaagcctgcccctgaacatacgccgaggggggtcagacaccaacctcaactttgatgtcccggatggcatcctggacttccacaaggtcaaactcactgcagacagcctgaagcaaaaaattctaaaggtaacagagcagataaaaattgagcaaacatcgcgcgatgggaatgttgcggagtatctgaaactagtgaacaacgcagacaagcagcaggcgggacgtatcaagcaagtctttgagaagaagaatcagaaatcagctcactccatcgcccagctgcagaagaagttagagcagtatcatcgaaagctcagagagatcgagcagaatggagcctctaggagctcaaaggacatttccaaagaccacctgaaggatatacatcgctctttgaaagatgcccacgtgaaatctcgaactgccccccattgcatggagagcagcaaatcgggcatgccaggggtctcacttactccacctgtgttcgttttcaataagtccagagagtttgccaacctgatccggaataagtttggcagcgccgacaacattgctcacttgaaaaattccttagaggagtttaggccagaggcgagtgccagggcctacgggggcagcgctaccatcgtgaacaaacccaagtatggcagtgatgatgaatgttcgagtggcacgtcaggctcggccgacagtaacggaaaccagtcgtttggggctggtggagccagcacactggacagccagggcaagctcgccgtgatcctggaggaactgagggagatcaaggatacccaagctcagctggctgaggacatcgaggcactgaaggtgcagtttaagagagaatatggttttatttctcagaccctgcaagaggaaagatacaggtatgagcgactggaggaccagctgcatgacctgacggacctgcatcagcatgagacagccaacctgaagcaggagctggccagcattgaggagaaggtggcctaccaggcctacgagcgctcgcgggacatccaggaagccttggaatcctgccagactcgcatttctaagctggagctccaccagcaagagcagcaagctctgcagacagacaccgtgaatgctaaagttctcctggggaggtgcatcaacgtgatcctggccttcatgactgtcatcttagtgtgtgtgtccaccatcgcgaagttcgtctcacccatgatgaagagtcgctgccacattcttggcaccttctttgccgtgactcttcttgctatattttgtaaaaactgggaccatatcctgtgtgccatagaaaggatgataataccaagatgaagccactggttcctgccttcaagttctttcaagtttttattttaaagaaaactctgtgcatactaccaaattttacagtgaatgattgtgcggactcgtgtgtaagaaaaactaggactgtgtggtgtaaataactacaattctcttaactccgtagcagttgccaactcagtccttgtacttcgttaacacgaatctgtttcagagctctcctaccttgctcactgccttaatcagaccgatttcctgcccacctgaccagcccagcgtggtaaacctctgtatattgagaccttggcataattggtgatcctgaagaaagaggtctctctcctaagtctctgtcagaattgagcttcacaattgctaatggttgttttctgtgagtcctataaaaagcaaggatatgcatgattcagggaatgaagaatcacaggcttgggcagtgttaaacactgtggcctatggtccccgtgtgatccaccctgcttctctccaggggaccataggtcccgtcatgtactcagtgtccacagcagtcagtcgtgtatgaccctgtaacgtggaaatcttatcacacacctgttatccaacaagtctacctgaggggttttgttacactttaaatgggaaggcatagggatttatgaatggggctttcaccttctcatacccaggcaaccaacacctgattttgtctcaactggctagcaaatgcccagccttcagagtgtgcaggaatgttttcaaatccctcatcagactgtgactttaacattaatttggaatcctgtgagcactactctgaaggtttgtgttttggcaaatcttttttcttttttgagacagggctctgctaaatattgctcaggctggttgcaaactccttgcttcaagggatcctcccacctcagcctcccaagcagccgggactgcaggcacaagccaccatgcctggctgttttttggcaaatcttgattgtgataagcccccctggaggatatgattcactttatgtgattcatcttattcacaggtctgtgagggactgcaaagcttactcaggaaatgaaaacaaatgatggtcatgttgcagttttttccttgaaggacaaccgaaccatagcctctaaagttcaagtgcactgaggtgtcggaacgctgaaagcatgaggaaacgaggacgtagggtgtgactgaatggtggctagattagtgggagcagttcacctggatgaagattgagagcatcgtctttgagaagtgaaagactagcaagaataaaataaattaagtccagtgtttgagccaaggttgccacctgtctcttaacatctcactgaacataagtcctgaggtattaggacgaccatactgcctctgagctgaaaacattcaaaagttcacatccctgtttgggggataccattcaccgccttcagcccagatgatactttcctttaaatctgtgtctctgtgtgtataacaaagaggaagatggaaacaatgttcatggaaactgctgttgagccccttgtcccaccactcccgccatctgctgcaggcaggaaggcatgtgagtgtacgttttcttccaggagacatcaggtccccctggattcaaattaagtgcaatattttgcaaacagctcttcttagggaaatctcctgaaggaaaaaaatgtgacagaatgttccatagtctgagagaatggaatcgttgagcatttagtacaagtccagtgtgtgtgagcgggacttaggcagctcaagcttgcttttttttttaagcgtacaattgagtggttttagtaaattcacaaacttgttcaaccatcaccactatctaattccagactcacgcttttttaaacaataaatgtcatttcatgaaatctttggtgataaagtattttggattcagagaagagctcccttaccagtcccaccctgatctcatggctgtctctcctttcattgtcagactccccctggtctaccgcgttgatgtgtatacactgatctttcaagtctgggagacagataaggaggccaggtgcaaggcagggaggcagagagaatgttgtgcttcctttagcttttgtatttcgatggccagcattaccctttacctgtgggcatcagactcagcgtgggctgagtgctgagtgtaacttacactcctaaatcaagctggggcctgggtgggcccctcttggtatctgtgaatctttccaagcaccacttcggacacaccagggattgagtgctgctgttagtttagagaaggagagatgtctaacccttgaggtgaagggctctgggagggtccaagaagacgtaggcttcattttcacaccagcccacaccattccagtgctcagcctagcaaatgtgctttaatgcacacttctcagacctgtgatccgtgtatcttctccccagtgacagaagtagagaagagaatggaaagcagcacactccgtcccctctagtctggagctgttaacagaatctgctagaaactagctttattctaacataccgtaggatctaaatcctcctacctggatcatgaattcctttgaaataattcatattttcattgactctcactaaatgtcaaataaccttgttttcacttggataggctcaacctacctggcatatttattttgcagtcttgttgaaagttcatgaaactttgtactttttaataagatgatacactcgaaggaaacttttaatctctgcagtttattctctcttaaggaataaacactcccactgtttgttctcttcaatgtgtaaggagattaaatgacattttagaaatattacaattaaaaatagtgatgtagctgt

SEQ ID NO: 193100 - DNA, 483 bp, Homo sapiens
  Payload ID: 18126
  Gene Name: transmembrane and coiled-coil domain family 3
  ENST ID: ENST00000548918
  CDS Start-End: 87-483
tttgctctgccttcatcacattggtgtttactgtgcccagtccactgctggcatttgctctgcctaacaaggtagaacgtcatgacatgaataccttaagcctgcccctgaacatacgccgaggggggtcagacaccaacctcaactttgatgtcccggatggcatcctggacttccacaaggtcaaactcactgcagacagcctgaagcaaaaaattctaaaggtaacagagcagataaaaattgagcaaacatcgcgcgatgggaatgttgcggagtatctgaaactagtgaacaacgcagacaagcagcaggcgggacgtatcaagcaagtctttgagaagaagaatcagaaatcagctcactccatcgcccagctgcagaagaagttagagcagtatcatcgaaagctcagagagatcgagcagaatggagcctctaggagctcaaaggacatttccaaagaccacctgaaggatatac

SEQ ID NO: 193101 - DNA, 2224 bp, Homo sapiens
  Payload ID: 18127
  Gene Name: transmembrane and coiled-coil domains 1
  ENST ID: ENST00000367881
  CDS Start-End: 277-996
ctaatattacgaccacagaagttgggctgaggtagaagtcaagactatcccaataactggattctggccgagaaaaaggcgcgcgccagcaccccagtcagtaaaatctaccgggcaaagttcgccgccgccactatcctcctctggctctgaaatagttccaattctcgcgagattcggcctgactaccagcccttcagctccagtgagttgcgggttggtttcctctagactctcgtggccacaccgttctccgatacgagcctttccggtgctatgccccggaagcggaagtgcgatcttcgggctgtcagagttggtctgttactcggtggtggcggagtctacggaagccgttttcgcttcacttttcctggctgtagagcgctttccccctggcgggtgagagtgcagagacgaaggtgcgagatgagcactatgttcgcggacactctcctcatcgtttttatctctgtgtgcacggctctgctcgcagagggcataacctgggtcctggtttacaggacagacaagtacaagagactgaaggcagaagtggaaaaacagagtaaaaaattggaaaagaagaaggaaacaataacagagtcagctggtcgacaacagaaaaagaaaatagagagacaagaagagaaactgaagaataacaacagagatctatcaatggttcgaatgaaatccatgtttgctattggcttttgttttactgccctaatgggaatgttcaattccatatttgatggtagagtggtggcaaagcttccttttacccctctttcttacatccaaggactgtctcatcgaaatctgctgggagatgacaccacagactgttccttcattttcctgtatattctctgtactatgtcgattcgacagaacattcagaagattctcggccttgccccttcacgagccgccaccaagcaggcaggtggatttcttggcccaccacctccttctgggaagttctcttgaactcaagaactctttattttctatcattctttctagacacacacacatcagactggcaactgttttgtagcaagagccataggtagccttactacttgggcctctttctagttttgaattatttctaagccttttgggtatgattagagtgaaaatggcagccagcaaacttgatagtgcttttggtcctagatgatttttatcaaataagtggattgattagttaagttcaggtaatgtttatgtaatgaaaaacaaatagcatccttcttgtttcatttacataagtattttctgtgggaccgactctcaaggcactgtgtatgccctgcaagttggctgtctatgagcatttagagatttagaagaaaaatttagtttgtttaacccttgtaactgtttgttttgttgttgtttttttttcaagccaaatacatgacataagatcaataaagaggccaaatttttagctgttttatgtacaaggagagatctgtttcattttgttttgccgtatttctagatataagttttagcatgggccaggaaggactaaaataaaagtttttaaggtactgtactttttgccatacttgactcatatactcaaaatacagagttgtcttggtgtaggaattggaaagcaagagtggaaaggaacgtaataactcgttggagtttaaaaatgagggtcttggcaagtaacactgatgtctgaaaaaaaattaaatataaataaataaataaaaatgagggtcctcagctgttctcttcatatcctattacagtctctcagattcttgtgggggcactcttagatctcccttggagacaaggttatagttatatgttgttaatctcgcagagcttccttttagtcacaatagccttcattttctgccatgccccttcataagggagaaggatgtttgtaccatgatcctccccgcataatctatggaattaggagtcctgtgtggagtcttatcaataaatatgcacattcatcaaatgtctacttaaatgtgagtattctaccagtgagaaaaaacacataattttcaaggtaatcattgttaaaccaacagcaaacttctttcttatcagcaccataaagtccagaagacagtagaaaagtatcttcaaagtgctgaggaaaataagtatcaacttagaattttatgtacaatattggaggcaaaataaagacatgtttagacatacaaaa

SEQ ID NO: 193102 - DNA, 1946 bp, Homo sapiens
  Payload ID: 18127
  Gene Name: transmembrane and coiled-coil domains 1
  Uniprot ID: Q9UM00
  ENST ID: ENST00000392129
  CDS Start-End: 152-718
gccccggaagcggaagtgcgatcttcgggctgtcagagttggtctgttactcggtggtggcggagtctacggaagccgttttcgcttcacttttcctggctgtagagcgctttccccctggcgggtgagagtgcagagacgaaggtgcgagatgagcactatgttcgcggacactctcctcatcgtttttatctctgtgtgcacggctctgctcgcagagggcataacctgggtcctggtttacaggacagacaagtacaagagactgaaggcagaagtggaaaaacagagtaaaaaattggaaaagaagaaggaaacaataacagagtcagctggtcgacaacagaaaaagaaaatagagagacaagaagagaaactgaagaataacaacagagatctatcaatggttcgaatgaaatccatgtttgctattggcttttgttttactgccctaatgggaatgttcaattccatatttgatggtagagtggtggcaaagcttccttttacccctctttcttacatccaaggactgtctcatcgaaatctgctgggagatgacaccacagactgttccttcattttcctgtatattctctgtactatgtcgattcgacagaacattcagaagattctcggccttgccccttcacgagccgccaccaagcaggcaggtggatttcttggcccaccacctccttctgggaagttctcttgaactcaagaactctttattttctatcattctttctagacacacacacatcagactggcaactgttttgtagcaagagccataggtagccttactacttgggcctctttctagttttgaattatttctaagccttttgggtatgattagagtgaaaatggcagccagcaaacttgatagtgcttttggtcctagatgatttttatcaaataagtggattgattagttaagttcaggtaatgtttatgtaatgaaaaacaaatagcatccttcttgtttcatttacataagtattttctgtgggaccgactctcaaggcactgtgtatgccctgcaagttggctgtctatgagcatttagagatttagaagaaaaatttagtttgtttaacccttgtaactgtttgttttgttgttgtttttttttcaagccaaatacatgacataagatcaataaagaggccaaatttttagctgttttatgtacaaggagagatctgtttcattttgttttgccgtatttctagatataagttttagcatgggccaggaaggactaaaataaaagtttttaaggtactgtactttttgccatacttgactcatatactcaaaatacagagttgtcttggtgtaggaattggaaagcaagagtggaaaggaacgtaataactcgttggagtttaaaaatgagggtcttggcaagtaacactgatgtctgaaaaaaaattaaatataaataaataaataaaaatgagggtcctcagctgttctcttcatatcctattacagtctctcagattcttgtgggggcactcttagatctcccttggagacaaggttatagttatatgttgttaatctcgcagagcttccttttagtcacaatagccttcattttctgccatgccccttcataagggagaaggatgtttgtaccatgatcctccccgcataatctatggaattaggagtcctgtgtggagtcttatcaataaatatgcacattcatcaaatgtctacttaaatgtgagtattctaccagtgagaaaaaacacataattttcaaggtaatcattgttaaaccaacagcaaacttctttcttatcagcaccataaagtccagaagacagtagaaaagtatcttcaaagtgctgaggaaaataagtatcaacttagaattttatgtacaatattggaggcaaaataaagacatgtttagacatacaaaa

SEQ ID NO: 193103 - DNA, 752 bp, Homo sapiens
  Payload ID: 18127
  Gene Name: transmembrane and coiled-coil domains 1
  ENST ID: ENST00000481278
  CDS Start-End: 323-752
tctacggaagccgttttcgcttcacttttcctggctgtagagcgctttccccctggcgggtgagagtgcagagacgaaggtgcgagatgagcactatgttcgcggacactctcctcatcgtttttatctctgtgtgcacggctctgctcgcagagggtgagagcgggtatttctcagacgtttgatcagtccccgggaggaagggccccggggtcccctgtgccaccaggggaaagatcgcgagccttacttgcttgagaggctcatctactccacttcagggaatctctgggcaactcgtgaacaggagcaggaggggagtatggagtcgattgccgagttttctttggtctcaggcataacctgggtcctggtttacaggacagacaagtacaagagactgaaggcagaagtggaaaaacagagtaaaaaattggaaaagaagaaggaaacaataacagagtcagctggtcgacaacagaaaaagaaaatagagagacaagaagagaaactgaagaataacaacagagatctatcaatggttcgaatgaaatccatgtttgctattggcttttgttttactgccctaatgggaatgttcaattccatatttgatggtagagtggtggcaaagcttccttttacccctctttcttacatccaaggactgtctcatcgaaatctgctgggagatgacaccacagactgttccttcattttcctgtatattctctgtactatgtcgattcgac

SEQ ID NO: 193104 - DNA, 1735 bp, Homo sapiens
  Payload ID: 18127
  Gene Name: transmembrane and coiled-coil domains 1
  ENST ID: ENST00000580248
  CDS Start-End: 704-1018
gctttccgcagccgccgctgggcgctgccggggctgaggccgctgtcgctcgcctgcgagccgctcggagcccggtgacggggctgggtttcccgaaggagccaagagccttcctttgcccgcagcggctggtccggtttacatcccaggcagaggtcagcgtgatgctgctgctccaatccgggcgggcagcgcgctgctattcgccgaggcggaggcggcgaggcgtctggccccagcctccgcccctcccgggccccgccgccgcccgaggtctctgcgaaagggtctcactctatccaataggctggaatgcagtagcatgatcaccacttactgacgctttgacctcccagtctcaagcaatcctcccacttcagcctttcgagtagctgagactacagagtcttgctttgtcaccaggctggaatgcagtggcgcaatcttggctcactacaacctccacctcccggtttcaagcgattcttgtgcctcagcctcctgagtagctgggattacaggcataacctgggtcctggtttacaggacagacaagtacaagagactgaaggcagaagtggaaaaacagagtaaaaaattggaaaagaagaaggaaacaataacagagtcagctggtcgacaacagaaaaagaaaatagagagacaagaagagaaactgaagaataacaacagagatctatcaatggttcgaatgaaatccatgtttgctattggcttttgttttactgccctaatgggaatgttcaattccatatttgatggtagagtggtggcaaagcttccttttacccctctttcttacatccaaggactgtctcatcgaaatctgctgggagatgacaccacagactgttccttcattttcctgtatattctctgtactatgtcgattcgacagaacattcagaagattctcggccttgccccttcacgagccgccaccaagcaggcaggtggatttcttggcccaccacctccttctgggaagttctcttgaactcaagaactctttattttctatcattctttctagacacacacacatcagactggcaactgttttgtagcaagagccataggtagccttactacttgggcctctttctagttttgaattatttctaagccttttgggtatgattagagtgaaaatggcagccagcaaacttgatagtgcttttggtcctagatgatttttatcaaataagtggattgattagttaagttcaggtaatgtttatgtaatgaaaaacaaatagcatccttcttgtttcatttacataagtattttctgtgggaccgactctcaaggcactgtgtatgccctgcaagttggctgtctatgagcatttagagatttagaagaaaaatttagtttgtttaacccttgtaactgtttgttttgttgttgtttttttttcaagccaaatacatgacataagatcaataaagaggccaaatttttagctgttttatgtacaaggagagatctgtttcattttgttttgccgtatttctagatataagttttagcatgggccaggaaggactaaaataaaagtttttaaggtactgtactttttgccatacttgactcatatactcaaaatacagagttgtcttggtgtaggaattggaaagcaagagtggaaaggaacgtaataactcgttggagtttaaaaatgagggtcttggcaagtaacactgatgtctg

SEQ ID NO: 193105 - DNA, 760 bp, Homo sapiens
  Payload ID: 18127
  Gene Name: transmembrane and coiled-coil domains 1
  ENST ID: ENST00000465705
  CDS Start-End: 15-473
gcctttccggtgctatgccccggaagcggaagtgcgatcttcgggctgtcagagttggtctgttactcggtggtggcggagtctacggaagccgttttcgcttcacttttcctggctgtagagcgctttccccctggcgggtgagagtgcagagacgaaggtgcgagatgagcactatgttcgcggacactctcctcatcgtttttatctctgtgtgcacggctctgctcgcagagggcataacctgggtcctggtttacaggacagacaagtacaagagactgaaggcagaagtggaaaaacagagtaaaaaattggaaaagaagaaggaaacaataacagagtcagctggtcgacaacagaaaaagaaaatagacagagtctcaccctatcgcccaggctggagcacagtgacgcgttcatggcccactgcagcctcaaactcctgggctcaagtaatcctcccactgtagcctcccaagtagctgggactacaggggcacaccatcacgagagacaagaagagaaactgaagaataacaacagagatctatcaatggttcgaatgaaatccatgtttgctattggcttttgttttactgccctaatgggaatgttcaattccatatttgatggtagagtggtggcaaagcttccttttacccctctttcttacatccaaggactgtctcatcgaaatctgctgggagatgacaccacagactgttccttcattttcctgtatattctctgtactatg

SEQ ID NO: 193106 - DNA, 1100 bp, Homo sapiens
  Payload ID: 18127
  Gene Name: transmembrane and coiled-coil domains 1
  ENST ID: ENST00000464650
  CDS Start-End: 301-615
gggctgtcagagttggtctgttactcggtggtggcggagtctacggaagccgttttcgcttcacttttcctggctgtagagcgctttccccctggcgggtgagagtgcagagacgaaggcataacctgggtcctggtttacaggacagacaagtacaagagactgaaggcagaagtggaaaaacagagtaaaaaattggaaaagaagaaggaaacaataacagagtcagctggtcgacaacagaaaaagaaaatagagagacaagaagagaaactgaagaataacaacagagatctatcaatggttcgaatgaaatccatgtttgctattggcttttgttttactgccctaatgggaatgttcaattccatatttgatggtagagtggtggcaaagcttccttttacccctctttcttacatccaaggactgtctcatcgaaatctgctgggagatgacaccacagactgttccttcattttcctgtatattctctgtactatgtcgattcgacagaacattcagaagattctcggccttgccccttcacgagccgccaccaagcaggcaggtggatttcttggcccaccacctccttctgggaagttctcttgaactcaagaactctttattttctatcattctttctagacacacacacatcagactggcaactgttttgtagcaagagccataggtagccttactacttgggcctctttctagttttgaattatttctaagccttttgggtatgattagagtgaaaatggcagccagcaaacttgatagtgcttttggtcctagatgatttttatcaaataagtggattgattagttaagttcaggtaatgtttatgtaatgaaaaacaaatagcatccttcttgtttcatttacataagtattttctgtgggaccgactctcaaggcactgtgtatgccctgcaagttggctgtctatgagcatttagagatttagaagaaaaatttagtttgtttaacccttgtaactgtttgttttgttgttgtttttttttcaagccaaatacatgacataagatcaataaagaggccaaatttttagctgttttatgtacaa

SEQ ID NO: 193107 - DNA, 581 bp, Homo sapiens
  Payload ID: 18127
  Gene Name: transmembrane and coiled-coil domains 1
  ENST ID: ENST00000476143
  CDS Start-End: 1-287
agtgcgatcttcgggctgtcagagttggtctgttactcggtggtggcggagtctacggaagccgttttcgcttcacttttcctggctgtagagcgctttccccctggcgggtgagagtgcagagacgaaggtgcgagatgagcactatgttcgcggacactctcctcatcgtttttatctctgtgtgcacggctctgctcgcagagggcataacctgggtcctggtttacaggacagacaagtacaagagactgaaggcagaagtggaaaaacagagtaaaaaatagagacaagaagagaaactgaagaataacaacagagatctatcaatggttcgaatgaaatccatgtttgctattggcttttgttttactgccctaatgggaatgttcaattccatatttgatggtagagtggtggcaaagcttccttttacccctctttcttacatccaaggactgtctcatcgaaatctgctgggagatgacaccacagactgttccttcattttcctgtatattctctgtactatgtcgattcgacagaacattcagaagattctcggccttgccccttcacga

SEQ ID NO: 193108 - DNA, 4468 bp, Homo sapiens
  Payload ID: 18127
  Gene Name: transmembrane and coiled-coil domains 1
  ENST ID: ENST00000612311
  CDS Start-End: 19-738
acgagcctttccggtgctatgccccggaagcggaagtgcgatcttcgggctgtcagagttggtctgttactcggtggtggcggagtctacggaagccgttttcgcttcacttttcctggctgtagagcgctttccccctggcgggtgagagtgcagagacgaaggtgcgagatgagcactatgttcgcggacactctcctcatcgtttttatctctgtgtgcacggctctgctcgcagagggcataacctgggtcctggtttacaggacagacaagtacaagagactgaaggcagaagtggaaaaacagagtaaaaaattggaaaagaagaaggaaacaataacagagtcagctggtcgacaacagaaaaagaaaatagagagacaagaagagaaactgaagaataacaacagagatctatcaatggttcgaatgaaatccatgtttgctattggcttttgttttactgccctaatgggaatgttcaattccatatttgatggtagagtggtggcaaagcttccttttacccctctttcttacatccaaggactgtctcatcgaaatctgctgggagatgacaccacagactgttccttcattttcctgtatattctctgtactatgtcgattcgacagaacattcagaagattctcggccttgccccttcacgagccgccaccaagcaggcaggtggatttcttggcccaccacctccttctgggaagttctcttgaactcaagaactctttattttctatcattctttctagacacacacacatcagactggcaactgttttgtagcaagagccataggtagccttactacttgggcctctttctagttttgaattatttctaagccttttgggtatgattagagtgaaaatggcagccagcaaacttgatagtgcttttggtcctagatgatttttatcaaataagtggattgattagttaagttcaggtaatgtttatgtaatgaaaaacaaatagcatccttcttgtttcatttacataagtattttctgtgggaccgactctcaaggcactgtgtatgccctgcaagttggctgtctatgagcatttagagatttagaagaaaaatttagtttgtttaacccttgtaactgtttgttttgttgttgtttttttttcaagccaaatacatgacataagatcaataaagaggccaaatttttagctgttttatgtacaaggagagatctgtttcattttgttttgccgtatttctagatataagttttagcatgggccaggaaggactaaaataaaagtttttaaggtactgtactttttgccatacttgactcatatactcaaaatacagagttgtcttggtgtaggaattggaaagcaagagtggaaaggaacgtaataactcgttggagtttaaaaatgagggtcttggcaagtaacactgatgtctgaaaaaaaattaaatataaataaataaataaaaatgagggtcctcagctgttctcttcatatcctattacagtctctcagattcttgtgggggcactcttagatctcccttggagacaaggttatagttatatgttgttaatctcgcagagcttccttttagtcacaatagccttcattttctgccatgccccttcataagggagaaggatgtttgtaccatgatcctccccgcataatctatggaattaggagtcctgtgtggagtcttatcaataaatatgcacattcatcaaatgtctacttaaatgtgagtattctaccagtgagaaaaaacacataattttcaaggtaatcattgttaaaccaacagcaaacttctttcttatcagcaccataaagtccagaagacagtagaaaagtatcttcaaagtgctgaggaaaataagtatcaacttagaattttatgtacaatattggaggcaaaataaagacatgtttagacatacaaaactaagagagttgaattattaaaggttatattccaaggacaaaaaagaggatctgcccaaggtgaaggtatggcatacaagaaacaatggtcaacagagaaataaaatatatggatgaatatatggataaatttgagtgttttatggattatctaatttaaggattatcccaagacagccctacaaggtaattactgttcttaccttcatttaacagatgaggaaactggggcaggggaggttagtaacttgctctgcatcacagagctattgagtggcagtcaggatttgaattcaaccagtgtaaagcctaatagtccaggctgtcaagctctatattacagcctcctcatgggtatgtggtgattctcttctcatcccatctcctcaactagagtgtgtgagctctctaaagttggactttgtctttttttttgttctccttattacaaagtagtcaacgtgggtggaaacacagcaggagctcaataaaagcagatgaaagggaacagaagtccctattctgagactagttttatcagaaggatgtctgataatggatggtaatgacttttaatggtcttttctccatatcattgaccactctaagcaaaataataattcgaatgataatgaagaaaatgatgcccatgataacaataatgacaaatatgaaatggctaaaataaaacatgaaaccatcctcaaaattctgccatcacctttttaaagtgagaatatatagcacactctatcactcataccctgaggctttgaagttggtgctttctaatcagacttcttatggaccaggttttcatatacaaattatgtttccatggtaaggaataaataagagggagaagttaaaaaggagagattacatctattcaccctattcattaaaatttttttaaatttttttccaaatatgttctgcttatgtatattcactctattcttaaaagcacaataacaaagatatattacagaggaaataaaactatcacaagaattaaattcaaggagttattaagggctactgcagcctcacaattagttttttaaaatttcttgtcctgaagaaatttcaagactagttatttggatgacactctaggtccacagcatcaccagatcattggagatgacatttcaagacaggcctctgaacatctctcataacacataatttggttattttccctatgtaagatggattgtctcctgtctagggaagaaaaacagccattactaatatctgcattagtctactcaggttgcaatcataatatgctaaagtagtaaacttttaaaaatgacagtaaacctgagtttattaacaggttacattctaaaagctaagctagtttggaaattggaaagcaaatgtgtgtagatattcatatgtccttgaccagactgggcctttctcttcccaggtaagtcattctctccaatggggccagttacttaaaattacatcagacaattgatagagcttctagatcccccttctaaaacaaaagcattttgccacaaactaggatggagtaggtttttttcagactatttatacttattttatgtatttcaatactgccctttaagtaaaagtactatatactttctctttttttagattaattctgcttaagtcagtcttttaatttattctagtttgagtttttaaaaaattttagaatgaaaaatctcaaaaatatactattatgtatatacactattttatatatatatatatatatatatagagagagagagagagagagagagagagagagagagagaaagagagaataaagaacacctaggtaacccatcctccaccttcgacaattatcagctcctagctaatttgtgtcatctgtaaccccacctgcttctgccctttctgtattattttgaagcaaatcttatcatttatctgtaaatatttcaggactttaaaaaatatgtgtaatctgaataccatttttacacctaagaaaatggacaattccttaatataatgtgttgtctatagatgtcaaaaatttttgcagttttttggaatcaggaaccaagtaaggtactgaatattgcagttagctgatacacatcctaaatttcttcaattgttgtggtcctcaaactagagtgtatcagaatcactagagccttgttagaacacaaactgctgggccccaccccagagctggtgatctgtaagtctgctgtggagtctgggaatttgcatctctaacaaattcccaggtgatgctgaagctgcaggtttggggttcactcacctattggttcatcagcatctctctgccctcttacaatatatttgttgaagaagttgtgttgtttaccttgtagagtttttcttagtttggattttggtgatagcatgctggttttttcatactattggttgtctctgtaatgcgagcagcttttgatctattaattaatgagatattaaaagtgatggtattct

SEQ ID NO: 193109 - DNA, 477 bp, Homo sapiens
  Payload ID: 18127
  Gene Name: transmembrane and coiled-coil domains 1
  ENST ID: ENST00000628579
  CDS Start-End: 19-477
acgagcctttccggtgctatgccccggaagcggaagtgcgatcttcgggctgtcagagttggtctgttactcggtggtggcggagtctacggaagccgttttcgcttcacttttcctggctgtagagcgctttccccctggcgggtgagagtgcagagacgaaggtgcgagatgagcactatgttcgcggacactctcctcatcgtttttatctctgtgtgcacggctctgctcgcagagggcataacctgggtcctggtttacaggacagacaagtacaagagactgaaggcagaagtggaaaaacagagtaaaaaattggaaaagaagaaggaaacaataacagagtcagctggtcgacaacagaaaaagaaaatagacagagtctcaccctatcgcccaggctggagcacagtgacgcgttcatggcccactgcagcctcaaactcctgggctcaagtaatcctcccactgtag

SEQ ID NO: 193110 - DNA, 739 bp, Homo sapiens
  Payload ID: 18128
  Gene Name: transmembrane and coiled-coil domains 2
  Uniprot ID: Q7Z6W1
  ENST ID: ENST00000372766
  CDS Start-End: 94-642
ggaatacctaggcctccagactactccccctaactcatatttagattcctgaagcttctgcacatgtagttcctagagctgctgcttattaaaatgtcaacatcttcatcttctagctgggacaacctcttagagtctctctctctcagcacagtatggaattggatacaagcaagttttttgggagagactagtgcacctcagcaaacaagtttgggactattagataatcttgctccagctgtgcaaatcatcttgaggatttctttcttgattttattgggaataggaatatatgccttatggaaacgaagtattcagtcaattcagaaaacattgttgtttgtaatcacactctacaaactttacaagaagggctcacatatttttgaggctttgctagccaacccagaaggaagtggtctccgaattcaagacaataataatcttttcctgtccttgggtctgcaagagaaaattttgaaaaaacttaagacagtggaaaacaaaatgaagaacctagaagggataatcgttgctcaaaaacctgccacgaagagggattgctcctctgagccctactgcagctgctctgactgccagagtcccttgtccacatcagggtttacttcccccatttgaaatgtgatggactccaatcttttccaggaaagcactgtttccctcatgtgtgcagtggtgtatcaataaagatagagaacgctattgaaattaccgt

SEQ ID NO: 193111 - DNA, 2132 bp, Homo sapiens
  Payload ID: 18129
  Gene Name: transmembrane and coiled-coil domains 3
  Uniprot ID: Q6UWJ1
  ENST ID: ENST00000375391
  CDS Start-End: 312-1556
gagcgggggcggtgctgggcagggcggcggccgctccctcccggactcccggcctcccggcctccctggtcccgcctgggaagggatgcaaggaagccctccggcgctgcgctccgaggcgggagacagcgtccccctccgcccctcgggtcctggcgcctcagagcccggcccaggccgcggaacggtgatgctcgggccggacgggcgggcgcggatccctgcgtcccgctgaaaatgtgtgtctgacatgcaagctcagtggggcagagacccgtggattgctgtgccctgccctccggacctggatcatgaaggtgttgggaagaagcttcttctgggtgctgtttcccgtccttccctgggcggtgcaggctgtggagcacgaggaggtggcgcagcgtgtgatcaaactgcaccgcgggcgaggggtggctgccatgcagagccggcagtgggtccgggacagctgcaggaagctctcagggcttctccgccagaagaatgcagttctgaacaaactgaaaactgcaattggagcagtggagaaagacgtgggcctgtcggatgaagagaaactgtttcaggtgcacacgtttgaaattttccagaaagagctgaatgaaagtgaaaattccgttttccaagctgtctacggactgcagagagccctgcagggggattacaaagatgtcgtgaacatgaaggagagcagccggcagcgcctggaggccctgagagaggctgcaataaaggaagaaacagaatatatggaacttctggcagcagaaaaacatcaagttgaagcccttaaaaatatgcaacatcaaaaccaaagtttatccatgcttgacgagattcttgaagatgtaagaaaggcagcggatcgtctggaggaagagatagaggaacatgcttttgacgacaataaatcagtcaagggggtcaattttgaggcagttctgagggtggaggaagaagaggccaattctaagcaaaatataacaaaacgagaagtggaggatgacttgggtcttagcatgctgattgactcccagaacaaccagtatattttgaccaagcccagagattcaaccatcccacgtgcagatcaccactttataaaggacattgttaccataggaatgctgtccttgccttgtggctggctatgtacagccataggattgcctacaatgtttggttatattatttgtggtgtacttctgggaccttcaggactaaatagtattaagtctattgtgcaagtggagacattaggagaatttggggtgttttttactctttttcttgttggcttagaattttctccagaaaagctaagaaaggtgtggaagatttccttacaagggccgtgttacatgacactgttaatgattgcatttggcttgctgtgggggcatctcttgcggatcaaacccacgcagagcgtcttcatttccacgtgtctgtccttgtcaagcacacccctcgtgtccaggttcctcatgggcagtgctcggggtgacaaagaaggcaacagaacagccctctagcagagcgtcagtgcagtcgtgttatcccggcttttacagaatattcttgtcctattttagaattttccggagtagtttatttgcagtctgttgattatgtgcagtagacccgggacactgcgttttaccgatcaccttgaatgtggtgcctggatgtgccttttttttttttccctgaaattattattaattttctattgtgagttcatcagttcatagtttttttagtaaagaagcaaaattaaaaggcttttaaaaatgtacaacttcagaattataatctgttagtcaaatatttgttattaaacatttctgtaatatgaagttgtaatcctggccgtgagcttggaagcttacttttgattcttaaagcctatgttttctaaaatgagacaaatacggatgtctatttgccttttattgtaacttttaaatgaaataatttcatgtcaatttctattagatatatcacttaaaatatttggttttaaatcacaagaatatgtattctttaataaagataatttatgatcatggtataattaattgaaatttattaaaatctgtttttattaa

SEQ ID NO: 193112 - DNA, 3050 bp, Homo sapiens
  Payload ID: 18129
  Gene Name: transmembrane and coiled-coil domains 3
  Uniprot ID: Q6UWJ1
  ENST ID: ENST00000434316
  CDS Start-End: 360-2393
aaagggggcagtgactgcggctgggcgggagtccgggtcggcttggctgagcgggggcggtgctgggcagggcggcggccgctccctcccggactcccggcctcccggcctccctggtcccgcctgggaagggatgcaaggaagccctccggcgctgcgctccgaggcgggagacagcgtccccctccgcccctcgggtcctggcgcctcagagcccggcccaggccgcggaacggtgatgctcgggccggacgggcgggcgcggatccctgcgtcccgctgaaaatgtgtgtctgacatgcaagctcagtggggcagagacccgtggattgctgtgccctgccctccggacctggatcatgaaggtgttgggaagaagcttcttctgggtgctgtttcccgtccttccctgggcggtgcaggctgtggagcacgaggaggtggcgcagcgtgtgatcaaactgcaccgcgggcgaggggtggctgccatgcagagccggcagtgggtccgggacagctgcaggaagctctcagggcttctccgccagaagaatgcagttctgaacaaactgaaaactgcaattggagcagtggagaaagacgtgggcctgtcggatgaagagaaactgtttcaggtgcacacgtttgaaattttccagaaagagctgaatgaaagtgaaaattccgttttccaagctgtctacggactgcagagagccctgcagggggattacaaagatgtcgtgaacatgaaggagagcagccggcagcgcctggaggccctgagagaggctgcaataaaggaagaaacagaatatatggaacttctggcagcagaaaaacatcaagttgaagcccttaaaaatatgcaacatcaaaaccaaagtttatccatgcttgacgagattcttgaagatgtaagaaaggcagcggatcgtctggaggaagagatagaggaacatgcttttgacgacaataaatcagtcaagggggtcaattttgaggcagttctgagggtggaggaagaagaggccaattctaagcaaaatataacaaaacgagaagtggaggatgacttgggtcttagcatgctgattgactcccagaacaaccagtatattttgaccaagcccagagattcaaccatcccacgtgcagatcaccactttataaaggacattgttaccataggaatgctgtccttgccttgtggctggctatgtacagccataggattgcctacaatgtttggttatattatttgtggtgtacttctgggaccttcaggactaaatagtattaagtctattgtgcaagtggagacattaggagaatttggggtgttttttactctttttcttgttggcttagaattttctccagaaaagctaagaaaggtgtggaagatttccttacaagggccgtgttacatgacactgttaatgattgcatttggcttgctgtgggggcatctcttgcggatcaaacccacgcagagcgtcttcatttccacgtgtctgtccttgtcaagcacacccctcgtgtccaggttcctcatgggcagtgctcggggtgacaaagaaggcgacattgactacagcaccgtgctcctcggcatgctggtgacgcaggacgtgcagctcgggctcttcatggccgtcatgccgactctcatacaggcgggcgccagtgcatcttctagcattgtcgtggaagttctccgaatcctggttttgattggtcagattcttttttcactagcggcggtttttcttttatgtcttgttataaagaagtatctcattggaccctattatcggaagctgcacatggaaagcaaggggaacaaagaaatcctgatcttgggaatatctgcctttatcttcttaatgttaacggtcacggagctgctggacgtctccatggagctgggctgtttcctggctggagcgctcgtctcctctcagggccccgtggtcaccgaggagatcgccacctccatcgaacccatccgcgacttcctggccatcgttttcttcgcctccatagggctccacgtgttccccacgtttgtggcgtacgagctcacggtgctggtgttcctcaccttgtcagtggtggtgatgaagtttctcctggcggcgctggtcctgtctctcattctgccgaggagcagccagtacatcaagtggatcgtctctgcggggcttgcccaggtcagcgagttttcctttgtcctggggagccgggcgcgaagagcgggcgtcatctctcgggaggtgtacctccttatactgagtgtgaccacgctcagcctcttgctcgccccggtgctgtggagagctgcaatcacgaggtgtgtgcccagaccggagagacggtccagcctctgatggctcggagatgatggaccgtggaagggaagcgtctgtggggagtgagcgcttagatggccagcagctgctccttctgggaagctcgcaccttggcaacagaacagccctctagcagagcgtcagtgcagtcgtgttatcccggcttttacagaatattcttgtcctattttagaattttccggagtagtttatttgcagtctgttgattatgtgcagtagacccgggacactgcgttttaccgatcaccttgaatgtggtgcctggatgtgccttttttttttttccctgaaattattattaattttctattgtgagttcatcagttcatagtttttttagtaaagaagcaaaattaaaaggcttttaaaaatgtacaacttcagaattataatctgttagtcaaatatttgttattaaacatttctgtaatatgaagttgtaatcctggccgtgagcttggaagcttacttttgattcttaaagcctatgttttctaaaatgagacaaatacggatgtctatttgccttttattgtaacttttaaatgaaataatttcatgtcaatttctattagatatatcacttaaaatatttggttttaaatcacaagaatatgtattctttaataaagataatttatgatcatggtataa

SEQ ID NO: 193113 - DNA, 459 bp, Homo sapiens
  Payload ID: 18129
  Gene Name: transmembrane and coiled-coil domains 3
  ENST ID: ENST00000473287
  CDS Start-End: 1-437
aaattttccagaaagagctgaatgaaagtgaaaattccgttttccaagctgtctacggactgcagagagccctgcagggggattacaaagatgtcgtgaacatgaaggagagcagccggcagcgcctggaggccctgagagaggctgcaataaaggaagaaacagaatatatggaacttctggcagcagaaaaacatcaagttgaagcccttaaaaatatgcaacatcaaaaccaaagtttatccatgcttgacgagattcttgaagatgtaagaaaggcagcggatcgtctggaggaagagatagaggaacatgcttttgacgacaataaatcagtaagcgttccagaacagctgcttcttcacctcctgagccactcactaatcagaagacatgttgttgaaattgttcacgtgtatgtttttaatgtagattgaaaatgaagacaaactaaaatgc

SEQ ID NO: 193114 - DNA, 3542 bp, Homo sapiens
  Payload ID: 18129
  Gene Name: transmembrane and coiled-coil domains 3
  ENST ID: ENST00000620021
  CDS Start-End: 1-285
tttctcctggcggcgctggtcctgtctctcattctgccgaggagcagccagtacatcaagtggatcgtctctgcggggcttgcccaggtcagcgagttttcctttgtcctggggagccgggcgcgaagagcgggcgtcatctctcgggaggtgtacctccttatactgagtgtgaccacgctcagcctcttgctcgccccggtgctgtggagagctgcaatcacgaggcctcacctcccaacgcttgcagtgcacatcgaggggacagaagcatttgaaccgtagcaggcattcaggatacagtggagtctctgcaacagggtgactttttttttgtctccaacacctgtgaccatctttttaattttgttaaactgaaggaaaccgacttgatgagagtaacatcaaactccccccaaaacacgaaattagcctctctctgcaagatgaaataagaagtgccctgaatgacgagagaaagcatgctagggtctctgcctaactgatcactcaggtaagatcctaactgcccaggaacggtgtcctcaaagccccagctgggcccacctgccccactccagccacaggacctggctctgtgaacccgtcactcccgttttcacccccacctctctgctagtgacttcctcatctgtgacctgcccgtttgtcccatgctgacccagcagaaccctttcttgacctcatgactcctctttcatccagaccttccagaaagcttcaccctccccatcccatccccatcatgtctgcccctgtcatccagatgggggtctccgagccaccgagcccctggtagccacattgcccccaccctgctctcagcatttccccagtgtgtagcatgtcactagaaagaagtgggaggacggactcatggtgagtcttgtggggacatgtttgctggaggctaaccagcctgatcatgacatcttcatcttaaatttgaaaattgtcatcaggttacggtgaaatcctaccggatcaacatctgagaccaggcttatggaagtgagcttccaacctgaatgcttgaggctgagggggtgttggcggcctcgataacaacctgaacaacagctggcagcagggagtgcctgggccatgtgtccccagagcactgacctgggtggtccagtctcctgtctcgagctccagccatgagcttacacggccttcacactccccccaaaaccagccattctcaaccagcgaggcctctgtgtctgcaaggccagttttatttcttctttgatatttctgcttctgtgtcctttccccgctgcccaaaagctgcctcccgtctgcccatgcagagctgtattacccaacaacacccagctcgactcggacagcacccagctcaactcggacaggccccgggaaagtaagagcttggggggagacccacaggcccacacggcagcactgcgaggctagaccgtaaacatgggtcaattgaatatttataaacaggatacttaaaggttcttgggatattgaacaatgaaagaaattgtactatttgaaaattctatttcacatgaaaatgtaaaatttcagcatatcagaaagcatcgtgaacaaatttgaaagccaagcaaaactgggaaaaatatttggataaaaaaatcctaacactggtacataatacataataggcagttcatatgtattttttgtatgaatgaaacttacaatacttttattaatgtcatgggaacttataaaaactgcatggagatattttaaagaaaaaattttgaaacccattttggttttctttataattccttcagttcagcccattcctgtaaccacgtgctcatccccacaggactaggcagtgcccacccttggtgccctgcagtgcaccgcaaggacatggccgtggcctggagccgcgtccctgagttcctggtgggccgcgtgagtctccctgttcctccctgctgccttctcctctcctggcttccccaccccatacttccctgatgatatggtttggctgtgtccccacccaaatctcattttgaattgtaatcgtcatgggttgaccgagggaggtgattggatcatgggggcagatgtcccccaggctgttctcatgatagtgagttctcacaaggtctgacggttttaaaagtggcagtttgttctcgcgctctcgcttctccatcctgctgccttgtgaataaggatgtgtctgcttccccttctgccgtgattgtgtttcctgaggtctccccagccatggagaactgcaagtcaattaaacctgtttcctttataaattacccagtcttggggaaggcgtgagaacagacaaacatgcctgagtccccgagtctgtgatgctcctcattcttcagcacggcctgtgcccgggacggggcgctcctccagtgcagagctcacaccatgactgtggtgtccttcaaataacactgctgctgccagcttcccagggactcttctcctgtgtgattccagtgccttgcctatgtccctgctaatcttctggagtttaggggtccgtgcgaagcccaccccacctgagtcctttcatcctgggtgccttcacctccgtccaggactccggggttgcagccacacatgctcatgtcaccgtgaggcccagccctccagggcctgagatgtacagatgctatccccctgggcacccagtgtttccccttcctccctgtctgccttttgctcaatctctcagcgccctcaggaagccctttcacagctcagcagggaaacctctgggctcctccccctccagcaagtcacctggaagctctcaggctggccatggaaagctgaacccactgccaggggactggacagagaggctggtctcattttccaatcccttccagaaggaaggaggatgcttctcctgagagcagcgacaggtttgtgtcctgtgacctctgccttccctcgcccgggggagggtgatggggcgtctttttggctttggtttaagtagcaaaagagatggagtgttcaaaggattgaggggtcggccgagggtggggcttctcagtgaggggcgggtcctctgggcgtcatgagggcctggggagaggaccctgacccactgccagggagctgtgccagaggttcccatgggacatggaaggggaaccgacatccgtttctgcactggggtgtggacacctggccccacaccacctaggttcccccacaggggcctgaagactggaggttctctccagaatgttctggtttgattctgagagcaggagagacacccataaaaatgattggggttaaatttctggccaggtagatgggaactcacagccaaaatttaattaaggagaataaacaattgtgccacgccatgcatccaagtccggcagggcaaatccacacccgctactcactgagcttcccctgggccggaatgctccccctacatttgcaagaacaaagcctccttcctgtagaaaagaaaacaaaagtaaaataaaaaagaacaaagc

SEQ ID NO: 193115 - DNA, 491 bp, Homo sapiens
  Payload ID: 18129
  Gene Name: transmembrane and coiled-coil domains 3
  ENST ID: ENST00000462877
  CDS Start-End: 1-491
aatataacaaaacgagaagtggaggatgacttgggtcttagcatgctgattgactcccagaacaaccagtatattttgaccaagcccagagattcaaccatcccacgtgcagatcaccactttataaaggacattgttaccataggaatgctgtccttgccttgtggctggctatgtacagccataggattgcctacaatgtttggttatattatttgtggtgtacttctgggaccttcaggactaaatagtattaaggtgtggaagatttccttacaagggccgtgttacatgacactgttaatgattgcatttggcttgctgtgggggcatctcttgcggatcaaacccacgcagagcgtcttcatttccacgtgtctgtccttgtcaagcacacccctcgtgtccaggttcctcatgggcagtgctcggggtgacaaagaaggcgacattgactacagcaccgtgctcctcggcatgctggtgacgca

SEQ ID NO: 193116 - DNA, 2822 bp, Homo sapiens
  Payload ID: 18129
  Gene Name: transmembrane and coiled-coil domains 3
  ENST ID: ENST00000622371
  CDS Start-End: 1-381
ataacaaaacgagaagtggaggatgacttgggtcttagcatgctgattgactcccagaacaaccagtatattttgaccaagcccagagattcaaccatcccacgtgcagatcaccactttataaaggacattgttaccataggaatgctgtccttgccttgtggctggctatgtacagccataggattgcctacaatgtttggttatattatttgtggtgtacttctgggaccttcaggactaaatagtattaagtctattgtgcaagtggagacattaggagaatttggggtgttttttactctttttcttgttggcttagaattttctccagaaaagctaagaaaggtaaggacctcatcaacctgttactgcagctaaggagcttcacatcatgtggttttggttcatacacttttaacacttgttgatgaattcactatcaaatgtttttagaatagaatatgatatttcggtttgatgttatttttgggacaaattcagaaagataaaaaatatcaggtttgaaagcgtagaaattcagtgaagaattggaatttgccttcacatggctaacttcaggaagggtctggaaagtaatgtgtgtgaactttaatagatggctccctctaaggtgcgaaactgttagagggtcagatgtcatagagcttgcatattcagtgtgttaccctagaaaaaactttgtcaattggaagtgagttaattaaaagacactttgtttttccagacaccgcacaaaagaggaaagtagctgattaaaagccagggtggggagaggtaaaatgaacactgttcataacaaaaacaccctgtgaattaagatcagataccactttgcctgcagtgctagctggaaaactagcatcgacttagcaaaagtttttaagtgactgtcagatgtaacaggcattcttgaaccagattcgtgagaatcacaactgtacaccctttctgtatttttggggttttttttccacgaaagacttggtcattttaaacaaagtgacttaatttacagtgtctggtttgcctaatcattcagctctctcatgtagtattccttctttttttaatttaaaatttttttatttcaataggttgttgggaacaggtggtgtttggttacatgcgtaggttctttagtggtgatctgtgagattttggtgcacctgtcaccagagcagtgtacactgctcccgatgtgtagtcttttatccctcgccacccaccaccctttgccccaagtccgcagagtccagtgtgtcattcttacacatttgtgtcctcatagcttagctcccgcttaggagtgagatcatacgacgtttgattttccattcctgagttactgcacttagaataatggtctccagttccatccaggttgctacaaataccccttttttgttcctttttatggctgagtagtattccatggtatataaataccacattttctattgatgggcatttgggctggttccatatttttgcaactgcaaatcgtgctgctctagacatgtgcatgcaagtctctttttcgtataatgacttattttcccctggcagtggggttgctggatcaaatggtagagctacttttagttctctgagcaacctccacactgttttccttagtggttgtgctagtttacgctcccaccagcagtgcagaagtgttccctgttccccacatccctgccaacatctattcttttcattttttggttacggccattcttggaggagtaaggtattgcattgtggttttgatttgcattttcctgatcattagtgatgttcagcatttttttatgtctgttggccatttgtatatcttctttagagaattgtctatttatatccttagcccacttttggatggggttgtttgtttttttcttgctgacttttttgagttctttgtagattctggatattagtcctttgtcggatgtatagattgtggagattttctccagctctttggatttgtacactctttttggagagctgtctagcaatttgacctaaaagccttaaaatgtacatatgccttgacctggtagttcttctaggtctctctccaaaggaaagaatcaaacataagtttttaaaaaatttacccacaaaaggtttcacctcctcattgtaaatttttaagaaacagtggaaccagtcctgagcatctaacggtcagttcagctgcggcgtgactaccatggagtgttaggtagccactgcaaagtaacaagagcatcagcaacagagcaaaatatcggttggaaagctaaatgtggggaaaaaaggagcatgtaacatgaccgcggcaatgtaaaagaagcaccaatacatgggggaaaaatgggaaagaagcgttccgggtagccatgatgacttctggtttcttctccatattttccaaattttctataataagcagtcaatactttgtcattaggaggaagaataaacttttcttttaaaggcttgtgtttactttcagaagtcaactctgatctcactggcatgtttttctttatactctcttcccatttgcttcctcagttcatcctcttacctagaactttttgttttctttatctttctgtttttccactaaaagctccgtttttccatcttcccattactctccctttcctgtgtacactcctgaagacaggcatcctcataaggtgttctgaattaactttagggtgttctccaggtactttgcatctttttatatttcttgtaaattgttaatttctaagctccatgattaaagagaattcaccact

SEQ ID NO: 193117 - DNA, 2843 bp, Homo sapiens
  Payload ID: 18129
  Gene Name: transmembrane and coiled-coil domains 3
  Uniprot ID: Q6UWJ1
  ENST ID: ENST00000474393
  CDS Start-End: 259-1833
ctcccggcctccctggtcccgcctgggaagggatgcaaggaagccctccggcgctgcgctccgaggcgggagacagcgtccccctccgcccctcgggtcctggcgcctcagagcccggcccaggccgcggaacggtgatgctcgggccggacgggcgggcgcggatccctgcgtcccgctgaaaatgtgtgtctgacatgcaagctcagtggggcagagacccgtggattgctgtgccctgccctccggacctggatcatgaaggtgttgggaagaagcttcttctgggtgctgtttcccgtccttccctgggcggtgcaggctgtggagcacgaggaggtggcgcagcgtgtgatcaaactgcaccgcgggcgaggggtggctgccatgcagagccggcagtgggtccgggacagctgcaggaagctctcagggcttctccgccagaagaatgcagttctgaacaaactgaaaactgcaattggagcagtggagaaagacgtgggcctgtcggatgaagagaaactgtttcaggtgcacacgtttgaaattttccagaaagagctgaatgaaagtgaaaattccgttttccaagctgtctacggactgcagagagccctgcagggggattacaaagatgtcgtgaacatgaaggagagcagccggcagcgcctggaggccctgagagaggctgcaataaaggaagaaacagaatatatggaacttctggcagcagaaaaacatcaagttgaagcccttaaaaatatgcaacatcaaaaccaaagtttatccatgcttgacgagattcttgaagatgtaagaaaggcagcggatcgtctggaggaagagatagaggaacatgcttttgacgacaataaatcagtcaagggggtcaattttgaggcagttctgagggtggaggaagaagaggccaattctaagcaaaatataacaaaacgagaagtggaggatgacttgggtcttagcatgctgattgactcccagaacaaccagtatattttgaccaagcccagagattcaaccatcccacgtgcagatcaccactttataaaggacattgttaccataggaatgctgtccttgccttgtggctggctatgtacagccataggattgcctacaatgtttggttatattatttgtggtgtacttctgggaccttcaggactaaatagtattaagtctattgtgcaagtggagacattaggagaatttggggtgttttttactctttttcttgttggcttagaattttctccagaaaagctaagaaaggtgtggaagatttccttacaagggccgtgttacatgacactgttaatgattgcatttggcttgctgtgggggcatctcttgcggatcaaacccacgcagagcgtcttcatttccacgtgtctgtccttgtcaagcacacccctcgtgtccaggttcctcatgggcagtgctcggggtgacaaagaaggcgacattgactacagcaccgtgctcctcggcatgctggtgacgcaggacgtgcagctcgggctcttcatggccgtcatgccgactctcatacaggcgggcgccagtgcatcttctagcattgtcgtggaagttctccgaatcctggttttgattggtcagattcttttttcactagcggcggtttttcttttatgtcttgttataaagaagtatctcattggaccctattatcggaagctgcacatggaaagcaaggggaacaaagaaatcctgatcttgggaatatctgcctttatcttcttaatgttaacggtaattctcaaactatgtgttatttatgtaatctgatacataatctctttcactgaaatcttgtgatccattctttacctttccattttaataatggttaaaatatttgaaacatttactagtattttttattttatacacactttcttatactacccatcaaaatataatacagggagctaaacccgtttaactggtttgactcatactcttaagcactttgctaaaatagtgtttgtgagtatttcattaaaaacaaatccgtgggccgggtatagtggctcacacctgtagtcctagcatgtggggaagctgaggcaggagaatcacttgagctcagaagtttgggagcagccaggacaacagagtgagaacccctctgctacaaaaaatagaaaaaccagctggggcgtggtcgcgctcatgtatagaccagctgctggagagactgagctgggaggatggcttgagcccaggaggccaaggctgcagggagctgtggtcgcaccactgcactctagcctgggtgacagagcaagaccccatatcaaaaaaaaacggccgggtgtggtggctcacgcctgtcatcccagcactttgggaggctgaggcgggtggatcacaaggtcaggagatcgagaccatcctggctaacatgatgaaaccccgtctctactaaaagtacaaaaaaaattagctgggtgtggtggcgggcgcctgtagtcccagctactcaggaggctgaggcaggagaatggcgtgaacgcgggaggcggagcttgcagtgagccaagatcgtgccactgcactccagcctgggcgacagagcaagaccccatatcaaaacaaacaaaactgtgatgataaaaagcgccataaacactaatatcaaaccatgctactctgtcttaaattttcaaatagctttgcacctgaaatacaaaattaagtttggaaaaacagtttttaactgtgttgctcacaagctaattaactgtataagttctgccatgtgaaaggttaaaaaataaagttcattttggaaa

SEQ ID NO: 193118 - DNA, 575 bp, Homo sapiens
  Payload ID: 18129
  Gene Name: transmembrane and coiled-coil domains 3
  ENST ID: ENST00000619336
  CDS Start-End: 1-255
attctgccgaggagcagccagtacatcaagtggatcgtctctgcggggcttgcccaggtcagcgagttttcctttgtcctggggagccgggcgcgaagagcgggcgtcatctctcgggaggtgtacctccttatactgagtgtgaccacgctcagcctcttgctcgccccggtgctgtggagagctgcaatcacgaggcctcacctcccaacgcttgcagtgcacatcgaggggacagaagcatttgaaccgtagcaggaaaccgacttgatgagagtaacatcaaactccccccaaaacacgaaattagcctctctctgcaagatgaaataagaagtgccctgaatgacgagagaaagcatgctagggtctctgcctaactgatcactcaggttacggtgaaatcctaccggatcaacatctgagaccaggcttatggaagtgagcttccaacctgaatgcttgaggctgagggggtgttggcggcctcgataacaacctgaacaacagctggcagcagggagtgcctgggccatgtgtccccagagcactgacctgggtggtccagtctcctg

SEQ ID NO: 193119 - DNA, 2974 bp, Homo sapiens
  Payload ID: 18130
  Gene Name: transmembrane and coiled-coil domains 4
  Uniprot ID: Q5TGY1
  ENST ID: ENST00000294543
  CDS Start-End: 243-2147
cgggcgggaggagccgctcgccggttttgccgcctccgcctttgccttcgcagccgcctccagtgttgtacattataaaccggggctgctgatgaggagtggggaactggctctctggaacgtgtgacagcaggcagaagggggcaatttgcatatttctccaaagaaccatccagaacctgagcagcctgtcttcagacagagagaggcccacggctgtttcttgaaatctggcgctgggaatggccatgtggaacaggccatgccagaggctgcctcagcagcctctggtagctgagcccactgcagagggggagccacacctgcccacgggccgggagctgactgaggccaaccgcttcgcctatgctgccctctgtggcatctccctgtcccagttatttcctgaacccgaacacagctccttctgcacagagttcatggcaggcctggtgcagtggctggagttgtctgaagctgtcttgccaaccatgactgcttttgcgagcggcctgggaggtgaaggagcagatgtgtttgttcaaattttactgaaggaccccatcttgaaggacgacccgacggtgatcactcaggaccttctgagcttctcactcaaggatgggcactatgacgcccgggccagagtcctcgtttgccacatgacctccctgctccaagtgcccttggaggagctggatgtccttgaagagatgttcctggagagcctgaaggaaatcaaagaagaggaatctgaaatggccgaggcatcccgaaagaagaaagaaaaccggaggaaatggaagcgttatctcctgataggcctggcgactgtcggaggcggaacggtgatcggtgtgactggaggtctagctgcaccccttgttgccgctggagcagcgacgattattggcagcgccggggcagcggctctgggctcagcagccggcatagccatcatgacctcgctgtttggtgcagctggagctggcctgacaggatacaagatgaagaagcgagtgggagccattgaagagttcacgtttctgcctctgacggagggcaggcagctgcacatcaccatcgccgtcacggggtggctcgcttctggcaaataccgcaccttcagtgccccgtgggctgccctggcccacagccgtgagcagtactgcctggcctgggaagccaagtacctgatggagctcggcaatgccctggagaccatcctcagtggtctcgccaacatggtggcccaggaggccctaaagtacacagtgttgtctggcattgtggctgccctgacctggccagcctcactcctcagtgtcgccaatgtcatcgacaacccctggggggtgtgtctccatcgatcagcagaggttggcaagcacctggcccacatcctgctctcccggcagcaggggcgacgacctgtcaccttgattggcttcagcctgggagccagagtcatctacttctgtctgcaggagatggctcaagagaaagattgccaaggaatcatcgaggacgtcatcctgctgggtgcgcctgtggagggagaagccaagcattgggagcctttccggaaggtggtgtccgggaggatcatcaacggctactgcaggggagactggctgctgagtttcgtgtaccgcacatcctcggtgcagctccgtgtcgccggcctacagcccgtgctgctgcaggacaggagggtggagaacgtggacctgacctctgtggtcagcggccacctggactatgccaagcagatggatgccatcctgaaggccgtgggcatccgcaccaagccaggctgggacgagaaggggctcttgctggccccaggctgcctgccctccgaggagcctcgccaggcagcagctgccgcctcatcaggcgagaccccccaccaggttgggcaaacccagggtcccatatccggagacacctccaaattggccatgtccacagaccccagccaagcccaggtgccagtagggctggaccagtctgaaggggcctcccttcctgctgctgccagccctgaaaggccccccatctgcagccatggcatggaccccaacccactgggctgccccgattgtgcctgcaagacccagggccccagcacggggctggactgaccacagcaggggacctgagccgtcttccccagtctccatatgcagctctctcttataccctcgggttcctcccaggagctctggaggtacaggatttccacaggcctctttcctaaatggaaggaattggaactgaaagggaaaggaaatggaaggaaggggaatttggaggagagaacacgcccacccttgggaagctgcctgtccccagaggagccccaccagggagcagctgccccctcatcagagacctgcagagtcaaccaagcacaggttagagtcccaggaccggaaaccaactgtgggctttctgtacttctcatagctttggagtctggctgtccatcaggaggtcccgagggctctctggggcctgaggctcccacaccagctctcccctggcctcaataaaaccaggtgcatgcctgttcttccatccacactccagggctgcccaccagctgacaggcaccatcaactggcagcaacagagcaggcgcaggtacaaagaaggcagctcactcctgctcttaggagatccaatcagatctgccctgtacagccatgtaggctgtgcgctgcataactccagggacatgagtcacacagacacaatgtgagtgtgctcccccgtcatgcaacatctggacaccactaacagagcatggtgaatacatgctgaattgcattcagtatggctgtgaactaggcctggggacaagaatgaattttacatggaaagaatttcctgtagcaggaacagaggggataacaacagcaataaataataataagaagaagctaccacttcttgagcatgtaccaca

SEQ ID NO: 193120 - DNA, 2403 bp, Homo sapiens
  Payload ID: 18130
  Gene Name: transmembrane and coiled-coil domains 4
  ENST ID: ENST00000375127
  CDS Start-End: 272-2014
caaacagagaattccaggagggcttggggagcctctggagaaaaaccaggctcctcatgttacaaggaggccatgtcttctggtgcccatgcctgaagttacaggagggaagaattactgctgctgacttttgagtggattttacagctgggtaaactgaggctcagagagggcaatttgcatatttctccaaagaaccatccagaacctgagcagcctgtcttcagacagagagaggcccacggctgtttcttgaaatctggcgctgggaatggccatgtggaacaggccatgccagaggctgcctcagcagcctctggtagctgagcccactgcagagggggagccacacctgcccacgggccgggagctgactgaggccaaccgcttcgcctatgctgccctctgtggcatctccctgtcccagttatttcctgaacccgaacacagctccttctgcacagagttcatggcaggcctggtgcagtggctggagttgtctgaagctgtcttgccaaccatgactgcttttgcgagcggcctgggaggtgaaggagcagatgtgtttgttcaaattttactgaaggaccccatcttgaaggacgacccgacggtgatcactcaggaccttctgagcttctcactcaaggatgggcactatgacgcccgggccagagtcctcgtttgccacatgacctccctgctccaagtgcccttggaggagctggatgtccttgaagagatgttcctggagagcctgaaggaaatcaaagaagaggaatctgaaatggccgaggcatcccgaaagaagaaagaaaaccggaggaaatggaagcgttatctcctgataggcctggcgactgtcggaggcggaacggtgatcggtgtgactggaggtctagctgcaccccttgttgccgctggagcagcgacgattattggcagcgccggggcagcggctctgggctcagcagccggcatagccatcatgacctcgctgtttggtgcagctggagctggcctgacaggatacaagatgaagaagcgagtgggagccattgaagagttcacgtttctgcctctgacggagggcaggcagctgcacatcaccatcgccgtcacggggtggctcgcttctggcaaataccgcaccttcagtgccccgtgggctgccctggcccacagccgtgagcagtactgcctggcctgggaagccaagtacctgatggagctcggcaatgccctggagaccatcctcagtggtctcgccaacatggtggcccaggaggccctaaagtacacagtgttgtctggcattgtggctgccctgacctggccagcctcactcctcagtgtcgccaatgtcatcgacaacccctggggggtgtgtctccatcgatcagcagaggttggcaagcacctggcccacatcctgctctcccggcagcaggggcgacgacctgtcaccttgattggcttcagcctgggagccagagtcatctacttctgtctgcaggagatggctcaagagaaagattgccaaggaatcatcgaggacgtcatcctgctgggtgcgcctgtggagggagaagccaagcattgggagcctttccggaaggtggtgtccgggaggatcatcaacggctactgcaggggagactggctgctgagtttcgtgtaccgcacatcctcggtgcagctccgtgtcgccggcctacagcccgtgctgctgcaggacaggagggtggagaacgtggacctgacctctgtggtcagcggccacctggactatgccaagcagatggatgccatcctgaaggccgtgggcatccgcaccaagccaggctgggacgagaaggggctcttgctggccccaggctgcctgccctccgaggagcctcgccaggcagcagctgccgcctcatcagctttggagtctggctgtccatcaggaggtcccgagggctctctggggcctgaggctcccacaccagctctcccctggcctcaataaaaccaggtgcatgcctgttcttccatccacactccagggctgcccaccagctgacaggcaccatcaactggcagcaacagagcaggcgcaggtacaaagaaggcagctcactcctgctcttaggagatccaatcagatctgccctgtacagccatgtaggctgtgcgctgcataactccagggacatgagtcacacagacacaatgtgagtgtgctcccccgtcatgcaacatctggacaccactaacagagcatggtgaatacatgctgaattgcattcagtatggctgtgaactaggcctggggacaagaatgaattttacatggaaagaatttcctgtagcaggaacagaggggataacaacagcaataaataataataagaagaa

SEQ ID NO: 193121 - DNA, 1274 bp, Homo sapiens
  Payload ID: 18131
  Gene Name: transmembrane and coiled-coil domains 5A
  Uniprot ID: Q8N6Q1
  ENST ID: ENST00000319669
  CDS Start-End: 103-969
ggaatctacaatggaaggacacaagaaagatcagctggattaagtagtcatgattatgcaaagccatatccagagaccaaggtgtaaagcaggtcggagaaaatggaaatctcaagattggctcagtcaaaaagaaacattatcagtttgaacatggaccttgaaagggatacgcagagaatagatgaagcaaatcagaaacttcttctcaaaatccaagagagggaagataagattcagaggctggaaagtgagatcattcagacgcggggcctggtggaagatgaagagtgggagaaggagaaccgcaccacgatggaaagggaaagagccttgcaggagctggaggaagaaacagccagacttgaaaggaagaataagacgttggtccacagtataacagaacttcaacaaaagcttacaaggaaatcacaaaagataaccaattgtgaacaaagcagtccagatggagccctagaagagacaaaggttaagttacaacagctggaagcttcctatgcatgccaagagaaggagctgctcaaggtaatgaaggagtatgcatttgtgacccagctctgtgaagatcaagccctctacataaagaagtaccaggaaacgttgaagaaaatagaagaagaactagaggctctgttccttgagagagaagtatcaaaactcgtgagcatgaaccctgtggaaaaagagcataccagccaaaataatgagggtactcctacccaaaagacagcaagattattcagtaaaaagattttttgctgtctctttttcatcaccctatttttcatcagactgctgagctacatgttttttcatgtaagattcataaatccagatctcctcgtcaatgtactgcccaaggtactgggcaggagcaccttgtggaagctcagatgcttcttctttccatctctcacacttgagacagaggacatgttaccccactgattccctaagaaatatccttgagcaatagaagggaagtgggatccgagcctgtagaagggaggcatgaaacttgtggaggaaagagatttgcttcagttttttcctcaccgtttgcctgcttgactaccttctgtcaccacgtcatctttccaggattaaccttgaccagtaaaaagctctgtaatagatttatgtggctctgtggatcggctgaatagtacttgatagtaaacaaatttgaccatttggggaattatatagatgctaagaaaagttaattgataaattattctagtgaatctcaa

SEQ ID NO: 193122 - DNA, 2894 bp, Homo sapiens
  Payload ID: 18131
  Gene Name: transmembrane and coiled-coil domains 5A
  ENST ID: ENST00000558158
  CDS Start-End: 155-727
agctaattgactagggaaggatcaggaagacaagacacatcaaaaaggggagggaatctacaatggaaggacacaagaaagatcagctggattaagtagtcatgattatgcaaagccatatccagagaccaaggtgtaaagcaggtcggagaaaatggaaatctcaagattggctcagtcaaaaagaaacattatcagtttgaacatggaccttgaaagggatacgcagagaatagatgaagcaaatcagaaacttcttctcaaaatccaagagagggaagataagattcagaggctggaaagtgagatcattcagacgcggggcctggtggaagatgaagagtgggagaaggagaaccgcaccacgatggaaagggaaagagccttgcaggagctggaggaagaaacagccagacttgaaaggaagaataagacgttggtccacagtataacagaacttcaacaaaagcttacaaggaaatcacaaaagataaccaattgtgaacaaagcagtccagatggagccctagaagagacaaaggttaagttacaacagctggaagcttcctatgcatgccaagagaaggagctgctcaaggtaatgaaggagtatgcatttgtgacccagctctgtgaagatcaagccctctacataaagaagtaccaggaaacgttgaagaaaatagaagaagaactagaggctctgttccttgagagagaagtgtgagctttggcaaaggaacatcctggttttggtagaaactccatctcagcctgagtcagagcaaacagttctcagaccaatttctatttggaattgaatgagtcccgacgccacatatctttgccctctgttagtgatctggttgaccccagtagatcacaccaacttaaaacttccagtcattctcccatccttctaaaaagaccacagaaacacatctcccttcgtaatgttatcacattatcacattattattcgggttgatattaagagtaaaaacatgtactttagaaagagttggtggtcagtcaccttgataagtagggtattccttatatatcacagaaaggccttttcattaataccatcctcacttcccccaaatatatggacacccaaccataagggataggcatgaaactaatctctagactcatactacagctaccacattatataaatcagaactgtacactgtattgaactacgaacatttaaaattagagatgggaaagcactcctcaaagtacaatgagtttgtcaagagtctaaatggtgagaaatccaaaccaaaaacctcatctccatttcttgaccccctctgtaagttaaatcttaatgcagtcaagaagtatttctatttatgaaatatttttaaatccttagatcaagaacaagagatcaaaactgcatatagcctctctctatatatatatagtccagggtcctaggacttgtaggtccttgcccctaaaggacaccttcaagtcactcaagatccctgctgaacattggtttatggcttaactgttaagccaagattctagaaaaggttgcccagtagaattttctgtgctagttagtaggtaaaactaactacatatggcaattgagtacataaaagatgtactcaactgaggaaattaatttaactttaattaatttaaatagctataggtagacagtagttacaatattggacagtacagatttagaatataaagcttttttaaaataaccatagtgtagtatgaatatttcagtgcactttgttcaatttctgtcctggctgttatcttcatagatcaaaactcgtgagcatgaaccctgtggaaaaagagcataccagccaaaataatgaggtaaacactccattctctcttcagctcctcacagtgtcattgcctttcaaagccatctccagcaaactataaggcaccaaatatatacccaatcttgccatgcgcattttccaagaacagtaccagctataattacagagcattccaaccctaaacaaacaaactagactctaaggaacaatctactttcttctcattcagccatacaaataacaggctctcaaaaaactagccgaagacctaagagaactcagaatggaggcaagaagcaaccttaattgagggtatgctctatagaaagaggccaatatagggcacatacaccacctcttccatctcctacaatcacagtactctttcctgatgatcttgacatggttcctaatctctcacaacacagagcacccaccatctgtcatcatctagtcagaattggcctgtgagttaaaacatagaacgctattgcttctttgtgacagagtttcagtgtctgttcatatttaatatagcaaagccaccagcacacatgtaaaggtctgaaggaaaagaacaatttcatacagagcaccaatcctcttggcctgcttgatgtcttgtggcagcaaggataaaaggttaaagttaaactttggttgggctttaattttgtaatttatattggctttagagtccaggttgacaaacatcagaaattacagatagtcaagataaatacttagaaaagagaactaaacacttccttaaaagcaaatatcaaatattggccattgtgtttgggtcatccaaatgtttggatatatgttaggccatgtccatggttcttaagagtactgaacaagtcattctggccccgaagcttgcatattctgcttagtaaacaaaatccctgaaattaactcgacccacttctgtagaaccaagtttttgacatctccaatgtgtcctaccatctctccccacagctcatcaaaatattccttctaactatgtgtcagaggaaaaaattaaagttgtctacatcaagctca

SEQ ID NO: 193123 - DNA, 579 bp, Homo sapiens
  Payload ID: 18131
  Gene Name: transmembrane and coiled-coil domains 5A
  ENST ID: ENST00000560841
  CDS Start-End: 368-579
atactctggagtctgcatgccagattcatgccctcccctgagttctggccaggtttcttgaccagttcaaactgttacaaaattcagctggaggttttgctctccctgtggcattttccctgcgcctctggccaccctccagaaggatccctgtagtgccaagcaggaatggcctgcttggggacctagcaagctcacagggcctttcccattgcttcctctatccctgtattgtgttcagctctctacattggctcagctccagggaatctacaatggaaggacacaagaaagatcagctggattaagtagtcatgattatgcaaagccatatccagagaccaaggtgtaaagcaggtcggagaaaatggaaatctcaagattggctcagtcaaaaagaaacattatcagtttgaacatggaccttgaaagggatacgcagagaatagatgaagcaaatcagaaacttcttctcaaaatccaagagagggaagataagattcagaggctggaaagtgagatcattcagacgcggggcctggtggaagatgaagagtgggagaaggagaaccgcaccac

SEQ ID NO: 193124 - DNA, 839 bp, Homo sapiens
  Payload ID: 18131
  Gene Name: transmembrane and coiled-coil domains 5A
  ENST ID: ENST00000558625
  CDS Start-End: 407-839
ggaagcatcacaggaaaagctttgggttttcatgccttcccttcatgctcctagatctgctggactctgtgtccatctcagcacaactggagggcttctcttgtccaccaagcttcttaccacatctacaccccacttaacgggtctgagaatgctcagtcgcttcttctgcgccaccctaattatacttgcaacaacctcctcactcttacctccttcacctgtttatgtttcctcatggcagtgttaccaagcaaaagagtgtcactgcccaatgtgctggaagccaatactatgacacaagggaatctacaatggaaggacacaagaaagatcagctggattaagtagtcatgattatgcaaagccatatccagagaccaaggtgtaaagcaggtcggagaaaatggaaatctcaagattggctcagtcaaaaagaaacattatcagtttgaacatggaccttgaaagggatacgcagagaatagatgaagcaaatcagaaacttcttctcaaaatccaagagagggaagataagattcagaggctggaaagtgagatcattcagacgcggggcctggtggaagatgaagagtgggagaaggagaaccgcaccacgatggaaagggaaagagccttgcaggagctggaggaagaaacagccagacttgaaaggaagaataagacgttggtccacagtataacagaacttcaacaaaagcttacaaggaaatcacaaaagataaccaattgtgaacaaagcagtccagatggagccctagaagagacaaaggttaagttacaacagctggaagcttcctatgcatgccaagagaagg

SEQ ID NO: 193125 - DNA, 575 bp, Homo sapiens
  Payload ID: 18131
  Gene Name: transmembrane and coiled-coil domains 5A
  ENST ID: ENST00000558148
  CDS Start-End: 333-575
agaagctaattgactagggaaggatcaggaagacaagacacatcaaaaaggggagggaatctacaatggaaggacacaagaaagatcagctggattaagtagtcatgattatgcaaagccatatccagagaccaaggtgtaaagcagcgcaaggggttatttaaggaagcaaagcttctcaagaaaccagagtgaaggtgcactgttagattgagcactttggaggagaaagcctgggaaagacccttgctgactgagctgcgaattatcgaaacagttgtagagcatgatcaagaaatgtaatttttcaagaatgaaaatggtcggagaaaatggaaatctcaagattggctcagtcaaaaagaaacattatcagtttgaacatggaccttgaaagggatacgcagagaatagatgaagcaaatcagaaacttcttctcaaaatccaagagagggaagataagattcagaggctggaaagtgagatcattcagacgcggggcctggtggaagatgaagagtgggagaaggagaaccgcaccacgatggaaagggaaagagccttgcaggagctg

SEQ ID NO: 193126 - DNA, 1072 bp, Homo sapiens
  Payload ID: 18131
  Gene Name: transmembrane and coiled-coil domains 5A
  ENST ID: ENST00000560653
  CDS Start-End: 142-714
gggaaggatcaggaagacaagacacatcaaaaaggggagggaatctacaatggaaggacacaagaaagatcagctggattaagtagtcatgattatgcaaagccatatccagagaccaaggtgtaaagcaggtcggagaaaatggaaatctcaagattggctcagtcaaaaagaaacattatcagtttgaacatggaccttgaaagggatacgcagagaatagatgaagcaaatcagaaacttcttctcaaaatccaagagagggaagataagattcagaggctggaaagtgagatcattcagacgcggggcctggtggaagatgaagagtgggagaaggagaaccgcaccacgatggaaagggaaagagccttgcaggagctggaggaagaaacagccagacttgaaaggaagaataagacgttggtccacagtataacagaacttcaacaaaagcttacaaggaaatcacaaaagataaccaattgtgaacaaagcagtccagatggagccctagaagagacaaaggttaagttacaacagctggaagcttcctatgcatgccaagagaaggagctgctcaaggtaatgaaggagtatgcatttgtgacccagctctgtgaagatcaagccctctacataaaggtagagcttcttgaagtaccaggaaacgttgaagaaaatagaagaagaactagaggctctgttccttgagagagaagtatcaaaactcgtgagcatgaaccctgtggaaaaagagcataccagccaaaataatgagggtactcctacccaaaagacagcaagattattcagtaaaaagattttttgctgtctctttttcatcaccctatttttcatcagactgctgagctacatgttttttcatgtaagattcataaatccagatctcctcgtcaatgtactgcccaaggtactgggcaggagcaccttgtggaagctcagatgcttcttctttccatctctcacacttgagacagaggacatgttaccccactgattccctaagaaatatccttgagcaatagaagggaagtgggatccgagcctg

SEQ ID NO: 193127 - DNA, 1939 bp, Homo sapiens
  Payload ID: 18131
  Gene Name: transmembrane and coiled-coil domains 5A
  Uniprot ID: Q8N6Q1
  ENST ID: ENST00000559502
  CDS Start-End: 172-858
agattagactcctcagaagctaattgactagggaaggatcaggaagacaagacacatcaaaaaggggagggaatctacaatggaaggacacaagaaagatcagctggattaagtagtcatgattatgcaaagccatatccagagaccaaggtgtaaagcaggtcggagaaaatggaaatctcaagattggctcagtcaaaaagaaacattatcagtttgaacatggaccttgaaagggatacgcagagaatagatgaagcaaatcagaaacttcttctcaaaatccaagagagggaagataagattcagaggctggaaagtgagatcattcagacgcggggcctggtggaagatgaagagtgggagaaggagaaccgcaccacgatggaaagggaaagagccttgcaggagctggaggaagaaacagccagacttgaaaggaagaataagacgttggtccacagtataacagaacttcaacaaaagcttacaaggaaatcacaaaagataaccaattgtgaacaaagcagtccagatggagccctagaagagacaaaggttaagttacaacagctggaagcttcctatgcatgccaagagaaggagctgctcaaggtaatgaaggagtatgcatttgtgacccagctctgtgaagatcaagccctctacataaagaagtaccaggaaacgttgaagaaaatagaagaagaactagaggctctgttccttgagagagaagtatcaaaactcgtgagcatgaaccctgtggaaaaagagcataccagccaaaataatgagggtactcctacccaaaagacagcaagattattcagtaaaaaatgggcctcctccttttagtggcaagatggctgccaacaatccagatctcgtactaccagattggcaacctttgcagaataaaagtcttttccaacaggttcagcagtaaagtccagaaaaggtcataaactggcctatctgaggtcaattgcctaccctgtcccacagtcaatgtggccagagggatggagtactctgattggtcaagcttatgtcatatgttcagccccttactaaggattaagagcagtcaaagaagaagaacaaagtaagggaatgacctaaactatatgaaatgcatttctcccactaaaaggggctcagtgcctatggaagagaaaagggatgctggacacgcaaaagcagaggtctacttcattgctaaactctgtgtcttcctataagcaaaaattataacttctaaagatagtagattaagacggtgaaagcttctacaaagagctcagtttaagaaccatgtaaataatcaggtcactagggctaaagtaagcaacaattctaaaataagtagaatatgactggtataaattgcttcaccaactcaaagtagcatatatatcacacctcttatttttccaattaattgctgaaacattcacatgccttactaataggatatactctacattattttccagtacaagagaaaattattttaaatggtaaggttttaggtctaaaagtgtctcaattttaagaaagctgatatcaagcaggtcatattttctaggcattgtgcaatgactatagaaattatgaaaatgtgtaaccaaccagtaatatctagccacaggcaaattttataaaagatccttttaattaacttctggattaaatggaaaatccaaactgagattacttttatagggtcagttacatgctaaggaggaagcatagagagtagaagaatggttaccagaggctgtaaccttcttaatttaaggtaaaaaattctacctattagcttagtattagatgaaaacagaaattcttgtcacatacaggcactattcactgcagtgaagtatatcttttcagaaagttgcataaaatcgaataaaataccatgtattaaatt

SEQ ID NO: 193128 - DNA, 1834 bp, Homo sapiens
  Payload ID: 18132
  Gene Name: transmembrane and coiled-coil domains 6
  Uniprot ID: Q96DC7
  ENST ID: ENST00000252100
  CDS Start-End: 25-1524
cggctttcctcctcctgctccaccatgtggagccgacggcagggccgcctcaggcccacggtctgcggggtggaggagctacggcgccgccggcgggagcgggaggcagcactgcggaaggcgcggagggagcagcagctggtcagcaagaggctgctgagaaacgacgccccagaggaagctggagagggatgtgtggctgcgatcctcggggaaaccgaggtgcagcagttcctgcggcaagcccagcgggggacagaggaaaaggagagagagggggctctggtcagccttcgtcgaggcttgcagcaccctgaaacacagcaaaccttcatccggctggagggcagcatgcggaccctggtcgggctcctgaccagcaaccaggccctgctgcagcttgaggcggctcggtgcctgcatgagctctctcactccgagcagtccactgttgctgaggcctgcctgccagccacttcttacctcctcacctacctctccagtcacagctcagacttcatagagctgtgtctgtatacactgggtaacctgatcgtggagagtgaggctgtgagaaggcagctcctgccacagggcattgttccagccttggctgcctgcatccagtccccccatgtggctgtgctggaagctctcggatatgccttgtcccagcttctacaggctgaggaagctccagagaagatcattccccctgcttctgccagcagctccatcttggcctccactctccctcagcacatgctacaaatgttgcaacctggcccaaagctcaaccctggggtcgctgtggagtttgcctggtgccttcattacatcatctgcagccaggtcagcaatcctctgctcattggccatggggctctgtctactctggggttgctgctgttggacttggctggggctgtccagaaaaccgaggatgcaggactggagctgctggcatgccccgtgcttcgatgtctaagcaacctgctaactgaggcagcagtggagactgtgggagggcaaatgcagctcagagatgagcgtgttgtggcagccttatttatccttctgcagttctttttccagaaacagcccagtctgctccctgagggcctttggctcctcaacaacctcactgcaaacagtcctagtttctgtacctccttgctctccctggatctgattgagcctctcttacagctgttgccagtatctaacgtggtgagcgtaatggtgctcacagttctgtgcaatgttgcagaaaagggtcctgcttactgccagcggctgtggccagggcccctgcttcccgccttgctgcacacactagccttttctgacactgaagtagtaggccagagtttggagctgctgcatctgctgttcctgtatcagccagaggctgttcaggtcttcctgcagcagtcagggctgcaagccctggaaaggcatcaggaagaggcccagctccaggatcgtgtgtatgctctccagcagacagctcttcaagggtgatcttgtttctcaatgtcactcattcccctctctcttaacatcaagcttgtttgtccagtagagcctttggagatttaggaccataatgaggtctcatgttctctgctcccacacctaagccaagacctttgggtcccagctcctccccttccactcagcactatccaggcaggaggaccaaaagggactcagtgtggtctacttactctggggccctagaatccctgcccccccgccacccttcatgtttgcttcagcagctggtagcttttgatgagacagaataaagttttatttttatattaagcta

SEQ ID NO: 193129 - DNA, 1887 bp, Homo sapiens
  Payload ID: 18132
  Gene Name: transmembrane and coiled-coil domains 6
  Uniprot ID: Q96DC7
  ENST ID: ENST00000394671
  CDS Start-End: 102-1583
gttcccgccctgtgctgaggctgcgcagtcggtgccatcttctacgcccctgggagcgttgtggctgctgtttccttcggctttcctcctcctgctccaccatgtggagccgacggcagggccgcctcaggcccacggtctgcggggtggaggagctacggcgccgccggcgggagcgggaggcagcactgcggaaggcgcggagggagcagcagctggtcagcaagaggctgctgagaaacgacgccccagaggaagctggagagggatgtgtggctgcgatcctcggggaaaccgaggtgcagcagttcctgcggcaagcccagcgggggacagaggaaaaggagagagagggggctctggtcagccttcgtcgaggcttgcagcaccctgaaacacagcaaaccttcatccggctggagggcagcatgcggaccctggtcgggctcctgaccagcaaccaggccctgctgcagcttgaggcggctcggtgcctgcatgagctctctcactccgagcagtccactgttgctgaggcctgcctgccagccacttcttacctcctcacctacctctccagtcacagctcagacttcatagagctgtgtctgtatacactgggtaacctgatcgtggagagtgaggctgtgagaaggcagctcctgccacagggcattgttccagccttggctgcctgcatccagtccccccatgtggctgtgctggaagctctcggatatgccttgtcccagcttctacaggctgaggaagctccagagaagatcattccctccatcttggcctccactctccctcagcacatgctacaaatgttgcaacctggcccaaagctcaaccctggggtcgctgtggagtttgcctggtgccttcattacatcatctgcagccaggtcagcaatcctctgctcattggccatggggctctgtctactctggggttgctgctgttggacttggctggggctgtccagaaaaccgaggatgcaggactggagctgctggcatgccccgtgcttcgatgtctaagcaacctgctaactgaggcagcagtggagactgtgggagggcaaatgcagctcagagatgagcgtgttgtggcagccttatttatccttctgcagttctttttccagaaacagcccagtctgctccctgagggcctttggctcctcaacaacctcactgcaaacagtcctagtttctgtacctccttgctctccctggatctgattgagcctctcttacagctgttgccagtatctaacgtggtgagcgtaatggtgctcacagttctgtgcaatgttgcagaaaagggtcctgcttactgccagcggctgtggccagggcccctgcttcccgccttgctgcacacactagccttttctgacactgaagtagtaggccagagtttggagctgctgcatctgctgttcctgtatcagccagaggctgttcaggtcttcctgcagcagtcagggctgcaagccctggaaaggcatcaggaagaggcccagctccaggatcgtgtgtatgctctccagcagacagctcttcaagggtgatcttgtttctcaatgtcactcattcccctctctcttaacatcaagcttgtttgtccagtagagcctttggagatttaggaccataatgaggtctcatgttctctgctcccacacctaagccaagacctttgggtcccagctcctccccttccactcagcactatccaggcaggaggaccaaaagggactcagtgtggtctacttactctggggccctagaatccctgcccccccgccacccttcatgtttgcttcagcagctggtagcttttgatgagacagaataaagttttatttttatatt

SEQ ID NO: 193130 - DNA, 542 bp, Homo sapiens
  Payload ID: 18132
  Gene Name: transmembrane and coiled-coil domains 6
  ENST ID: ENST00000513002
  CDS Start-End: 372-542
cctgtgctgaggctgcgcagtcggtgccatcttctacgcccctgggagcgttgtggctgctgtttccttcggctttcctcctcctgctccaccatgtggagccgacggcagggccgcctcaggcccacgcactgcggaaggcgcggagggagcagcagctggtcagcaagaggctgctgagaaacgacgccccagaggaagctggagagggatgtgtggctgcgatcctcggggaaaccgaggtgcagcagttcctgcggcaagcccagcgggggacagaggaaaaggagagagagggggctctggtcagccttcgtcgaggcttgcagcaccctgaaacacagcaaaccttcatccggctggagggcagcatgcggaccctggtcgggctcctgaccagcaaccaggccctgctgcagcttgaggcggctcggtgcctgcatgagctctctcactccgagcagtccactgttgctgaggcctgcctgccagccacttcttacctcctcacctacctctccagtcacagctcagacttcata

SEQ ID NO: 193131 - DNA, 611 bp, Homo sapiens
  Payload ID: 18132
  Gene Name: transmembrane and coiled-coil domains 6
  ENST ID: ENST00000515653
  CDS Start-End: 39-344
gctgctgtttccttcggctttcctcctcctgctccaccatgtggagccgacggcagggccgcctcaggcccacggtctgcggggtggaggagctacggcgccgccggcgggagcgggaggcagcactgcggaaggcgcggagggagcagcagctggtcagcaagaggctgctgagaaacgacgccccagaggaagctggagagggatgtgtggctgcgatcctcggggaaaccgaggtgagggggcaaggtgcagcagttcctgcggcaagcccagcgggggacagaggaaaaggagagagagggggctctggtcagccttcgtcgaggcttgcagcaccctgaaacacagcaaaccttcatccggtagctccagcctctgccctgtgccaaggggctgaaagtctctgaagacctgatgacccagcttccagtcagatccttaccctgtctacttccagtccccccatgtggctgtgctggaagctctcggatatgccttgtcccagcttctacaggctgaggaagctccagagaagatcattccctccatcttggcctccactctccctcagcacatgctacaaatgttgcaacctggcccaaagctca

SEQ ID NO: 193132 - DNA, 540 bp, Homo sapiens
  Payload ID: 18132
  Gene Name: transmembrane and coiled-coil domains 6
  ENST ID: ENST00000509217
  CDS Start-End: 81-212
tgcgcagtcggtgccatcttctacgcccctgggagcgttgtggctgctgtttccttcggctttcctcctcctgctccaccatgtggagccgacggcagggccgcctcaggcccacggtctgcggggtggaggagctacggcgccgccggcgggagcgggagcactgcggaaggcgcggagggagcagcagctggtcagcaagaggctgctgagaaacgacgccccagaggaagctggagagggatgtgtggctgcgatcctcggggaaaccgaggacactgtgctggtcactgaggtacacaaagatgaaaggatagagtccttttctttgaggtgctcacagcccggtgaagaagacagatgtcacaagggaaggaaacatgaggaacaagagaaactcctaagtctctcaaaaagagctaacttcccagaggaaatgaggagcagaaacctgaagagagtgggaagctggagagggtgcagcagttcctgcggcaagcccagcgggggacagaggaaaaggagagagagggggctctg

SEQ ID NO: 193133 - DNA, 811 bp, Homo sapiens
  Payload ID: 18132
  Gene Name: transmembrane and coiled-coil domains 6
  ENST ID: ENST00000505086
  CDS Start-End: 34-165
tgtttccttcggctttcctcctcctgctccaccatgtggagccgacggcagggccgcctcaggcccacggtctgcggggtggaggagctacggcgccgccggcgggagcgggagcactgcggaaggcgcggagggagcagcagctggtcagcaagaggctgctgagaaacgacgccccagaggaagctggagagggatgtgtggctgcgatcctcggggaaaccgaggtgcagcagttcctgcggcaagcccagcgggggacagaggaaaaggagagagagggggctctggtcagccttcgtcgaggcttgcagcaccctgaaacacagcaaaccttcatccggctggagggcagcatgcggaccctggtcgggctcctgaccagcaaccaggccctgctgcagcttgaggcggctcggtgcctgcatgagctctctcactccgagcagtccactgttgctgaggcctgcctgccagccacttcttacctcctcacctacctctccagtcacagctcagacttcatagtaagccctgtcccttcctatcttgttcttggtttagattttaaaattgtgcttttgggaccagtttgagctggcaggtaggaggaagaaaacatgtttgcccttatgcctacagccatggctacacccatcatctccccaccctcttgtgagccgcaaggatagctgctccagcgtccccatcacctcccctccccatctccccacacgcagcctggcatgaaacaggccaagcccagtgcttttgttgcctgttctcaggagctgtgtctgtatacactggg

SEQ ID NO: 193134 - DNA, 543 bp, Homo sapiens
  Payload ID: 18132
  Gene Name: transmembrane and coiled-coil domains 6
  ENST ID: ENST00000504069
  CDS Start-End: 60-191
tacgcccctgggagcgttgtggctgctgtttccttcggctttcctcctcctgctccaccatgtggagccgacggcagggccgcctcaggcccacggtctgcggggtggaggagctacggcgccgccggcgggagcgggagcactgcggaaggcgcggagggagcagcagctggtcagcaagaggctgctgagaaacgacgccccagaggaagctggagagggatgtgtggctgcgatcctcggggaaaccgaggtgcagcagttcctgcggcaagcccagcgggggacagaggaaaaggagagagagggggctctggtcagccttcgtcgaggcttgcagcaccctgaaacacagcaaaccttcatccgtccccccatgtggctgtgctggaagctctcggatatgccttgtcccagcttctacaggctgaggaagctccagagaagatcattccctccatcttggcctccactctccctcagcacatgctacaaatgttgcaacctggcccaaagctcaaccctggggtcgctgtggagttt

SEQ ID NO: 193135 - DNA, 375 bp, Homo sapiens
  Payload ID: 18132
  Gene Name: transmembrane and coiled-coil domains 6
  ENST ID: ENST00000394669
  CDS Start-End: 66-197
atcttctacgcccctgggagcgttgtggctgctgtttccttcggctttcctcctcctgctccaccatgtggagccgacggcagggccgcctcaggcccacggtctgcggggtggaggagctacggcgccgccggcgggagcgggagcactgcggaaggcgcggagggagcagcagctggtcagcaagaggctgctgagaaacgacgccccagaggaagctggagagggatgtgtggctgcgatcctcggggaaaccgaggtgcagcagttcctgcggcaagcccagcgggggacagaggaaaaggagagagagggggctctggtcagccttcgtcgaggcttgcagcaccctgaaacacagcaaaccttcatccg

SEQ ID NO: 193136 - DNA, 1201 bp, Homo sapiens
  Payload ID: 18133
  Gene Name: transmembrane and immunoglobulin domain containing 1
  Uniprot ID: Q6UXZ0
  ENST ID: ENST00000328886
  CDS Start-End: 74-862
ggcagaggaacagttggccaaggaagtcagcttctcagagctcaagagtagatctgagtttaactcattaaagatggcatggaagagcagtgtcataatgcaaatgggaagatttcttctcttagtaattttatttctgccacgtgagatgacaagttctgttttaactgtgaatggtaaaactgagaactatatcctggatactacacctggctcccaagcatctctgatatgtgctgttcaaaaccacaccagagaggaagaactgctctggtaccgagaggaggggagagtggatttgaaatctggaaacaaaatcaattccagctctgtctgtgtctcttccatcagtgaaaatgacaacggaatcagctttacctgcaggctggggagggatcagtccgtgtccgtttcggtggtgctgaatgttacttttcctcctctcctaagtggaaacgacttccaaacagttgaggaaggcagtaatgtgaagttggtttgcaatgtgaaagccaacccccaggctcaaatgatgtggtacaaaaacagtagtctcctcgatttagagaaaagccgtcaccaaatccaacagacaagtgagtcttttcagctgtcaatcaccaaagtcgagaagcctgacaacggaacctacagttgtattgcaaagtcatctctgaaaacggagagcttggactttcacctgattgttaaagataaaactgtgggtgtaccaatagagcccattattgctgcatgtgttgtgatctttctgacattgtgctttggactgattgctagaagaaagaaaataatgaagctctgcatgaaggataaagaccctcacagtgaaacagctctatgagaaagctgagatgccatcgaatacagagagagttttgcatcaggacctccacaatttatgtagtcccatctgtatttattgctattattaaattcactcctgtcactcctgtttcattaatcacttaacagtagttgttaggactaatttgatacacttgtggaacatttttatggaaagagctattaagaatgaaaagtaagattttgttaagtcttctccttgaagtatatgttaattaattgagatttgttccaaataggttggtaatcatttactgtttagtgtgttttttttctaggtaggagatacttgggtctcacaaattggtgcaaagcc

SEQ ID NO: 193137 - DNA, 1124 bp, Homo sapiens
  Payload ID: 18133
  Gene Name: transmembrane and immunoglobulin domain containing 1
  Uniprot ID: Q6UXZ0
  ENST ID: ENST00000538566
  CDS Start-End: 86-742
ttagggttttcaggcagaggaacagttggccaaggaagtcagcttctcagagctcaagagtagatctgagtttaactcattaaagatggcatggaagagcagtgtcataatgcaaatgggaagatttcttctcttagtaattttatttctgccacgtgagatgacaagttctgttttaactgtgaatggtaaaactgagaactatatcctggatactacacctggctcccaagcatctctgatatgtgctgttcaaaaccacaccagagaggaagaactgctctggtaccgagaggaggggagagtggatttgaaatctggaaacaaaatcaattccagctctgtctgtgtctcttccatcagtgaaaatgacaacggaatcagctttacctgcaggctggggagggatcagtccgtgtccgtttcggtggtgctgaatgttacttttcctcctctcctaagtggaaacgacttccaaacagttgaggaaggcagtaatgtgaagttggtttgcaatgtgaaagccaacccccaggctcaaatgatgtggtacaaaaacagtagtctcctcgatttagagaaaagccgtcaccaaatccaacagacaagtgagtcttttcagctgtcaatcaccaaagtcgagaagcctgacaacggaacctacagttgtattgcaaagtcatctctgaaaacggagagcttggactttcacctgattgttaaagctctgcatgaaggataaagaccctcacagtgaaacagctctatgagaaagctgagatgccatcgaatacagagagagttttgcatcaggacctccacaatttatgtagtcccatctgtatttattgctattattaaattcactcctgtcactcctgtttcattaatcacttaacagtagttgttaggactaatttgatacacttgtggaacatttttatggaaagagctattaagaatgaaaagtaagattttgttaagtcttctccttgaagtatatgttaattaattgagatttgttccaaataggttggtaatcatttactgtttagtgtgttttttttctaggtaggagatacttgggtctcacaaattggtgcaaagccaaaaaaaaaaaaaaa

SEQ ID NO: 193138 - DNA, 1262 bp, Homo sapiens
  Payload ID: 18134
  Gene Name: transmembrane and immunoglobulin domain containing 2
  Uniprot ID: Q96BF3
  ENST ID: ENST00000301272
  CDS Start-End: 47-895
ggaagtctgtcaactgggagggggagaggggggtgatgggccaggaatggggtccccgggcatggtgctgggcctcctggtgcagatctgggccctgcaagaagcctcaagcctgagcgtgcagcaggggcccaacttgctgcaggtgaggcagggcagtcaggcgaccctggtctgccaggtggaccaggccacagcctgggaacggctccgtgttaagtggacaaaggatggggccatcctgtgtcaaccgtacatcaccaacggcagcctcagcctgggggtctgcgggccccagggacggctctcctggcaggcacccagccatctcaccctgcagctggaccctgtgagcctcaaccacagcggggcgtacgtgtgctgggcggccgtagagattcctgagttggaggaggctgagggcaacataacaaggctctttgtggacccagatgaccccacacagaacagaaaccggatcgcaagcttcccaggattcctcttcgtgctgctgggggtgggaagcatgggtgtggctgcgatcgtgtggggtgcctggttctggggccgccgcagctgccagcaaagggactcaggtaacagcccaggaaatgcattctacagcaacgtcctataccggccccggggggccccaaagaagagtgaggactgctctggagaggggaaggaccagaggggccagagcatttattcaacctccttcccgcaaccggccccccgccagccgcacctggcgtcaagaccctgccccagcccgagaccctgccccagccccaggcccggccaccccgtctctatggtcagggtctctcctagaccaagccccacccagcagccgaggccaaaagggttccccaaagtgggagaggagtgagagatcccaggagacctcaacaggaccccacccataggtacacacaaaaaaggggggatcgaggccagacacggtggctcacgcctgtaatcccagcagtttgggaagccgaggcgggtggaacacttgaggtcaggggtttgagaccagcctggcttgaacctgggaggcggaggttgcagtgagccgagattgcgccactgcactccagcctgggcgacagagtgagactccgtctcaaaaaaaacaaaaagcaggaggattgggagcctgtcagccccatcctgagaccccgtcctcatttctgtaatgatggatctcgctcccactttcccccaagaacctaataaaggcttgtgaagaaaaa

SEQ ID NO: 193139 - DNA, 489 bp, Homo sapiens
  Payload ID: 18134
  Gene Name: transmembrane and immunoglobulin domain containing 2
  ENST ID: ENST00000600114
  CDS Start-End: 1-489
atggggtccccgggcatggtgctgggcctcctggtgcagatctgggatgaccccacacagaacagaaaccggatcgcaagcttcccaggattcctcttcgtgctgctgggggtgggaagcatgggtgtggctgcgatcgtgtggggtgcctggttctggggccgccgcagctgccagcaaagggactcaggtaacagcccaggaaatgcattctacagcaacgtcctataccggccccggggggccccaaagaagagtgaggactgctctggagaggggaaggaccagaggggccagagcatttattcaacctccttcccgcaaccggccccccgccagccgcacctggcgtcaagaccctgccccagcccgagaccctgccccagccccaggcccggccaccccgtctctatggtcagggtctctcctagaccaagccccacccagcagccgaggccaaaagggttccccaaagtgggagaggagtga

SEQ ID NO: 193140 - DNA, 1212 bp, Homo sapiens
  Payload ID: 18134
  Gene Name: transmembrane and immunoglobulin domain containing 2
  Uniprot ID: Q96BF3
  ENST ID: ENST00000595645
  CDS Start-End: 9-845
ggccaggaatggggtccccgggcatggtgctgggcctcctggtgcagatctgggccctgcaagaagcctcaagcctgagcgtgcagcaggggcccaacttgctgcaggtgaggcagggcagtcaggcgaccctggtctgccaggtggaccaggccacagcctgggaacggctccgtgttaagtggacaaaggatggggccatcctgtgtcaaccgtacatcaccaacggcagcctcagcctgggggtctgcgggccccagggacggctctcctggcaggcacccagccatctcaccctgcagctggaccctgtgagcctcaaccacagcggggcgtacgtgtgctgggcggccgtagagattcctgagttggaggaggctgagggcaacataacaaggctctttgtggacccagatgaccccacacagaacagaaaccggatcgcaagcttcccaggattcctcttcgtgctgctgggggtgggaagcatgggtgtggctgcgatcgtgtggggtgcctggttctggggccgccgcagctgccagcaaagggactcaggaaatgcattctacagcaacgtcctataccggccccggggggccccaaagaagagtgaggactgctctggagaggggaaggaccagaggggccagagcatttattcaacctccttcccgcaaccggccccccgccagccgcacctggcgtcaagaccctgccccagcccgagaccctgccccagccccaggcccggccaccccgtctctatggtcagggtctctcctagaccaagccccacccagcagccgaggccaaaagggttccccaaagtgggagaggagtgagagatcccaggagacctcaacaggaccccacccataggtacacacaaaaaaggggggatcgaggccagacacggtggctcacgcctgtaatcccagcagtttgggaagccgaggcgggtggaacacttgaggtcaggggtttgagaccagcctggcttgaacctgggaggcggaggttgcagtgagccgagattgcgccactgcactccagcctgggcgacagagtgagactccgtctcaaaaaaaacaaaaagcaggaggattgggagcctgtcagccccatcctgagaccccgtcctcatttctgtaatgatggatctcgctcccactttcccccaagaacctaataaaggcttgtgaagaaaaa

SEQ ID NO: 193141 - DNA, 333 bp, Homo sapiens
  Payload ID: 18134
  Gene Name: transmembrane and immunoglobulin domain containing 2
  ENST ID: ENST00000600349
  CDS Start-End: 1-333
atggggtccccgggcatggtgctgggcctcctggtgcagatctggggaaatgcattctacagcaacgtcctataccggccccggggggccccaaagaagagtgaggactgctctggagaggggaaggaccagaggggccagagcatttattcaacctccttcccgcaaccggccccccgccagccgcacctggcgtcaagaccctgccccagcccgagaccctgccccagccccaggcccggccaccccgtctctatggtcagggtctctcctagaccaagccccacccagcagccgaggccaaaagggttccccaaagtgggagaggagtga

SEQ ID NO: 193142 - DNA, 1517 bp, Homo sapiens
  Payload ID: 18135
  Gene Name: transmembrane and immunoglobulin domain containing 3
  ENST ID: ENST00000369716
  CDS Start-End: 135-1178
gcaagttgggaattttagactgtcactgcacatggacctctgggaagacgtctggcgagagctaggcccactggccctacagacggatcttgctggctcacctgtccctgtggaggttcccctgggaaggcaagatgcccaacaacagcactgctctgtcattggccaatgttacctacatcaccatggaaattttcattggactctgcgccatagtgggcaacgtgctggtcatctgcgtggtcaagctgaaccccagcctgcagaccaccaccttctatttcattgtctctctagccctggctgacattgctgttggggtgctggtcatgcctttggccattgttgtcagcctgggcatcacaatccacttctacagctgcctttttatgacttgcctactgcttatctttacccacgcctccatcatgtccttgctggccatcgctgtggaccgatacttgcgggtcaagcttaccgtcagattcagaattcctgggctccctgggtgcattctatcattccagttgaaagtttgcttccttccagtcatgtggctcttcattctactctccttggctctcatttcagatgccatggtcatggatgaaaaggtcaagagaagctttgtgctggacacggcttctgccatctgcaactacaatgcccactacaagaatcaccccaaatactggtgccgaggctatttccgtgactactgcaacatcatcgccttctcccctaacagcaccaatcatgtggccctgagggacacagggaaccagctcattgtcactatgtcctgcctgaccaaagaggacacgggctggtactggtgtggcatccagcgggactttgccagggatgacatggattttacagagctgattgtaactgacgacaaaggaaccctggccaatgacttttggtctgggaaagacctatcaggcaacaaaaccagaagctgcaaggctcccaaagttgtccgcaaggctgaccgctccaggacgtccattctcatcatttgcatactgatcacgggtttgggaatcatctctgtaatcagtcatttgaccaaaaggaggagaagtcaaaggaatagaagggtaggcaacactttgaagcccttctcgcgtgtcctgactccaaaggaaatggctcctactgaacagatgtgactgaagatttttttaatttagttcataaagtgatgctacaacagaataatcaccatgacaactggcccacacctcagagactgattctgatctcccaggaattctgaaggaccctctatccttgacaacaatcatttgcagccaggtagcaacggcggtagtcagaggagctatgatagaccacacccaagcaaggctgccctcaaataacatctcaagatcttagttcttatgcattccatcagtcagaagtgaagaagaggtggagaatctggattggggaccaggaaatcacttgtattttgttagccaataaattcctagccagtgttgaatgaa

SEQ ID NO: 193143 - DNA, 1150 bp, Homo sapiens
  Payload ID: 18135
  Gene Name: transmembrane and immunoglobulin domain containing 3
  Uniprot ID: P0DMS9
  ENST ID: ENST00000369717
  CDS Start-End: 11-811
agttggaccaatggaagggtctccagcaggacccattgagcagaaggaggccaggtgggaaagctcctgggaagagcagccagactggacactgggctgcttgagtcctgagtcacaattcagaattcctgggctccctgggtgcattctatcattccagttgaaagtttgcttccttccagtcatgtggctcttcattctactctccttggctctcatttcagatgccatggtcatggatgaaaaggtcaagagaagctttgtgctggacacggcttctgccatctgcaactacaatgcccactacaagaatcaccccaaatactggtgccgaggctatttccgtgactactgcaacatcatcgccttctcccctaacagcaccaatcatgtggccctgagggacacagggaaccagctcattgtcactatgtcctgcctgaccaaagaggacacgggctggtactggtgtggcatccagcgggactttgccagggatgacatggattttacagagctgattgtaactgacgacaaaggaaccctggccaatgacttttggtctgggaaagacctatcaggcaacaaaaccagaagctgcaaggctcccaaagttgtccgcaaggctgaccgctccaggacgtccattctcatcatttgcatactgatcacgggtttgggaatcatctctgtaatcagtcatttgaccaaaaggaggagaagtcaaaggaatagaagggtaggcaacactttgaagcccttctcgcgtgtcctgactccaaaggaaatggctcctactgaacagatgtgactgaagatttttttaatttagttcataaagtgatgctacaacagaataatcaccatgacaactggcccacacctcagagactgattctgatctcccaggaattctgaaggaccctctatccttgacaacaatcatttgcagccaggtagcaacggcggtagtcagaggagctatgatagaccacacccaagcaaggctgccctcaaataacatctcaagatcttagttcttatgcattccatcagtcagaagtgaagaagaggtggagaatctggattggggaccaggaaatcacttgtattttgttagccaataaattcctagccagtgttgaatgaa

SEQ ID NO: 193144 - DNA, 637 bp, Homo sapiens
  Payload ID: 18135
  Gene Name: transmembrane and immunoglobulin domain containing 3
  ENST ID: ENST00000443498
  CDS Start-End: 1-519
ggacccattgagcagaaggaggccaggtgggaaagctcctgggaagagcagccagactggacactgggctgcttgagtcctgagtcacacaccaatcatgtggccctgagggacacagggaaccagctcattgtcactatgtcctgcctgaccaaagaggacacgggctggtactggtgtggcatccagcgggactttgccagggatgacatggattttacagagctgattgtaactgacgacaaaggaaccctggccaatgacttttggtctgggaaagacctatcaggcaacaaaaccagaagctgcaaggctcccaaagttgtccgcaaggctgaccgctccaggacgtccattctcatcatttgcatactgatcacgggtttgggaatcatctctgtaatcagtcatttgaccaaaaggaggagaagtcaaaggaatagaagggtaggcaacactttgaagcccttctcgcgtgtcctgactccaaaggaaatggctcctactgaacagatgtgactgaagatttttttaatttagttcataaagtgatgctacaacagaataatcaccatgacaactggcccacacctcagagactgattctgatctcccaggaattctgaaggaccctcta

SEQ ID NO: 193145 - DNA, 957 bp, Homo sapiens
  Payload ID: 18135
  Gene Name: transmembrane and immunoglobulin domain containing 3
  ENST ID: ENST00000414219
  CDS Start-End: 1-477
aagcctcaggctcttcaaggccctccgtcaagcaatgatgccatggtcatggatgaaaaggtcaagagaagctttgtgctggacacggcttctgccatctgcaactacaatgcccactacaagaatcaccccaaatactggtgccgaggctatttccgtgactactgcaacatcatcgccttctcccctaacagcaccaatcatgtggccctgagggacacagggaaccagctcattgtcactatgtcctgcctgaccaaagaggacacgggctggtactggtgtggcatccagcgggactttgccagggatgacatggattttacagagctgattgtaactgacgacaaaggaaccctggccaatgacttttggtctgggaaagacctatcaggcaacaaaaccagaagctgcaaggctcccaaagttgtccgcaagaccgctccaggacgtccattctcatcatttgcatactgatcacgggtttgggaatcatctctgtaatcagtcatttgaccaaaaggaggagaagtcaaaggaatagaagggtaggcaacactttgaagcccttctcgcgtgtcctgactccaaaggaaatggctcctactgaacagatgtgactgaagatttttttaatttagttcataaagtgatgctacaacagaataatcaccatgacaactggcccacacctcagagactgattctgatctcccaggaattctgaaggaccctctatccttgacaacaatcatttgcagccaggtagcaacggcggtagtcagaggagctatgatagaccacacccaagcaaggctgccctcaaataacatctcaagatcttagttcttatgcattccatcagtcagaagtgaagaagaggtggagaatctggattggggaccaggaaatcacttgtattttgttagccaataaattcctagccagtgttgaatg

SEQ ID NO: 193146 - DNA, 741 bp, Homo sapiens
  Payload ID: 18135
  Gene Name: transmembrane and immunoglobulin domain containing 3
  ENST ID: ENST00000472933
  CDS Start-End: 1-324
gtcactatgtcctgcctgaccaaagaggacacgggctggtactggtgtggcatccagcgggactttgccagggatgacatggattttacagagctgattgtaactgacgacaaaggaaccctggccaatgacttttggtctgggaaagacctatcaggcaacaaaaccagaagctgcaaggctcccaaagttgtccgcaaggctgaccgctccaggacgtccattctcatcatttgcatactgatcacgggtttgggaatcatctctgtaatcagtcatttgaccaaaaggaggagaagtcaaaggaatagaaggggtaagtagctattgttgagggagggggtgggcaagaattagagaaaatgaaagaggtcaaggagcagatttcaaatgagtgaatgagagcctcttcatattgcctggtcacctggagaccaatgcagccagccatgggctggggtagatatctgcttgatggtgacaaggcatcacgagaagtgacagagggagcactggagctttcttaagtggatacatgtgtaggtcaggaaggaaggaggtcctgagacaaccacaccaggttcccatctgcagagccacctacctccccagcacacaaacttcgggctcctgtcgaaggaatgagcttctgggaccgctgggtaagcaggtatagaagagtctcctttttcatatacacaggatgttgccctgttgcccaggcttgagtgccgaagtatg

SEQ ID NO: 193147 - DNA, 8805 bp, Homo sapiens
  Payload ID: 18136
  Gene Name: transmembrane and tetratricopeptide repeat containing 1
  Uniprot ID: Q8IUR5
  ENST ID: ENST00000256062
  CDS Start-End: 475-2799
agatagaaaaagtagtttgcttggcatctcccaaattatcttgagcaaacaataaaataagaaatgtttcagaagacaattcggctcccaggcccaaaccaaaactcgaacctggtactttttgtaagtgcgggccaagaaaggggctgtaaagttaaagagccggtggcgcctctgaacacacccgggcagggcgagcaggatgtccttgtccagggagaccccttctcctggctttgaggaaggtgctccctatccccgcgggttcctccgccaagcgggacgccgcgccgggcgggtgagagaaagcccgggcaggagagcacagagccggcgactggacgcgagcgcggggcgggtggagagcgtctctccgggcgccgctgctgttgtcccgggtgctgaaaagccgggaacttcccgggaagcagcggcacttttctccctggaaggctaaacatatttttgactggtatgaacccattctactttcatgcagtaaatataattttacactgcttagtgactcttgtgctgatgtacacctgtgataaaactgtcttcaagaatcgtggacttgcttttgtaacggcattgctttttgctgtacatcctattcatactgaggcggtggctgggatcgttggcagagcggacgtgttagcgtgtctgctgtttctattggcctttctctcgtacaacaggagtctggatcagggctgtgttgggggaagtttcccttccacggtgtctcccttcttcttgctgctcagtttgtttctggggacctgtgcgatgctggtgaaagagacaggcatcacggtgtttggagtgtgcttggtttatgacctcttttccctttccaacaagcaagacaagtcgagcaatggggccctctgtccacgcagcccacagcagcccgggagcccccagccctcctcactgccaggccatcctcaccgggagaatgggaagcagcagcggttccctcacaaaggagcttggggtggctgccactctccactgccaccagaacccaagagcagtggattcccagtgtccccacgagctgtgtggtccatgatgagattcctcacctattcctacctcttggccttcaatgtgtggcttctgcttgcacccgtgaccctgtgctatgactggcaggtcggcagtattcctctggtagagaccatatgggacatgcggaacttagccaccatctttctggcggttgtgatggccttattgagcctgcactgcttagcagcctttaagagactggagcacaaggaggttttagtcggcttgttgttcctggtgttcccgttcattccagccagcaacctcttcttcagggtgggttttgtggtggcggagagagtcctttacatgcctagcatgggctactgcatcctttttgtgcatggactgagcaagctctgcacttggctgaatcgatgtggggccaccaccctgattgtgtccactgtgttgctgctgttgcttttctcttggaaaactgtgaaacagaatgaaatttggctgtcaagagagtccctattcaggtctggagttcaaactctgccccacaatgccaaggttcactacaactatgccaatttcctgaaggaccaaggtcggaacaaggaagcgatctaccactacagaacagctctcaagttgtatccacgccatgcaagtgcgctcaacaaccttggaacactgacgagagacacagcagaggcaaagatgtactatcagagggctctccagctccatccacagcataaccgggctcttttcaatctggggaatctcctcaagtcccaggagaaaaaggaagaagctatcaccttactgaaggattccatcaaatatggtccagagtttgcagatgcatattcaagcttagcttcgttattggctgagcaggagcggtttaaagaagctgaagaaatataccaaactggaataaagaactgtccagacagctcagatttacacaacaactatggggttttcttagttgatactggcttaccagaaaaggcagtggcccattaccagcaggccatcaaacttagccccagtcatcacgtggccatggtgaacttgggaagactctacaggtcactgggagagaacagcatggctgaagaatggtacaagcgcgccctgcaggtggcacacaaagctgagatattgtcacctttgggagcactgtattacaacactggccgatacgaagaggctttgcagatttaccaggaagctgcagcacttcagccttctcagagggagctccgcttggcactggctcaggttttggccgtgatgggtcagacaaaagaagctgaaaagatgaccaatcacattgtgtcagaggagaccggatgccttgaatgctatcgcctcttgtcagccatctatagcaagcaggagaaccacgacaaggcacttgatgctatagacaaggctctccagctgaaaccaaaggacccaaaagtcatttctgaactttttttcacaaaaggaaaccaattaagagagcagaaccttctcgacaaagcttttgagagctatagagtggctgtgcaactaaacccagaccaagcacaggcctggatgaacatgggtggcatccaacacatcaagggaaaatatgtgtctgcaagagcttattatgagagagccttacagctggttccagacagcaaactgctgaaggaaaatcttgccaaattggatcgcctagaaaaacgattacaagaagttcgagaaaaggatcaaacatagcaccaccgtctgacccaacctcataggataatgtggtgcctctgaaaggggagtgatggaagccttgctttcacatcagcaggggcacaactaatgagattttctctcattccgagttcagggtgacacattttgggacatctgctggtagcccagtgctgaaggacttgcttttccatgaagaagacgaaaacagcaaacaagggcaagaaggtctgagagggaaggagaatgacatttacacattttacagatttttgtttggtttaactccagatttctcttgatatatctctgtgcttttgagacctggagatctaattctgtttagacattttttgtcccagaaatacagaagcttgaaatgctatgaaggcagagcttctattctttatgggatgaaatatttcaaaagaggataaatcctctgtggtaagccatttggaaaatcctaccaagaattggcttatttaattttccagaaccaggaatgagtatctaatagcttttgtagaaccttccagaatatgtggggaaaaagggctattgctaagtgagctttatctaatatcctcctaagagttttactagtgcttttttgaggaattacagggaagctcctggaattgtacatggatatctttatccctagggggaaatcaaggagctgggcacccctaattctttatggaagtgtttaaaactattttaattttattacaagtattactagagtggtggttctactctaagatttcaaaagtgcatttaaaatcatacatgttcccgcctgcaaatatattgttattttggtggagaaaaaaatagtatattctacataaaaaattaaagatattaactaagagaaatgtcctactttattatcttaatgttcagacatcatgagatttattatttttttgaaaaatatattgaaccattgaggaacctttatgatgtatcacagaaatcttcatagattctaactagatggaaaaagagctctatttatttgtgttcctaggcttaatgagaattctgggcttagaacatcaacgattaatacccagaattctttgttttgagaatattatggagaatgctctaaaaatctagggtaaagatctaaattcaaattttaaatatatatttatatttaagaaataggaaaggcaaagttgaactcacaatttgacatttatttttagtgttatttatttcataacttataaaatatttaatatatacatacacactcttcttttttctctgtacaaagtggttttaatatcagctttcaaaactgatcttataaaatgtaaatctaaattgtaaaatagttaagttttaacagtccctcccaaactttgtgttgattattcacttgctaaagagatgtgaggaatcagccttcagttttttggcagtagtatattttggaagtgaagaaattggaacacctgtttctaatttggtcttcatcattagagacaaaaccaaaacactccaggcagtactgtttatagtgctgagccaggtagcacacagacatagtagcctaaaggctcacataattcgcatgctcaggccagggcagggtaaaaatagccttctgcttctttcaacccagtatcaggaagcactaccccagtgttattatttgttttgtcaaggtaagtctaaataaacaagaaaaacttcttcggaaggcatggcgaagggagtattttaaatgaaaatgattacagaatttgaattagcatgcatctctttgtgtgcaacagtaatccaagaatgtatatgttaccactacaaccatttgtttctaatagttttttcatgttatataacataaatgtatccacaaccttaattaagaactattcttcccccaaaatcatagtcctagtgtcaagaaacatactccagtgtttattgtaaaataacaaccacaccctcaaattgaaaaaagtgaatgtctaggactttattacaacttttcagaataatctgtaatgaaaactcatgcttaaaaatttaatggaaaagactgagccccaaattttgaatagtgattacgccttacttgaagtgctaataaaggtaggagagtacatttgttggaataacagaaatggtgatttcagcctaaaagtttctgagggtaaaggatcacatgaccttcaggaaactctctgcctcctgtaggtgctttcctatctcccccatccttccctaccccttttcccttttccttcctctctttttctctcactgtcactctgtctacacacactggcatcttttgaacactaaaagtaagcactgttttttaaaaaagtaattatttgttggatcagatacttttatcccaagtgaataccttcactgagatgtggccaatgcaatagtttcacagtaaaaacagtgcctataagaaaatagatcacatactatttttcaatgatattaagtgtattttgtaactattttcatttggtccttgtaacatgaaataatacatggaacttacctttataataaaaatggagtgccctggttcatcatagaggtgcatctagtttgcccttaatggaagtatacttgctgtgtggattgatagcaccttcttgaaatggaggagctcagctggcctcatggatgtgcaatttttgcagtcccacagggccttgcatacagaagcaccccgagctcagttgaatgtctgtttgattttttcttatttatttttttgagacacagttccactttgtctttttgtcacccaggatggagttcagtggcacaaacatggctcactgtagcctcgacctccctggctgaagggatcctcccacctcagcctcccaagtaaccgagactacaggcatatgccagcatgtccagctaatttttgtattttttgtagagacagggtttcaccatgttgcccaggctggtctcaaactcctgggctcaagcgatctgcccacctctgcctcccaaagtgctgggattaaaggcataagccaccatgtccaactgaaattcttaataattaataatttttgagcaagaggtccacactttcattttgcactgggttcccaaacaggtcctgggtaggaaggatggctgaggataaaacaggagttgctttggcctggctgaacatttgaaccaatgatcagagtttcattttatgattgtgttactctgaacagatttgctatttttttccagctacatttagagttcctcatgtatatatcacccctctttttccagtccatctaacctctccttttttttgtgcctagaatcagttctccttgccttcaaaatccctgataagtgtccatttctttttgtatcctttgatgtagaagccacaagaatggctttagcagcttattttaatcttatgaattattcattcaggattttttaaatgattcagatgctttcaatctgttaacagtatttataaaacatgtttcagtgatacaacataggtgaactaaaccaaagatgcaaatgccttggaggaaaagaaattgtattatagagaatcctgagatatatccttttgggttgtttaatttaaagcctatcacaaaacaaagagaattgtcgcactttaattccaacctcctgcagtacttcacaacccttagcataagattctgaaatttgtaataggtggtacctagtttgatgcagggttttgcagcagttgtgcgaatgcctctgcgcaacggcctttcagtcagactaaatgagaaaatccaaactgtcctatcaaaactgacccacaataactgtactctgaggcgaaacagagcaaatgtgggtttcctgttttcattgtaaaacattccaggttctcagattgaagagctacattcagctgatagttgacatctgttccctcacacgtagtggctctcaacacgggctgcactttggaatcacctgaggacctttcggaatcttcggttgaatcatcctggctgtcctggtgatgcttcttatgtgcagctaggctggagaaccactacagggctgacacctggaatgggagcttgtaacttttacaaaataatagatgtttatcatcttttgcaatttttacttttaagtctatactaaaatgagccaaagaagtcttaacaatgatgtatggcacaattggttggttgaggctatcattccatgattacaaataggtggttatgtggggtggttttgcacttgtggcaattggactgcaatttggccttaaaatgacacaattcctcgttctcagatggagaggaattgccttgaaatttgcatgtaccagactaagtgccagtatatatatgactgatattttcgtgactcatagaaggtgtccatggtatagagtttatgcctacatctctatctttattttgggcacacatgagcttttgttaattatttctttgtacttgttagaatctgtttttgaaaaaaaaaaaaacttttgctttgatttgtggtggattcaccttcttaaaataataaatttagaggatattaggaatgacattcaaaacaaatatagtgagaggtgattttttaaaaatttttgttcctggtttccaaattatgtttactttgatttgattatatgttggtatctcccaaatataggttaacttagctatttaaatggtatcttttgacatttaaaaagaattaagtacctgtcaaatctagcattgaggttgcagttgaataagataaaagcttaggatgtcaaaaaataatatagagaaatattataagattttatgattattcttgacgtttttgatgcaaaaggaaaatatgctgaatagttcttccaaaaaatattatttccctcaatattttatttgtagccatgtaatttaaagagaacagaaaataactgcaatcaaaagtatggtttaatatcaatcaaagtggcacaacagaattgataagatctttataacaatcaattggctgatattaaaatattgattttaattgatcttttcaattaaaatctttagggcctgtaactcataaaatcagcatccaccacaatatatggtcattattggtttgtaagcatagatcaccattgactcctacctggagagacatgtctatttctaaaaatccagtagtttctttgcattctcagtagtacacgttgtatatatatatatgtaacaaatttggtagttttcagtatgtgtgatgtcctttgggggttatttatcttgctggtccataggaggggtacactaccccaagaatcaagacatctgagttctagttctagttctagctctgccactgaagagccaccttacctggggcaagttagccattgtctcccagtcatgtttaccacccatgaaaggactcgtcggtttgatgtttccattaagctcaatgagtaactctaatagttactcttgaatctggattgaaaaacaccatgcatctgatgagataattcataaatgttgccccttttttaaatgatacaaccctaaaagtgactgaattgcccaagtgcttgaacatggcagaggtagttactcctattttgcagtttgtgcacttaaaaattcctacagtgattgttactttactggggaaaaaagatgaggtgaaacttcctcccaaggaattaaaatatctgtagaagccatggcttgcttttataatgtggaaatcatttgatttgctgtaattcacgcagatccctccttttgtcagggggaaatgatttgcatcatgttcttttttcataatgcttttacttcctgtttggatcagttgtatgtaaatgtacatttttgttactttggctgtgcccgttagaatttatcttccataaagtatttctcccattgagtctaatgatgtatactttgcctaggtctttccaaaattaaatttatgtaaatgtctattttatataaaatatgattaaaataa

SEQ ID NO: 193148 - DNA, 2758 bp, Homo sapiens
  Payload ID: 18136
  Gene Name: transmembrane and tetratricopeptide repeat containing 1
  Uniprot ID: Q8IUR5
  ENST ID: ENST00000539277
  CDS Start-End: 60-2708
gtaggggaggatgccagacgcccgggagaggccagggcagcagcggcggcggcggcgcgatggtggtgaccacctctgcccgaggcggcggcggggaccgcacaccctcccggcggcggggctgcgggctagcgccggccggggccgcggcgctgctggccggggcaagctgcctgtgctacggccgctccctgcagggcgagttcgtgcacgacgacgtgtgggcgatcgtgaacaaccccgacgtgcggcccggcgccccgctccgctggggcatcttcaccaacgacttctggggcaagggcatggccgagaacaccagccacaagtcctaccggccgctctgcgtcctcaccttcaagctaaacatatttttgactggtatgaacccattctactttcatgcagtaaatataattttacactgcttagtgactcttgtgctgatgtacacctgtgataaaactgtcttcaagaatcgtggacttgcttttgtaacggcattgctttttgctgtacatcctattcatactgaggcggtggctgggatcgttggcagagcggacgtgttagcgtgtctgctgtttctattggcctttctctcgtacaacaggagtctggatcagggctgtgttgggggaagtttcccttccacggtgtctcccttcttcttgctgctcagtttgtttctggggacctgtgcgatgctggtgaaagagacaggcatcacggtgtttggagtgtgcttggtttatgacctcttttccctttccaacaagcaagacaagtcgagcaatggggccctctgtccacgcagcccacagcagcccgggagcccccagccctcctcactgccaggccatcctcaccgggagaatgggaagcagcagcggttccctcacaaaggagcttggggtggctgccactctccactgccaccagaacccaagagcagtggattcccagtgtccccacgagctgtgtggtccatgatgagattcctcacctattcctacctcttggccttcaatgtgtggcttctgcttgcacccgtgaccctgtgctatgactggcaggtcggcagtattcctctggtagagaccatatgggacatgcggaacttagccaccatctttctggcggttgtgatggccttattgagcctgcactgcttagcagcctttaagagactggagcacaaggaggttttagtcggcttgttgttcctggtgttcccgttcattccagccagcaacctcttcttcagggtgggttttgtggtggcggagagagtcctttacatgcctagcatgggctactgcatcctttttgtgcatggactgagcaagctctgcacttggctgaatcgatgtggggccaccaccctgattgtgtccactgtgttgctgctgttgcttttctcttggaaaactgtgaaacagaatgaaatttggctgtcaagagagtccctattcaggtctggagttcaaactctgccccacaatgccaaggttcactacaactatgccaatttcctgaaggaccaaggtcggaacaaggaagcgatctaccactacagaacagctctcaagttgtatccacgccatgcaagtgcgctcaacaaccttggaacactgacgagagacacagcagaggcaaagatgtactatcagagggctctccagctccatccacagcataaccgggctcttttcaatctggggaatctcctcaagtcccaggagaaaaaggaagaagctatcaccttactgaaggattccatcaaatatggtccagagtttgcagatgcatattcaagcttagcttcgttattggctgagcaggagcggtttaaagaagctgaagaaatataccaaactggaataaagaactgtccagacagctcagatttacacaacaactatggggttttcttagttgatactggcttaccagaaaaggcagtggcccattaccagcaggccatcaaacttagccccagtcatcacgtggccatggtgaacttgggaagactctacaggtcactgggagagaacagcatggctgaagaatggtacaagcgcgccctgcaggtggcacacaaagctgagatattgtcacctttgggagcactgtattacaacactggccgatacgaagaggctttgcagatttaccaggaagctgcagcacttcagccttctcagagggagctccgcttggcactggctcaggttttggccgtgatgggtcagacaaaagaagctgaaaagatgaccaatcacattgtgtcagaggagaccggatgccttgaatgctatcgcctcttgtcagccatctatagcaagcaggagaaccacgacaaggcacttgatgctatagacaaggctctccagctgaaaccaaaggacccaaaagtcatttctgaactttttttcacaaaaggaaaccaattaagagagcagaaccttctcgacaaagcttttgagagctatagagtggctgtgcaactaaacccagaccaagcacaggcctggatgaacatgggtggcatccaacacatcaagggaaaatatgtgtctgcaagagcttattatgagagagccttacagctggttccagacagcaaactgctgaaggaaaatcttgccaaattggatcgcctagaaaaacgattacaagaagttcgagaaaaggatcaaacatagcaccaccgtctgacccaacctcataggataatgtggtgcctctgaaaggg

SEQ ID NO: 193149 - DNA, 4228 bp, Homo sapiens
  Payload ID: 18136
  Gene Name: transmembrane and tetratricopeptide repeat containing 1
  ENST ID: ENST00000551659
  CDS Start-End: 147-2981
gcgcggggagctcgcggcgggtccagctgccgcagcaccatgcccgagcccccctccgggcagacgccgcgcgccgccggggccccggtaggggaggatgccagacgcccgggagaggccagggcagcagcggcggcggcggcgcgatggtggtgaccacctctgcccgaggcggcggcggggaccgcacaccctcccggcggcggggctgcgggctagcgccggccggggccgcggcgctgctggccggggcaagctgcctgtgctacggccgctccctgcagggcgagttcgtgcacgacgacgtgtgggcgatcgtgaacaaccccgacgtgcggcccggcgccccgctccgctggggcatcttcaccaacgacttctggggcaagggcatggccgagaacaccagccacaagtcctaccggccgctctgcgtcctcaccttcaagctaaacatatttttgactggtatgaacccattctactttcatgcagtaaatataattttacactgcttagtgactcttgtgctgatgtacacctgtgataaaactgtcttcaagaatcgtggacttgcttttgtaacggcattgctttttgctgtacatcctattcatactgaggcggtggctgggatcgttggcagagcggacgtgttagcgtgtctgctgtttctattggcctttctctcgtacaacaggagtctggatcagggctgtgttgggggaagtttcccttccacggtgtctcccttcttcttgctgctcagtttgtttctggggacctgtgcgatgctggtgaaagagacaggcatcacggtgtttggagtgtgcttggtttatgacctcttttccctttccaacaagcaagacaagtcgagcaatggggccctctgtccacgcagcccacagcagcccgggagcccccagccctcctcactgccaggccatcctcaccgggagaatgggaagcagcagcggttccctcacaaaggagcttggggtggctgccactctccactgccaccagaacccaagagcagtggattcccagtgtccccacgagctgtgtggtccatgatgaggtatctgagagcaagcagcaatagaaatttcctgcttaccatgagaccatttttaaaaagggccattttggtcctaagttatgtgcttgtcattttgtacttccgtctgtggataatgggaggatctatgcccctcttttcagagcaggataatccagcttcattttcgccttacattcttacgagattcctcacctattcctacctcttggccttcaatgtgtggcttctgcttgcacccgtgaccctgtgctatgactggcaggtcggcagtattcctctggtagagaccatatgggacatgcggaacttagccaccatctttctggcggttgtgatggccttattgagcctgcactgcttagcagcctttaagagactggagcacaaggaggttttagtcggcttgttgttcctggtgttcccgttcattccagccagcaacctcttcttcagggtgggttttgtggtggcggagagagtcctttacatgcctagcatgggctactgcatcctttttgtgcatggactgagcaagctctgcacttggctgaatcgatgtggggccaccaccctgattgtgtccactgtgttgctgctgttgcttttctcttggaaaactgtgaaacagaatgaaatttggctgtcaagagagtccctattcaggtctggagttcaaactctgccccacaatgccaaggttcactacaactatgccaatttcctgaaggaccaaggtcggaacaaggaagcgatctaccactacagaacagctctcaagttgtatccacgccatgcaagtgcgctcaacaaccttggaacactgacgagagacacagcagaggcaaagatgtactatcagagggctctccagctccatccacagcataaccgggctcttttcaatctggggaatctcctcaagtcccaggagaaaaaggaagaagctatcaccttactgaaggattccatcaaatatggtccagagtttgcagatgcatattcaagcttagcttcgttattggctgagcaggagcggtttaaagaagctgaagaaatataccaaactggaataaagaactgtccagacagctcagatttacacaacaactatggggttttcttagttgatactggcttaccagaaaaggcagtggcccattaccagcaggccatcaaacttagccccagtcatcacgtggccatggtgaacttgggaagactctacaggtcactgggagagaacagcatggctgaagaatggtacaagcgcgccctgcaggtggcacacaaagctgagatattgtcacctttgggagcactgtattacaacactggccgatacgaagaggctttgcagatttaccaggaagctgcagcacttcagccttctcagagggagctccgcttggcactggctcaggttttggccgtgatgggtcagacaaaagaagctgaaaagatgaccaatcacattgtgtcagaggagaccggatgccttgaatgctatcgcctcttgtcagccatctatagcaagcaggagaaccacgacaaggcacttgatgctatagacaaggctctccagctgaaaccaaaggacccaaaagtcatttctgaactttttttcacaaaaggaaaccaattaagagagcagaaccttctcgacaaagcttttgagagctatagagtggctgtgcaactaaacccagaccaagcacaggcctggatgaacatgggtggcatccaacacatcaagggaaaatatgtgtctgcaagagcttattatgagagagccttacagctggttccagacagcaaactgctgaaggaaaatcttgccaaattggatcgcctagaaaaacgattacaagaagttcgagaaaaggatcaaacatagcaccaccgtctgacccaacctcataggataatgtggtgcctctgaaaggggagtgatggaagccttgctttcacatcagcaggggcacaactaatgagattttctctcattccgagttcagggtgacacattttgggacatctgctggtagcccagtgctgaaggacttgcttttccatgaagaagacgaaaacagcaaacaagggcaagaaggtctgagagggaaggagaatgacatttacacattttacagatttttgtttggtttaactccagatttctcttgatatatctctgtgcttttgagacctggagatctaattctgtttagacattttttgtcccagaaatacagaagcttgaaatgctatgaaggcagagcttctattctttatgggatgaaatatttcaaaagaggataaatcctctgtggtaagccatttggaaaatcctaccaagaattggcttatttaattttccagaaccaggaatgagtatctaatagcttttgtagaaccttccagaatatgtggggaaaaagggctattgctaagtgagctttatctaatatcctcctaagagttttactagtgcttttttgaggaattacagggaagctcctggaattgtacatggatatctttatccctagggggaaatcaaggagctgggcacccctaattctttatggaagtgtttaaaactattttaattttattacaagtattactagagtggtggttctactctaagatttcaaaagtgcatttaaaatcatacatgttcccgcctgcaaatatattgttattttggtggagaaaaaaatagtatattctacataaaaaattaaagatattaactaagagaaatgtcctactttattatcttaatgttcagacatcatgagatttattatttttttgaaaaatatattgaaccattgaggaacctttatgatgtatcacagaaatcttcatagattctaactagatggaaaaagagctctatttatttgtgttcctaggcttaatgagaattctgggcttagaacatcaacgattaatacccagaattctttgttttgagaatattatggagaatgctctaaaaatctagggtaaagatctaaattcaaattttaaatatatatttatatttaagaaataggaaaggcaaagttgaactcacaatttgacatttatttttagtgttatttatttcataacttataaaatatttaatatata

SEQ ID NO: 193150 - DNA, 3915 bp, Homo sapiens
  Payload ID: 18136
  Gene Name: transmembrane and tetratricopeptide repeat containing 1
  ENST ID: ENST00000552618
  CDS Start-End: 48-2768
gccagacgcccgggagaggccagggcagcagcggcggcggcggcgcgatggtggtgaccacctctgcccgaggcggcggcggggaccgcacaccctcccggcggcggggctgcgggctagcgccggccggggccgcggcgctgctggccggggcaagctgcctgtgctacggccgctccctgcagggcgagttcgtgcacgacgacgtgtgggcgatcgtgaacaaccccgacgtgcggcccggcgccccgctccgctggggcatcttcaccaacgacttctggggcaagggcatggccgagaacaccagccacaagtcctaccggccgctctgcgtcctcaccttcaagctaaacatatttttgactggtatgaacccattctactttcatgcagtaaatataattttacactgcttagtgactcttgtgctgatgtacacctgtgataaaactgtcttcaagaatcgtggacttgcttttgtaacggcattgctttttgctgtacatcctattcatactgaggcggtggctgggatcgttggcagagcggacgtgttagcgtgtctgctgtttctattggcctttctctcgtacaacaggagtctggatcagggctgtgttgggggaagtttcccttccacggtgtctcccttcttcttgctgctcagtttgtttctggggacctgtgcgatgctggtgaaagagacaggcatcacggtgtttggagtgtgcttggtttatgacctcttttccctttccaacaagcaagacaagtcgagcaatggggccctctgtccacgcagcccacagcagcccgggagcccccagccctcctcactgccaggccatcctcaccgggagaatgggaagcagcagcggttccctcacaaaggagcttggggtggctgccactctccactgccaccagaacccaagagcagtggattcccagtgtccccacgagctgtgtggtccatgatgaggtatctgagagcaagcagcaatagaaatttcctgcttaccatgagaccatttttaaaaagggccattttggtcctaagttatgtgcttgtcattttgtacttccgtctgtggataatgggaggatctatgcccctcttttcagagcaggataatccagcttcattttcgccttacattcttacgagattcctcacctattcctacctcttggccttcaatgtgtggcttctgcttgcacccgtgaccctgtgctatgactggcaggtcggcagtattcctctggtagagaccatatgggacatgcggaacttagccaccatctttctggcggttgtgatggccttattgagcctgcactgcttagcagcctttaagagactggagcacaaggaggttttagtcggcttgttgttcctggtgttcccgttcattccagccagcaacctcttcttcagggtgggttttgtggtggcggagagagtcctttacatgcctagcatgggctactgcatcctttttgtgcatggactgagcaagctctgcacttggctgaatcgatgtggggccaccaccctgattgtgtccactgtgttgctgctgttgcttttctcttggaaaactgtgaaacagaatgaaatttggctgtcaagagagtccctattcaggttgtatccacgccatgcaagtgcgctcaacaaccttggaacactgacgagagacacagcagaggcaaagatgtactatcagagggctctccagctccatccacagcataaccgggctcttttcaatctggggaatctcctcaagtcccaggagaaaaaggaagaagctatcaccttactgaaggattccatcaaatatggtccagagtttgcagatgcatattcaagcttagcttcgttattggctgagcaggagcggtttaaagaagctgaagaaatataccaaactggaataaagaactgtccagacagctcagatttacacaacaactatggggttttcttagttgatactggcttaccagaaaaggcagtggcccattaccagcaggccatcaaacttagccccagtcatcacgtggccatggtgaacttgggaagactctacaggtcactgggagagaacagcatggctgaagaatggtacaagcgcgccctgcaggtggcacacaaagctgagatattgtcacctttgggagcactgtattacaacactggccgatacgaagaggctttgcagatttaccaggaagctgcagcacttcagccttctcagagggagctccgcttggcactggctcaggttttggccgtgatgggtcagacaaaagaagctgaaaagatgaccaatcacattgtgtcagaggagaccggatgccttgaatgctatcgcctcttgtcagccatctatagcaagcaggagaaccacgacaaggcacttgatgctatagacaaggctctccagctgaaaccaaaggacccaaaagtcatttctgaactttttttcacaaaaggaaaccaattaagagagcagaaccttctcgacaaagcttttgagagctatagagtggctgtgcaactaaacccagaccaagcacaggcctggatgaacatgggtggcatccaacacatcaagggaaaatatgtgtctgcaagagcttattatgagagagccttacagctggttccagacagcaaactgctgaaggaaaatcttgccaaattggatcgcctagaaaaacgattacaagaagttcgagaaaaggatcaaacatagcaccaccgtctgacccaacctcataggataatgtggtgcctctgaaaggggagtgatggaagccttgctttcacatcagcaggggcacaactaatgagattttctctcattccgagttcagggtgacacattttgggacatctgctggtagcccagtgctgaaggacttgcttttccatgaagaagacgaaaacagcaaacaagggcaagaaggtctgagagggaaggagaatgacatttacacattttacagatttttgtttggtttaactccagatttctcttgatatatctctgtgcttttgagacctggagatctaattctgtttagacattttttgtcccagaaatacagaagcttgaaatgctatgaaggcagagcttctattctttatgggatgaaatatttcaaaagaggataaatcctctgtggtaagccatttggaaaatcctaccaagaattggcttatttaattttccagaaccaggaatgagtatctaatagcttttgtagaaccttccagaatatgtggggaaaaagggctattgctaagtgagctttatctaatatcctcctaagagttttactagtgcttttttgaggaattacagggaagctcctggaattgtacatggatatctttatccctagggggaaatcaaggagctgggcacccctaattctttatggaagtgtttaaaactattttaattttattacaagtattactagagtggtggttctactctaagatttcaaaagtgcatttaaaatcatacatgttcccgcctgcaaatatattgttattttggtggagaaaaaaatagtatattctacataaaaaattaaagatattaactaagagaaatgtcctactttattatcttaatgttcagacatcatgagatttattatttttttgaaaaatatattgaaccattgaggaacctttatgatgtatcacagaaatcttcatagattctaactagatggaaaaagagctctatttatttgtgttcctaggcttaatgagaattctgggcttagaacatcaacgattaatacccagaattctttgttttgagaatattatggagaatgctctaaaaatctagggtaaagatctaaattcaaattttaaatata

SEQ ID NO: 193151 - DNA, 593 bp, Homo sapiens
  Payload ID: 18136
  Gene Name: transmembrane and tetratricopeptide repeat containing 1
  ENST ID: ENST00000550354
  CDS Start-End: 1-393
ttcagggtgggttttgtggtggcggagagagtcctttacatgcctagcatgggctactgcatcctttttgtgcatggactgagcaagctctgcacttggctgaatcgatgtggggccaccaccctgattgtgtccactgtgttgctgctgttgcttttctcttggaaaactgtgaaacagaatgaaatttggctgtcaagagagtccctattcaggtctggagttcaaactctgccccacaatgccaaggttcactacaactatgccaatttcctgaaggaccaaggtcggaacaaggaagcgatctaccactacagaacagctctcaataataataaagcttgggattatctatgctggagattcagaaaaacactgacagatctgccatagacctccagagctctccgactgttcggttaccctggagaaggtttctaacattctaccttgtgtgatgggagtagaaagtccagagaccacccaacaagtcagcccttcctacacaaaaactcccaagaaatgcctcagctaataagccccgaaagagaaatagtgattctccctgaataaagtcaagatattgatgtgta

SEQ ID NO: 193152 - DNA, 5681 bp, Homo sapiens
  Payload ID: 18137
  Gene Name: transmembrane and tetratricopeptide repeat containing 2
  Uniprot ID: Q8N394
  ENST ID: ENST00000321196
  CDS Start-End: 708-3218
gtcacgcaggcgcggggggccgcgtcgagaaccccacgcgggagcttctggagtctccagccaccgcttctcacttcactggagaagggagctggggctggggctggggctggggctgggagggagctaataaacattgaatgtgcagcagctgccttggcggccggagtccgcccgagcgacaccggagcagtgcgcccgggaggcggcgaggggaggcggttcgccttgtccctcccacccgcgcctctttctctctcttcctccagctggtcccagagcccggcttggtccggtccctctgcccccatcccgcacccttccacctcctccgagtcccactcctcacctaggacgccccaaactgccatgggttagggtggggatcgcgacccgcgcgaaagaccagccctgcgcttccgccgggggacgcggagcccaaacgccgctcaccgcttgcgggcgccgggcatggggagtgtggtgtgagcccgcacccggggaggacgcaggagctgcggagacgggcgcgaggaggaggagaggagtcgtggattggaaggacccgagggagggagggtggggaagcgagggaaaagtgaagctgggaggagaaggcggcggaaggtggagattgatgcttctgttttttgttgccgctgctgccctcgcgctgggagccgagccggagggaaggcggtggagagatgattgcagagttggtgagcagcgctctggggctcgccttgtatctcaacaccctgagtgcggatttctgctatgatgacagccgtgctatcaagactaatcaggaccttctcccagaaactccatggacgcacattttctacaatgatttttgggggactcttctaacccacagtggcagccacaagtcctaccggccactctgcactctttcttttcgcctgaaccatgccattggagggttgaatccctggagctaccatcttgtcaatgtcctgttgcatgcagcagtcactggtctcttcacaagcttctccaagatcctccttggtgatggatactggacattcatggctggcttgatgtttgcttctcaccccattcacacggaggcagtggcaggaatcgtgggacgagccgatgtcggggccagtctcttctttctcctctccttgctctgctacattaaacactgttctacaagaggctactcagccagaacctggggctggttcctggggtcaggactgtgcgcaggatgcagcatgttgtggaaggaacaaggagtgactgttctcgcagtttcagcagtttatgatgtctttgtctttcacaggctgaaaataaaacagatattacctaccatttacaaaaggaagaacttgtcgcttttcctaagcattagtttgttaattttctggggttcctcccttttgggtgcccggttatactggatgggaaacaaaccaccaagcttttccaactcggacaaccccgctgctgattcggacagcctcctcacccgcactctcaccttcttctacttgccaaccaagaacctctggctgttgctatgtccagataccctcagttttgattggtcaatggatgctgtgcctctgctcaaaacagtttgtgactggagaaacctacacactgtggccttctatactggactccttctccttgcctactatggtttgaagagcccgagcgtagacagagaatgcaatgggaaaactgtaacaaatggcaagcagaatgcaaatggacatagctgcctttcagatgtggagtaccagaactcagagactaagtccagctttgcatccaaagtagaaaatggcattaaaaacgatgtatcacagagaacccagcttccttctacggagaacattgttgttctgtctttatctttgttaatcataccctttgttcctgccacgaacctgtttttctatgtcggctttgtaattgcagagcgagtattatatattcctagtatgggcttctgcctactgattacagtgggtgctagagccctttatgtcaaagtccaaaagcggttcctcaagagcttgattttttatgctacagctacactaattgttttttatggactcaagactgcgatcaggaatggagactggcagaatgaggaaatgctttatagatcagggataaaagtaaacccagctaaagcatggggtaaccttggaaatgttctgaagagtcagagcaaaatttctgaagctgaaagcgcctatagaaatgctttgtactaccgcagcaacatggctgacatgctttataatttagggctacttctccaggagaacagcaggtttgcagaagcactacattattataaattggccattgggagcaggcctaccctggcttctgcatatttaaataccggtattattctaatgaaccaaggaaggacggaagaagcccgacggacattcttaaagtgttcggagatcccagatgaaaacctaaaggaccctcatgcacacaagagctctgttaccagttgtttgtacaacctaggaaagctgtatcatgagcagggacactatgaggaagcccttagtgtatacaaggaagcaattcagaaaatgccaaggcagtttgccccacagagcttgtacaacatgatgggtgaagcatatatgcgtttaagcaaactccccgaagcagagcattggtatatggaatcactgagatccaagactgaccacatccctgctcatctcacctatgggaagctgctagctctaacaggtcgtaagagtgaggctgaaaagctcttcttgaaggctattgagctggatcccaccaaaggaaactgttacatgcattatggtcagtttcttctggaagaagctcgtctcatagaagcagctgagatggcaaaaaaagcagctgaactagacagcacagagtttgatgttgtcttcaatgctgcccacatgctcagacaggctagcctcaatgaagcagctgagaagtattatgatctggcagccaggctgaggcctaattatccggctgctttgatgaacctgggagccattctgcacctcaatggcagactccagaaggccgaggccaactacctgcgggccctgcagctcaagccagacgatgtcatcacacagtccaatctccgcaaactgtggaacatcatggaaaaacaaggcttaaagacttctaagacctgacacaggaggcagaagcccatcctcctccatttttaaaagctggcttccttagcagacagaacttcccagcagtgctatgacaagagctggtgttagacttcaagaccagggcagaggtcattgaggtcactaccgcttctggaagaatccactttgctgtaggcacagctgttaacaccaaaaaggggaaagccggaaacctcctggaggatgtcattgttacccatagactgtaaaccagagcacttaaaacagaaccttttggcattcttaaaaagggaggggtgggtgtgtaagtcacagattttgttcattttctgaaagctaatttcaaaattatgttgttccttaaacactgtgagaggaagtcagagtgtccattcaggcatggcaaacaattagggttaagtgttacgagggagtgataaacacgtagtgtgagtcccagtgagccgccggttgtcctaacgctgctgtcttccctgtttgggacagcctgcttatcaatttctgaagcttagaacactttttttaatactgtgtcaagatctgtcagaatctgctatgtttcttgaccagtgcacataatgttttatgatttggatgtcagaggcttcattcttttggacatcatttgctttttatgttctgaaaaggatatggagagtagagctaaccatacttcacactcgagttgtatgagggactggggaggccttatatgtgtcaggcaggcattttttaaattttaatatcgtcaatattttcccccaaactgcccagtagaattcattgtattaattcttttgaaattacctttgaaaatagctattcctggagaatgtgcaagcttacataaggataaaggacaggggaggagtttgtaagccttgcagttccaataactaaccaacaggttattagacaaaagggaaggtgttttgtgcttctcagatgttgctggtttaggagtgtgtgatgatgcttgccagtgattttgtgttttggaaagggtaggtatcgaatgttaatcactttctaatgggtacctaaacagcaatgctgataaatgttcaaggaattattttcatcttagtttgttcttctcaaaaggcatcaaaaacaacttatttgaagctgcaatagagtgtagcattagcctgcatgtttctaggtcttctgccaagtgcttttctcagttgaaaactatttttcactagcaaaattggtattttatttcattacctgttagtaactacttcaatgatcatttcacaagaaaaagactataaattaagtagagaacaacatttttattgaacatttttggcttgcaatcaaactttgccactaaaaattaacttcataaaacactagtccgttatcaacttcttcacagagaaagtagctatactataccctacatatttatttatttattattctactatagcagaataacaaaacttgatgcattaagccagttctttgcaactgaaaattacctgtttctccttccctttcacactccatgtatatatgatcagcctctccattaaaaagaagctggacatgcaaatacatcatattatgttttctccatattttatgtttttctatgtatctgaatacagtgggataaataattgaaagtagtgttcctatggcattagtgtttttgtgagaagggtaaatgtagtgagaaaggttttttcatggcattaataagaaagcccttctgtaatatatatattattttgtaaacatttcactgaagggccaaaagttaaattataactaaatcactgtgttttcagaatgatatttaacaacaaacccgtggtcaaaccaaaatagtgggttgaagtgtattattcatcttttagtgcattggcaattgcaaaaaaaaaaaaggaatttaatataaggctatagagattaattcagtgtctaacatttgtatttatttaaatagttattgacctatgatgactttctagtcttaacattttatctttttattgttgttgttcttcctttcaaagatgtggttcttaataggttcactgaatgcacagttgaggcacttcttgtgacaccagttcccaagtagcgttaataattgggcctgtgtcataaaatgcacggatcattaataactaaatgtccctgacacttttcactacagggctggacttagtaactgaccaacttcggggggagggttggggcaagggggggtgggcgttagaacatgatcaaaaaatgtctccgctcagggatttatggtggattattgcagacagtgctaaaaatatagagcacaagacaagtttactaaattaaaattttattttttgagaaactgttatttgtataaattatcaagatttgtaggctttccttttgtagaaataattgttttatgtgccagagaatttcaattttgttttcaacaataaa

SEQ ID NO: 193153 - DNA, 6211 bp, Homo sapiens
  Payload ID: 18137
  Gene Name: transmembrane and tetratricopeptide repeat containing 2
  ENST ID: ENST00000549919
  CDS Start-End: 1806-4298
tctagagttatcaatctgaattataaattttgtaaaattattcacaaaagcacttattttgtaagtgtagtgtagaatgttagatgtatgacctataattaattccattaatcctcaaataaaactgtggaatcattttcctttcaaacagcagtttaaattcaaactgtattaccattagcataagaatagcttttaacaataattaaaatcctaatggtatcatgaaataattttagtttagttatccttttgatgtaaatatttatccagtgggagaacctgatttgttaaacattttatatgaatttgatttgagaaatgcacagcaccatataaatatatcactgtaggaggcagtgtagccataaggaaaacataccggattgagtgtcaagaactggtgtctgtatggtgctgtactgcacaagcttcatatgaccttaatttccgagcatcagtttcatcattggttaaaaaaaaagagatgacagtatcagacttgcctcacggctgtctgccaattaagtgaattagaaaattattttcaattatatagtgctgggcaaggtgaatgattgctattactgttgtcatcactgttgtttgaagcactgtgctttgggaagcaaatctggttcacatcttttgaacatttaaatgaagagaatgtgtctcagtgctctagtgtgtattaaaacagccttttaacaagaatgttttgaaccctgcccaatacctgcacatgcttttgttaatacttcattacataaaatgaccaagaagctgtcataagaatttaaaggaacatttaccctcatctttaaaatgtatcttaaaagagagataagattctaattacaaattttgaacagtttattttctctctatgaaaaatttccaagaatgatacaaaagcacttttatgtgaagaggatacactggaacattgaggtcttgatctcattttagtaactctctgatgtgattaattcataagcactgagttgtagctcattccttctggcaaaattccagcacttgattgttaccttataaacttttaataagagtaattttaaaaactgcacttgactcttgctttatgaaaagctggaaatgtaaaaagttaaaaatgcttgacaatttttctgagctctagtcagaaacagtggctatgcccttttatagatgacagcccaaaggcgagtttgtaaaacgataaataaattgtaaagatctatcgagtggcaacttggatggtttaatgcctatgggttagaaacccaggagttaatgtttaaagtgatttggataaatgtgaacatgtttaaatctttagtattattcctttaagccaaatgtgaacgatagttattttgacaaagtttgggttacctcgatagcctgatttttacagaagtaccgtgtatctcaaattgttaactgatgaatgggtggtgctgctggattatttcctgtgttttgtgtttttcttagttttaatttctttgttattcaagttatactatcacctcgtccaaagttgggtctcaggattagattaataaactaaccaagtaaatttgggaagtatgactaacttacataaagaaaataattggggttatttttttgtattattattttaaaatatgtaatcagcacttttgagaagctctcattttgttgaatctctaggcagacctttgtggttaagcatcatcctggaaattttttctgacagtcatttgaccaggtctttctgtttatactcagtgtcaaaacaacaacaacaaaaatgcatggaaccatctagttgcaggaaaacaagctcaggactcaggactcccactgattatacattatgccgtgctatcaagactaatcaggaccttctcccagaaactccatggacgcacattttctacaatgatttttgggggactcttctaacccacagtggcagccacaagtcctaccggccactctgcactctttcttttcgcctgaaccatgccattggagggttgaatccctggagctaccatcttgtcaatgtcctgttgcatgcagcagtcactggtctcttcacaagcttctccaagatcctccttggtgatggatactggacattcatggctggcttgatgtttgcttctcaccccattcacacggaggcagtggcaggaatcgtgggacgagccgatgtcggggccagtctcttctttctcctctccttgctctgctacattaaacactgttctacaagaggctactcagccagaacctggggctggttcctggggtcaggactgtgcgcaggatgcagcatgttgtggaaggaacaaggagtgactgttctcgcagtttcagcagtttatgatgtctttgtctttcacaggctgaaaataaaacagatattacctaccatttacaaaaggaagaacttgtcgcttttcctaagcattagtttgttaattttctggggttcctcccttttgggtgcccggttatactggatgggaaacaaaccaccaagcttttccaactcggacaaccccgctgctgattcggacagcctcctcacccgcactctcaccttcttctacttgccaaccaagaacctctggctgttgctatgtccagataccctcagttttgattggtcaatggatgctgtgcctctgctcaaaacagtttgtgactggagaaacctacacactgtggccttctatactggactccttctccttgcctactatggtttgaagagcccgagcgtagacagagaatgcaatgggaaaactgtaacaaatggcaagcagaatgcaaatggacatagctgcctttcagatgtggagtaccagaactcagagactaagtccagctttgcatccaaagtagaaaatggcattaaaaacgatgtatcacagagaacccagcttccttctacggagaacattgttgttctgtctttatctttgttaatcataccctttgttcctgccacgaacctgtttttctatgtcggctttgtaattgcagagcgagtattatatattcctagtatgggcttctgcctactgattacagtgggtgctagagccctttatgtcaaagtccaaaagcggttcctcaagagcttgattttttatgctacagctacactaattgttttttatggactcaagactgcgatcaggaatggagactggcagaatgaggaaatgctttatagatcagggataaaagtaaacccagctaaagcatggggtaaccttggaaatgttctgaagagtcagagcaaaatttctgaagctgaaagcgcctatagaaatgctttgtactaccgcagcaacatggctgacatgctttataatttagggctacttctccaggagaacagcaggtttgcagaagcactacattattataaattggccattgggagcaggcctaccctggcttctgcatatttaaataccggtattattctaatgaaccaaggaaggacggaagaagcccgacggacattcttaaagtgttcggagatcccagatgaaaacctaaaggaccctcatgcacacaagagctctgttaccagttgtttgtacaacctaggaaagctgtatcatgagcagggacactatgaggaagcccttagtgtatacaaggaagcaattcagaaaatgccaaggcagtttgccccacagagcttgtacaacatgatgggtgaagcatatatgcgtttaagcaaactccccgaagcagagcattggtatatggaatcactgagatccaagactgaccacatccctgctcatctcacctatgggaagctgctagctctaacaggtcgtaagagtgaggctgaaaagctcttcttgaaggctattgagctggatcccaccaaaggaaactgttacatgcattatggtcagtttcttctggaagaagctcgtctcatagaagcagctgagatggcaaaaaaagcagctgaactagacagcacagagtttgatgttgtcttcaatgctgcccacatgctcagacaggctagcctcaatgaagcagctgagaagtattatgatctggcagccaggctgaggcctaattatccggctgctttgatgaacctgggagccattctgcacctcaatggcagactccagaaggccgaggccaactacctgcgggccctgcagctcaagccagacgatgtcatcacacagtccaatctccgcaaactgtggaacatcatggaaaaacaaggcttaaagacttctaagacctgacacaggaggcagaagcccatcctcctccatttttaaaagctggcttccttagcagacagaacttcccagcagtgctatgacaagagctggtgttagacttcaagaccagggcagaggtcattgaggtcactaccgcttctggaagaatccactttgctgtaggcacagctgttaacaccaaaaaggggaaagccggaaacctcctggaggatgtcattgttacccatagactgtaaaccagagcacttaaaacagaaccttttggcattcttaaaaagggaggggtgggtgtgtaagtcacagattttgttcattttctgaaagctaatttcaaaattatgttgttccttaaacactgtgagaggaagtcagagtgtccattcaggcatggcaaacaattagggttaagtgttacgagggagtgataaacacgtagtgtgagtcccagtgagccgccggttgtcctaacgctgctgtcttccctgtttgggacagcctgcttatcaatttctgaagcttagaacactttttttaatactgtgtcaagatctgtcagaatctgctatgtttcttgaccagtgcacataatgttttatgatttggatgtcagaggcttcattcttttggacatcatttgctttttatgttctgaaaaggatatggagagtagagctaaccatacttcacactcgagttgtatgagggactggggaggccttatatgtgtcaggcaggcattttttaaattttaatatcgtcaatattttcccccaaactgcccagtagaattcattgtattaattcttttgaaattacctttgaaaatagctattcctggagaatgtgcaagcttacataaggataaaggacaggggaggagtttgtaagccttgcagttccaataactaaccaacaggttattagacaaaagggaaggtgttttgtgcttctcagatgttgctggtttaggagtgtgtgatgatgcttgccagtgattttgtgttttggaaagggtaggtatcgaatgttaatcactttctaatgggtacctaaacagcaatgctgataaatgttcaaggaattattttcatcttagtttgttcttctcaaaaggcatcaaaaacaacttatttgaagctgcaatagagtgtagcattagcctgcatgtttctaggtcttctgccaagtgcttttctcagttgaaaactatttttcactagcaaaattggtattttatttcattacctgttagtaactacttcaatgatcatttcacaagaaaaagactataaattaagtagagaacaacatttttattgaacatttttggcttgcaatcaaactttgccactaaaaattaacttcataaaacactagtccgttatcaacttcttcacagagaaagtagctatactataccctacatatttatttatttattattctactatagcagaataacaaaacttgatgcattaagccagttctttgcaactgaaaattacctgtttctccttccctttcacactccatgtatatatgatcagcctctccattaaaaagaagctggacatgcaaatacatcatattatgttttctccatattttatgtttttctatgtatctgaatacagtgggataaataattgaaagtagtgttcctatggcattagtgtttttgtgagaagggtaaatgtagtgagaaaggttttttcatggcattaataagaaagcccttctgtaatatatatattattttgtaaacatttcactgaagggccaaaagttaaattataactaaatcactgtgttttcagaatgatatttaacaacaaacccgtggtcaaaccaaaatagtgggttgaagtgtattattcatcttttagtgcattggcaattgcaaaaaaaaaaaa

SEQ ID NO: 193154 - DNA, 2682 bp, Homo sapiens
  Payload ID: 18137
  Gene Name: transmembrane and tetratricopeptide repeat containing 2
  ENST ID: ENST00000548305
  CDS Start-End: 587-2500
gggagctaataaacattgaatgtgcagcagctgccttggcggccggagtccgcccgagcgacaccggagcagtgcgcccgggaggcggcgaggggaggcggttcgccttgtccctcccacccgcgcctctttctctctcttcctccagctggtcccagagcccggcttggtccggtccctctgcccccatcccgcacccttccacctcctccgagtcccactcctcacctaggacgccccaaactgccatgggttagggtggggatcgcgacccgcgcgaaagaccagccctgcgcttccgccgggggacgcggagcccaaacgccgctcaccgcttgcgggcgccgggcatggggagtgtggtgtgagcccgcacccggggaggacgcaggagctgcggagacgggcgcgaggaggaggagaggagtcgtggattggaaggacccgagggagggagggtggggaagcgagggaaaagtgaagctgggaggagaaggcggcggaaggtggagattgatgcttctgttttttgttgccgctgctgccctcgcgctgggagccgagccggagggaaggcggtggagagatgattgcagagttggtgagcagcgctctggggctcgccttgtatctcaacaccctgagtgcggatttctgctatgatgacagccgtgctatcaagactaatcaggaccttctcccagaaactccatggacgcacattttctacaatgatttttgggggactcttctaacccacagtggcagccacaagtcctaccggccactctgcactctttcttttcgcctgaaccatgccattggagggttgaatccctggagctaccatcttgtcaatgtcctgttgcatgcagcagtcactggtctcttcacaagcttctccaagatcctccttggtgatggatactggacattcatggctggcttgatgtttgcttctcaccccattcacacggaggcagtggcaggaatcgtgggacgagccgatgtcggggccagtctcttctttctcctctccttgctctgctacattaaacactgttctacaagaggctactcagccagaacctggggctggttcctggggtcaggactgtgcgcaggatgcagcatgttgtggaaggaacaaggagtgactgttctcgcagtttcagcagtttatgatgtctttgtctttcacaggctgaaaataaaacagatattacctaccatttacaaaaggaagaacttgtcgcttttcctaagcattagtttgttaattttctggggttcctcccttttgggtgcccggttatactggatgggaaacaaaccaccaagcttttccaactcggacaaccccgctgctgattcggacagcctcctcacccgcactctcaccttcttctacttgccaaccaagaacctctggctgttgctatgtccagataccctcagttttgattggtcaatggatgctgtgcctctgctcaaaacagtttgtgactggagaaacctacacactgtggccttctatactggactccttctccttgcctactatggtttgaagagcccgagcgtagacagagaatgcaatgggaaaactgtaacaaatggcaagcagaatgcaaatggacatagctgcctttcagatgtggagtaccagaactcagagactaagtccagctttgcatccaaagtagaaaatggcattaaaaacgatgtatcacagagaacccagcttccttctacggagaacattgttgttctgtctttatctttgttaatcataccctttgttcctgccacgaacctgtttttctatgtcggctttgtaattgcagagcgagtattatatattcctagtatgggcttctgcctactgattacagtgggtgctagagccctttatgtcaaagtccaaaagcggttcctcaagagcttgattttttatgctacagctacactaattgttttttatggactcaagactgcgatcaggaatggagactggcagaatgaggaaatgctttatagatcagggataaaagtaaacccagctaaagcatggggtaaccttggaaatgttctgaagagtcagagcaaaatttctgaagctgaaagcgcctatagaaatgctttgtactaccgcagcaacatggctgacatgctttataatttagggctacttctccaggagaacagcaggtttgcagaagcactacattattataaattggccattgggagcaggcctaccctggcttctgcatatttaaataccggtattattctaatgaaccaaggaaggacggaagaagcccgacggacattcttaaagtgttcggagatcccagatgaaaacctaaaggaccctcatgcacacaagagctctgttaccagttgtttgtacaacctaggaaagctgtatcatgagcagggacactatgaggtctggccaatgcctctctgtccttttccctcccccttgttctgatccagtctcagtggtttgtaacctacagcctcctttgagcctatgtcctttgaacaactaatatgtatacacgttaaactattgtcctttgagaaactaatacatgatgacattggaatggttttttgatcaaatttgtttagaaaaagcttctgctaaataaaaatttaatagatttcttt

SEQ ID NO: 193155 - DNA, 4527 bp, Homo sapiens
  Payload ID: 18137
  Gene Name: transmembrane and tetratricopeptide repeat containing 2
  ENST ID: ENST00000546590
  CDS Start-End: 107-214
aagctgggaggagaaggcggcggaaggtggagattgatgcttctgttttttgttgccgctgctgccctcgcgctgggagccgagccggagggaaggcggtggagagatgattgcagagttggtgagcagcgctctggggctcgccttgtatctcaacaccctgagtgcggatttctgctatgatgacagaggaagaacttgtcgcttttcctaagcattagtttgttaattttctggggttcctcccttttgggtgcccggttatactggatgggaaacaaaccaccaagcttttccaactcggacaaccccgctgctgattcggacagcctcctcacccgcactctcaccttcttctacttgccaaccaagaacctctggctgttgctatgtccagataccctcagttttgattggtcaatggatgctgtgcctctgctcaaaacagtttgtgactggagaaacctacacactgtggccttctatactggactccttctccttgcctactatggtttgaagagcccgagcgtagacagagaatgcaatgggaaaactgtaacaaatggcaagcagaatgcaaatggacatagctgcctttcagatgtggagtaccagaactcagagactaagtccagctttgcatccaaagtagaaaatggcattaaaaacgatgtatcacagagaacccagcttccttctacggagaacattgttgttctgtctttatctttgttaatcataccctttgttcctgccacgaacctgtttttctatgtcggctttgtaattgcagagcgagtattatatattcctagtatgggcttctgcctactgattacagtgggtgctagagccctttatgtcaaagtccaaaagcggttcctcaagagcttgattttttatgctacagctacactaattgttttttatggactcaagactgcgatcaggaatggagactggcagaatgaggaaatgctttatagatcagggataaaagtaaacccagctaaagcatggggtaaccttggaaatgttctgaagagtcagagcaaaatttctgaagctgaaagcgcctatagaaatgctttgtactaccgcagcaacatggctgacatgctttataatttagggctacttctccaggagaacagcaggtttgcagaagcactacattattataaattggccattgggagcaggcctaccctggcttctgcatatttaaataccggtattattctaatgaaccaaggaaggacggaagaagcccgacggacattcttaaagtgttcggagatcccagatgaaaacctaaaggaccctcatgcacacaagagctctgttaccagttgtttgtacaacctaggaaagctgtatcatgagcagggacactatgaggaagcccttagtgtatacaaggaagcaattcagaaaatgccaaggcagtttgccccacagagcttgtacaacatgatgggtgaagcatatatgcgtttaagcaaactccccgaagcagagcattggtatatggaatcactgagatccaagactgaccacatccctgctcatctcacctatgggaagctgctagctctaacaggtcgtaagagtgaggctgaaaagctcttcttgaaggctattgagctggatcccaccaaaggaaactgttacatgcattatggtcagtttcttctggaagaagctcgtctcatagaagcagctgagatggcaaaaaaagcagctgaactagacagcacagagtttgatgttgtcttcaatgctgcccacatgctcagacaggctagcctcaatgaagcagctgagaagtattatgatctggcagccaggctgaggcctaattatccggctgctttgatgaacctgggagccattctgcacctcaatggcagactccagaaggccgaggccaactacctgcgggccctgcagctcaagccagacgatgtcatcacacagtccaatctccgcaaactgtggaacatcatggaaaaacaaggcttaaagacttctaagacctgacacaggaggcagaagcccatcctcctccatttttaaaagctggcttccttagcagacagaacttcccagcagtgctatgacaagagctggtgttagacttcaagaccagggcagaggtcattgaggtcactaccgcttctggaagaatccactttgctgtaggcacagctgttaacaccaaaaaggggaaagccggaaacctcctggaggatgtcattgttacccatagactgtaaaccagagcacttaaaacagaaccttttggcattcttaaaaagggaggggtgggtgtgtaagtcacagattttgttcattttctgaaagctaatttcaaaattatgttgttccttaaacactgtgagaggaagtcagagtgtccattcaggcatggcaaacaattagggttaagtgttacgagggagtgataaacacgtagtgtgagtcccagtgagccgccggttgtcctaacgctgctgtcttccctgtttgggacagcctgcttatcaatttctgaagcttagaacactttttttaatactgtgtcaagatctgtcagaatctgctatgtttcttgaccagtgcacataatgttttatgatttggatgtcagaggcttcattcttttggacatcatttgctttttatgttctgaaaaggatatggagagtagagctaaccatacttcacactcgagttgtatgagggactggggaggccttatatgtgtcaggcaggcattttttaaattttaatatcgtcaatattttcccccaaactgcccagtagaattcattgtattaattcttttgaaattacctttgaaaatagctattcctggagaatgtgcaagcttacataaggataaaggacaggggaggagtttgtaagccttgcagttccaataactaaccaacaggttattagacaaaagggaaggtgttttgtgcttctcagatgttgctggtttaggagtgtgtgatgatgcttgccagtgattttgtgttttggaaagggtaggtatcgaatgttaatcactttctaatgggtacctaaacagcaatgctgataaatgttcaaggaattattttcatcttagtttgttcttctcaaaaggcatcaaaaacaacttatttgaagctgcaatagagtgtagcattagcctgcatgtttctaggtcttctgccaagtgcttttctcagttgaaaactatttttcactagcaaaattggtattttatttcattacctgttagtaactacttcaatgatcatttcacaagaaaaagactataaattaagtagagaacaacatttttattgaacatttttggcttgcaatcaaactttgccactaaaaattaacttcataaaacactagtccgttatcaacttcttcacagagaaagtagctatactataccctacatatttatttatttattattctactatagcagaataacaaaacttgatgcattaagccagttctttgcaactgaaaattacctgtttctccttccctttcacactccatgtatatatgatcagcctctccattaaaaagaagctggacatgcaaatacatcatattatgttttctccatattttatgtttttctatgtatctgaatacagtgggataaataattgaaagtagtgttcctatggcattagtgtttttgtgagaagggtaaatgtagtgagaaaggttttttcatggcattaataagaaagcccttctgtaatatatatattattttgtaaacatttcactgaagggccaaaagttaaattataactaaatcactgtgttttcagaatgatatttaacaacaaacccgtggtcaaaccaaaatagtgggttgaagtgtattattcatcttttagtgcattggcaattgcaaaaaaaaaaaaggaatttaatataaggctatagagattaattcagtgtctaacatttgtatttatttaaatagttattgacctatgatgactttctagtcttaacattttatctttttattgttgttgttcttcctttcaaagatgtggttcttaataggttcactgaatgcacagttgaggcacttcttgtgacaccagttcccaagtagcgttaataattgggcctgtgtcataaaatgcacggatcattaataactaaatgtccctgacacttttcactacagggctggacttagtaactgaccaacttcggggggagggttggggcaagggggggtgggcgttagaacatgatcaaaaaatgtctccgctcagggatttatggtggattattgcagacagtgctaaaaatatagagcacaagacaagtttactaaattaaaattttattttttgagaaactgttatttgtataaattatcaagatttgtaggctttccttttgtagaaataattgttttatgtgccagagaatttcaattttgttttcaacaataaagcattgataagaaatata

SEQ ID NO: 193156 - DNA, 7203 bp, Homo sapiens
  Payload ID: 18138
  Gene Name: transmembrane and tetratricopeptide repeat containing 3
  Uniprot ID: Q6ZXV5
  ENST ID: ENST00000266712
  CDS Start-End: 221-2965
atgcaacgcgtaagactgcgacggtaccggggcggcggggaaggaccgagaggcgggaggagcagcggctcaggcgcctgcaaactggtggcctgaacgaggtagaccatgactgtggtttcagtggcgtcactcgctgggctgctcttcctgaggttttcctaagccatcccctggcggaaccgcccccagtttttgtccagaagtgcttatagaaaagatggctaatattaacctaaaagaaataaccttaatagtaggtgtggttactgcctgctattggaacagcctcttttgtggttttgtttttgatgatgtttcagcaatactggataacaaagacttgcatccatctacacctttaaaaactttatttcaaaatgacttctggggaacccctatgtctgaggagagaagccacaagtcttaccgtcccttaacagtattgacatttcgcttaaattatttgttaagtgaactaaaaccaatgtcatatcatctcctgaatatgatttttcatgctgtggttagtgtgatatttctcaaagtatgcaaactttttctggacaacaagagtagtgtgattgcttctttactttttgcagtgcacccaatacacacagaagcagtaacaggagttgttggaagagcagaacttttgtcatctatcttttttctagcagcttttttgtcatataccagatcaaaaggaccagacaattccataatatggactccaattgccttgacagtgtttttagtggctgttgcaacattatgtaaagaacaaggaataacagttgtaggaatttgctgtgtgtatgaagtgtttattgcccaggggtatactttgccattactatgtactactgctggacagtttctccgtggaaagggtagcattccattttctatgctgcagacactagtaaaactcattgtcttgatgttcagtacattattacttgttgtgattagagtccaggttattcaatcccaacttccagtattcaccaggtttgataacccagctgctgtaagcccaactcctacaaggcaactaacttttaactacctccttcctgtgaatgcttggttgttattaaatccttcagagctctgctgtgattggaccatgggaacaataccacttatagagtcattactagatattcgaaatctggccacatttactttcttttgttttctggggatgttgggagtattcagtatcagatactctggtgattcctccaagactgttttaatggcgctttgtttaatggcattaccatttattcctgcatcgaaccttttttttccagttggatttgttgttgccgagcgagtattatatgttcccagcatggggttctgtattttggtagcccatggatggcagaaaatatcaacaaaaagtgtatttaaaaagctatcctggatttgtctgtctatggtgatactcactcattccttaaaaacattccacagaaattgggattgggagtctgaatatacattgtttatgtcagccttgaaggtaaataaaaataatgccaaactttggaataatgtgggtcatgctctggaaaatgaaaagaactttgagagagctttgaaatacttcttacaggctacccatgttcagccagatgatattggtgcccatatgaatgtaggaagaacttataaaaatttaaatagaaccaaagaagctgaagaatcttacatgatggctaaatcactgatgcctcaaattattcctggtaaaaaatatgcagccagaattgcccctaaccacctaaatgtttatatcaatctggctaacctgatccgagcaaatgagtcccgactggaagaagcagatcagctgtaccgtcaagcaataagcatgaggcccgacttcaagcaggcttacattagcagaggagaattgcttttaaaaatgaataaacctcttaaagcaaaggaagcatatcttaaagcactagagctggacagaaataatgcagatctttggtacaacttggcaattgtacatattgaacttaaagaaccaaatgaagccctaaaaaactttaatcgtgctctggaactaaatccaaagcataaactagcattattcaactctgctatagtaatgcaagaatcaggtgaggttaaactcagacctgaagctagaaaacgacttctaagttatataaatgaagagccactagatgctaatgggtatttcaatttgggaatgcttgccatggatgacaaaaaggacaatgaagcagagatttggatgaagaaagccataaagttacaagccgacttccgaagtgctttgtttaatctggctctcctgtattcccagactgcaaaggaattaaaggctttgccaattttggaggagttactcagatactaccctgatcatatcaagggcctcattttaaaaggagacattctgatgaatcaaaagaaagatatactaggagcaaaaaaatgttttgaaaggattttggagatggatccaagcaatgtgcaaggaaaacacaatctttgtgttgtttattttgaagaaaaagacttattaaaagctgaaagatgccttcttgaaacactggcattagcaccacatgaagaatatattcagcgccatttgaatatagtcagggataagatttcctcatctagttttatagagccaatattcccaaccagtaagatttcaagtgtggaaggaaagaaaattccaactgaaagtgtaaaagaaattagaggtgaatccagacaaacacaaatagtaaaaacaagtgataataaaagtcagtctaaatccaacaaacaattaggaaaaaatggagacgaagagacaccccacaaaacaacaaaagacatcaaagaaattgagaagaaaagagttgctgctttaaaaagactagaagagattgaacgtattttaaatggtgaataacattaatatttatcgtgacaatggtatcaaagaacatcaatccgtatcatgtgattgcttttactgggagctttgaaaaaaagttcaagggttcctaatggtcaatcatgagctgccttgaagtaggatcaaaataagattttcattaaagacctgtattatcccaggatgtatattatgtatcgctgttttcagagtgtgggtgaatatagcagaaatattacagcggaagtgacaaatttacaacttttattatagaaagaaggtgtttctggcaatgtaatctttactgctctcaattaaaaataattttgaggcctgaatgataatcccttgaggacaaatccaacatgtgctggtttattctgttaattcccatttatttgcctacttcatttttcttgcacctcttagaatctaactatgaattgaaaacacttaagtaattctgtttaatcaagggatttacactacaaaagaatgctggctttttttatgttgtattccttagttgagttttagaaggaatgcttgatgaaacattttaaaataagtcatgacatgttagcttgagaatgtattttcataattgtatacttgtttttaactttaaatgtaatttttaatcaggtaaagtttgacacatgtatagctacatacacacatttttaatggtgctcatatatactgtattttttgttgtttagttttacttattgagagtgtcacaacatgaatcacataatcatgattttttttttttacttttactccccaaattattcatgtttcttagatcgtagtcattgagaagtcccaataactctaaacttttgagttataacgtagtaaacttctctttcatctttgtgttagctctgtagtcttaacctggattttaatttttttgtttccaaagtcacaattgaattattcttagataccttaagccactgaattcagttctgtttgactgaaagcaaaacaacgtgacagtttattttcaaacactaacttcttgatattttgttatggtatatctttttattaaatatttattttgactaagctttcataaaatatttgaagctattttaatcatcaagtatggaaaacaaattactattgcattttcctatatatgcatatattatggattaaccagaattgtatcatttttggcctaatgtctggatataaaagataattagcctactatagtattaataaatttttcagttggtttgggcaaatttaaacctgaaaaataggttaaaaagtagttacaaattaaacttactaatttatacctgattttttttcttgaattaaagtacattttaaatgagctttataataccttaaaaagttggttctaatttaaaatatgaaagctctggctatcatcctgggatagtaatttctaattatatagtatttcaaaactatatattttttagttcctttgagataactaatttctaattatatatgtttcaaaaaccatatcctgtattttttttaagaattgttttataaataggtcataagatacaaggtctgcattagaagacccactcttactaggttccctaaggatctgccatagatttttttttttttttttttttttttaggtagtttaaagcaagcactgataccagtgggagttggtcttgatctaggagattctgttaagcatccaaaaacaatgcctaatttcagttcttaggttatggcttgtgactccagataaaagatggagaatacctcatgtactgtgacttgaaaatgaattcttaaaattcttaggctctctccatgtatctttcttaaggaaaagtttctgagtgtgatctctcttttgccatagtatcaagtggagggtagttcagaaaagttaataggaaatcttttgtgacagcagactataatagaagtttgagtaatattttaataaatttatataattcaaatgataaaaatgtatcaatgttatccaatgatttttattaaaaaattaccttattattagaactgtgcctattacataaaaagtgctcatgtatttgaattttaaataatttatttaaatcaagaccaccataagtcattaataatttaataattgttttaaatcagtggttttcaaccctcacttcatattagaatcatctgaggacttttaatatggaatccacctcataacaattaagtctaaatttctggaagatggagccatgcttgtttttccaaaagctctttgagtgattctaatttgtagtcagagttgaagaccactgctctaaattagtgcaggaaaatgcttttatttctcccatgttaacttttaaaactagtaatgtacccagttaagttttgatggtttaaattccactaaagaacatattcttctaataactagcatttattacatgaaatttaagagtttaagttccatcaaactagcccttgtgtaagattattatttcttctctataacttcaaaatagatatttcattcaaactgttcaggtgagaaaacataatggatttttttttttttcctctggagctgcctgttcagtgagatggaggaggtgggcacatttaaggtcagttcactaacctatggttcagagttctgatcatatggaagtttggaaaagagagcttatcacaggtttgtatgctggtgaatggatagttttaattctcactgtctcaaaagagaatcagctctccagcagttctagaaaagctttgacaatccccaaggggcagtgttaccttactccttcactgcttcttagaaggtagaattaagtttctggaattgcacctacatgttttcttattaacattcagaattgggaatattaatttttccagtgagtagttttctgaaattggtaacttggagagtaaaataacgtattttgcttttcaattttgtgtttgtttacttttatgtaaaaatttgatatgtgaattacacagttctaataaaacctcatgccttttcattacatctaatttgaactctcaacttcatgttacagaatgctttaaagatgctttaatgaaaagtattaagaaaatatatagatttgtatgtcagtttatacttcagaaatccatatatttgtcatatttatttttttagaaacctcctaattggataactagatggtatttaaaatgaatgcccaaaaatatcttgtacctttgtccaaaagtttatctgttggaagccgccagccattcatgtagagagtttataagaaaataatttaaaattgtatgcattttatattactatggtatctgtgtaccatatttctaagtattcattattaaattggtacttcttaaaaccataacctggcttgccttttagtgttaaaaaaatacaacattgtatatagagatttcttttatgaagaagagctgacgtaatttattagcagtgatctgagaaagacattaaataagtttctgagagtgatacattttcaaacatgaggagtgacaaccaccaaattaagaaaaggaaacaactcagacttggaattttatacgaatttcatttctatatgtgcctggtattgcctctggcataacttagaggaaattgttctacctatatgtcctcagtttcttcatctacaagttgggaaaaacattttcctcttaaaattgtgaagaggatttatatatttatatgatatattgtatatattaatatatttaaattgcttagagtttctagcacatagcaaataataaatattagttattagtataaacataaggcttaaagtcttggatttgatgcatatgacttaatttgtatttgtgctagtagctgtaatgtcagtgacaggataacaagcaaatgattagaaatctaatagtaatgcttgttcctttgctatctatgctaacaagtacatagatagcctaagataaattatacttaggatgaagctaaaatgcataactgagacaccttaaaattgtactaccttgtgctgttcactgccatcagggaggtagcataaaatgaaagataaagtctgaagactggatccaggcaaattcatgttctttctttgtaactcactttcttcgtcaacatttctgtgactcaatggatagcatatttccatcaagtagcacgtataacgtgatgctttcatgtttctgccttaaataaaataaccctcaaaaaacca

SEQ ID NO: 193157 - DNA, 574 bp, Homo sapiens
  Payload ID: 18138
  Gene Name: transmembrane and tetratricopeptide repeat containing 3
  ENST ID: ENST00000549011
  CDS Start-End: 130-574
atgcaacgcgtaagactgcgacggtaccggggcggcggggaaggaccgagaggcgggaggagcagcggctcaggcgcctgcaaactggtggcctgaacgagtttttgtccagaagtgcttatagaaaagatggctaatattaacctaaaagaaataaccttaatagtaggtgtggttactgcctgctattggaacagcctcttttgtggttttgtttttgatgatgtttcagcaatactggataacaaagacttgcatccatctacacctttaaaaactttatttcaaaatgacttctggggaacccctatgtctgaggagagaagccacaagtcttaccgtcccttaacagtattgacatttcgcttaaattatttgttaagtgaactaaaaccaatgtcatatcatctcctgaatatgatttttcatgctgtggttagtgtgatatttctcaaagtatgcaaactttttctggacaacaagagtagtgtgattgcttctttactttttgcagtgcacccaatacacacagaagcagtaacaggagttgttggaagagcagaacttttgtcat

SEQ ID NO: 193158 - DNA, 646 bp, Homo sapiens
  Payload ID: 18138
  Gene Name: transmembrane and tetratricopeptide repeat containing 3
  ENST ID: ENST00000551088
  CDS Start-End: 210-646
aagactgcgacggtaccggggcggcggggaaggaccgagaggcgggaggagcagcggctcaggcgcctgcaaactggtggcctgaacgaggtagaccatgactgtggtttcagtggcgtcactcgctgggctgctcttcctgaggttttcctaagccatcccctggcggaaccgcccccagtttttgtccagaagtgcttatagaaaagatggctaatattaacctaaaagaaataaccttaatagtaggtgtggttactgcctgctattggaacagcctcttttgtggttttgtttttgatgatgtttcagcaatactggataacaaagacttgcatccatctacacctttaaaaactttatttcaaaatgacttctggggaacccctatgtctgaggtaacaggagttgttggaagagcagaacttttgtcatctatcttttttctagcagcttttttgtcatataccagatcaaaaggaccagacaattccataatatggactccaattgccttgacagtgtttttagtggctgttgcaacattatgtaaagaacaaggaataacagttgtaggaatttgctgtgtgtatgaagtgtttattgcccaggggtatactttgccattactatgtactactgctgg

SEQ ID NO: 193159 - DNA, 1842 bp, Homo sapiens
  Payload ID: 18138
  Gene Name: transmembrane and tetratricopeptide repeat containing 3
  ENST ID: ENST00000547034
  CDS Start-End: 221-1441
atgcaacgcgtaagactgcgacggtaccggggcggcggggaaggaccgagaggcgggaggagcagcggctcaggcgcctgcaaactggtggcctgaacgaggtagaccatgactgtggtttcagtggcgtcactcgctgggctgctcttcctgaggttttcctaagccatcccctggcggaaccgcccccagtttttgtccagaagtgcttatagaaaagatggctaatattaacctaaaagaaataaccttaatagtaggtgtggttactgcctgctattggaacagcctcttttgtggttttgtttttgatgatgtttcagcaatactggataacaaagacttgcatccatctacacctttaaaaactttatttcaaaatgacttctggggaacccctatgtctgaggagagaagccacaagtcttaccgtcccttaacagtattgacatttcgcttaaattatttgttaagtgaactaaaaccaatgtcatatcatctcctgaatatgatttttcatgctgtggttagtgtgatatttctcaaagtatgcaaactttttctggacaacaagagtagtgtgattgcttctttactttttgcagtgcacccaatacacacagaagcagtaacaggagttgttggaagagcagaacttttgtcatctatcttttttctagcagcttttttgtcatataccagatcaaaaggaccagacaattccataatatggactccaattgccttgacagtgtttttagtggctgttgcaacattatgtaaagaacaaggaataacagttgtaggaatttgctgtgtgtatgaagtgtttattgcccaggggtatactttgccattactatgtactactgctggacagtttctccgtggaaagggtagcattccattttctatgctgcagacactagtaaaactcattgtcttgatgttcagtacattattacttgttgtgattagagtccaggttattcaatcccaacttccagtattcaccaggtttgataacccagctgctgtaagcccaactcctacaaggcaactaacttttaactacctccttcctgtgaatgcttggttgttattaaatccttcagagctctgctgtgattggaccatgggaacaataccacttatagagtcattactagatattcgaaatctggccacatttactttcttttgttttctggggatgttgggagtattcagtatcagatactctggtgattcctccaagactgttttaatggcgctttgtttaatggcattaccatttattcctgcatcgaaccttttttttccagttggatttgttgttgccgagcgagtattatatgttcccagcatggggttctgtattttggtagcccatggatggcagaaaatatcaacaaaaagcctgagacagaacaaactttgagtcagatccaaatgaaaacaaggatgttactgagaataaagtctcaaatgaccattgccacttccatattcagtgaactaagataatagtcatcctacttaatgtatttaaaaagctatcctggatttgtctgtctatggtgatactcactcattccttaaaaacattccacagaaattgggattgggagtctgaatatacattgtttatgtcagccttgaaggtaaataaaaataatgccaaactttggaataatgtgggtcatgctctggaaaatgaaaagaactttgagagagctttgaaatacttcttacaggctacccatgttcagccagatgatattggtgcccatatgaatgtaggaagaacttataaaaatttaaatagaaccaaagaagctg

SEQ ID NO: 193160 - DNA, 3602 bp, Homo sapiens
  Payload ID: 18139
  Gene Name: transmembrane and tetratricopeptide repeat containing 4
  Uniprot ID: Q5T4D3
  ENST ID: ENST00000342624
  CDS Start-End: 260-2542
agagtttccgcacccgggagggagatgcggccggggctcaggctccttgcagttgtaatttagattcgagaagtggtttatcctttgactggaaaagaaaagtagctgcagtattcccccagcacttgctgagagcatgccgtatgccaggctgtgaggctcgagagacaagcagtggaagagttgcggcctgtttcatctctggattgtaaatctgagcctccttctggcccctggaaggggacagcatcaccatggaatgattcctaaccagcataatgctggagccgggagccaccaacctgcagttttcagaatggccgtgttggacactgatttggatcacattcttccatcttctgttcttcctccattctgggctaagttagtagtgggatcggttgccattgtgtgttttgcacgcagctatgatggagactttgtctttgatgactcagaagctattgttaacaataaggacctccaagcagaaacgcccctgggggacctgtggcatcatgacttctggggcagtagactgagcagcaacaccagccacaagtcctaccggcctctcaccgtcctgactttcaggattaactactacctctcgggaggcttccaccccgtgggctttcacgtggtcaacatcctcctgcacagtggcatctctgtcctcatggtggacgtcttctcggttctgtttggcggcctgcagtacaccagtaaaggccggaggctgcacctcgcccccagggcgtccctgctggccgcgctgctgtttgctgtccatcctgtgcacaccgagtgtgttgctggtgttgtcggccgtgcagacctcctgtgtgccctgttcttcttgttatctttccttggctactgtaaagcatttagagaaagtaacaaggagggagcgcattcttccaccttctgggtgctgctgagtatctttctgggagcagtggccatgctgtgcaaagagcaagggatcactgtgctgggtttaaatgcggtatttgacatcttggtgataggcaaattcaatgttctggaaattgtccagaaggtactacataaggacaagtcattagagaatctcggcatgctcaggaacgggggcctcctcttcagaatgaccctgctcacctctggaggggctgggatgctctacgtgcgctggaggatcatgggcacgggcccgccggccttcaccgaggtggacaacccggcctcctttgctgacagcatgctggtgagggccgtaaactacaattactactattcattgaatgcctggctgctgctgtgtccctggtggctgtgttttgattggtcaatgggctgcatccccctcattaagtccatcagcgactggagggtaattgcacttgcagcactctggttctgcctaattggcctgatatgccaagccctgtgctctgaagacggccacaagagaaggatccttactctgggcctgggatttctcgttatcccatttctccccgcgagtaacctgttcttccgagtgggcttcgtggtcgcagagcgtgtcctctacctccccagcgttgggtactgtgtgctgctgacttttggattcggagccctgagcaaacataccaagaaaaagaaactcattgccgctgtcgtgctgggaatcttattcatcaacacgctgagatgtgtgctgcgcagcggcgagtggcggagtgaggaacagcttttcagaagtgctctgtctgtgtgtcccctcaatgctaaggttcactacaacattggcaaaaacctggctgataaaggcaaccagacagctgccatcagatactaccgggaagctgtaagattaaatcccaagtatgttcatgccatgaataatcttggaaatatcttaaaagaaaggaatgagctacaggaagctgaggagctgctgtctttggctgttcaaatacagccagactttgccgctgcgtggatgaatctaggcatagtgcagaatagcctgaaacggtttgaagcagcagagcaaagttaccggacagcaattaaacacagaaggaaatacccagactgttactacaacctcgggcgtctgtatgcagatctcaatcgccacgtggatgccttgaatgcgtggagaaatgccaccgtgctgaaaccagagcacagcctggcctggaacaacatgattatactcctcgacaatacaggtaatttagcccaagctgaagcagttggaagagaggcactggaattaatacctaatgatcactctctcatgttctcgttggcaaacgtgctggggaaatcccagaaatacaaggaatctgaagctttattcctcaaggcaattaaagcaaatccaaatgctgcaagttaccatggtaatttggctgtgctttatcatcgttggggacatctagacttggccaagaaacactatgaaatctccttgcagcttgaccccacggcatcaggaactaaggagaattacggtctgctgagaagaaagctagaactaatgcaaaagaaagctgtctgatcctgtttccttcatgttttgagtttgagtgtgtgtgtgcatgaggcatatcattaatagtatgtggttacatttaaccatttaaaagtcttagacatgttattttactgatttttttctatgaaaacaaagacatgcaaaaagattatagcaccagcaatatactcttgaatgcgtgatatgatttttcattgaaattgtattttttcagacaactcaaatgtaattctaaaattccaaaaatgtcttttttaattaaacagaaaaagagaaaaaattatcttgagcaacttttagtagaattgagcttacatttgggatctgagccttgtcgtgtatggactagcactattaaacttcaattatgaccaagaaaggatacactggcccctacaatttgtataaatattgaacatgtctatatattagcatttttatttaatgacaaagcaaattaagtttttttatctcttttttttaaaacaacatactgtgaactttgtaaggaaatatttatttgtatttttatgttttgaatagggcaaataatcgaatgaggaatggaagttttaacatagtatatctatatgcttttccccataggaagaaattgactcttgcagtttttggatgctctgacttgtgcaatttcaatacacaggagattatgtaatgtaatattttacataagcggttactatcaattgaaagttcaagccatgctttaggcaagagcaggcagcctcacatctttatttttgttacatccaaggtgaagagggcaacacatctgtgtaagctgctttttagtgtgtttatctgaaggccgttttccattttgcttaatgtaactacagacattatccagaaaatgcaaaattttctatcaaatggagccacattcggggaattcgtggtatttttaagaattgagttgttcctgctgttttttatttgatccaaacaatgttttgttttgttcttctctgtatgctgttgacctaatgatttatgcaatctctgtaatttcttatgcagtaaaattactacacaaactagc

SEQ ID NO: 193161 - DNA, 3483 bp, Homo sapiens
  Payload ID: 18139
  Gene Name: transmembrane and tetratricopeptide repeat containing 4
  Uniprot ID: Q5T4D3
  ENST ID: ENST00000376234
  CDS Start-End: 191-2416
gcgggaggcgcggcgcggggggggtcgggtgcgcggcgggcggcccctccccctgccaggtccgggcgggtgcctggagccgccagagtttccgcacccgggagggagatgcggccggggctcaggctccttgcagattcctaaccagcataatgctggagccgggagccaccaacctgcagttttcagaatggccgtgttggacactgatttggatcacattcttccatcttctgttcttcctccattctgggctaagttagtagtgggatcggttgccattgtgtgttttgcacgcagctatgatggagactttgtctttgatgactcagaagctattgttaacaataaggacctccaagcagaaacgcccctgggggacctgtggcatcatgacttctggggcagtagactgagcagcaacaccagccacaagtcctaccggcctctcaccgtcctgactttcaggattaactactacctctcgggaggcttccaccccgtgggctttcacgtggtcaacatcctcctgcacagtggcatctctgtcctcatggtggacgtcttctcggttctgtttggcggcctgcagtacaccagtaaaggccggaggctgcacctcgcccccagggcgtccctgctggccgcgctgctgtttgctgtccatcctgtgcacaccgagtgtgttgctggtgttgtcggccgtgcagacctcctgtgtgccctgttcttcttgttatctttccttggctactgtaaagcatttagagaaagtaacaaggagggagcgcattcttccaccttctgggtgctgctgagtatctttctgggagcagtggccatgctgtgcaaagagcaagggatcactgtgctgggtttaaatgcggtatttgacatcttggtgataggcaaattcaatgttctggaaattgtccagaaggtactacataaggacaagtcattagagaatctcggcatgctcaggaacgggggcctcctcttcagaatgaccctgctcacctctggaggggctgggatgctctacgtgcgctggaggatcatgggcacgggcccgccggccttcaccgaggtggacaacccggcctcctttgctgacagcatgctggtgagggccgtaaactacaattactactattcattgaatgcctggctgctgctgtgtccctggtggctgtgttttgattggtcaatgggctgcatccccctcattaagtccatcagcgactggagggtaattgcacttgcagcactctggttctgcctaattggcctgatatgccaagccctgtgctctgaagacggccacaagagaaggatccttactctgggcctgggatttctcgttatcccatttctccccgcgagtaacctgttcttccgagtgggcttcgtggtcgcagagcgtgtcctctacctccccagcgttgggtactgtgtgctgctgacttttggattcggagccctgagcaaacataccaagaaaaagaaactcattgccgctgtcgtgctgggaatcttattcatcaacacgctgagatgtgtgctgcgcagcggcgagtggcggagtgaggaacagcttttcagaagtgctctgtctgtgtgtcccctcaatgctaaggttcactacaacattggcaaaaacctggctgataaaggcaaccagacagctgccatcagatactaccgggaagctgtaagattaaatcccaagtatgttcatgccatgaataatcttggaaatatcttaaaagaaaggaatgagctacaggaagctgaggagctgctgtctttggctgttcaaatacagccagactttgccgctgcgtggatgaatctaggcatagtgcagaatagcctgaaacggtttgaagcagcagagcaaagttaccggacagcaattaaacacagaaggaaatacccagactgttactacaacctcgggcgtctgtatgcagatctcaatcgccacgtggatgccttgaatgcgtggagaaatgccaccgtgctgaaaccagagcacagcctggcctggaacaacatgattatactcctcgacaatacaggtaatttagcccaagctgaagcagttggaagagaggcactggaattaatacctaatgatcactctctcatgttctcgttggcaaacgtgctggggaaatcccagaaatacaaggaatctgaagctttattcctcaaggcaattaaagcaaatccaaatgctgcaagttaccatggtaatttggctgtgctttatcatcgttggggacatctagacttggccaagaaacactatgaaatctccttgcagcttgaccccacggcatcaggaactaaggagaattacggtctgctgagaagaaagctagaactaatgcaaaagaaagctgtctgatcctgtttccttcatgttttgagtttgagtgtgtgtgtgcatgaggcatatcattaatagtatgtggttacatttaaccatttaaaagtcttagacatgttattttactgatttttttctatgaaaacaaagacatgcaaaaagattatagcaccagcaatatactcttgaatgcgtgatatgatttttcattgaaattgtattttttcagacaactcaaatgtaattctaaaattccaaaaatgtcttttttaattaaacagaaaaagagaaaaaattatcttgagcaacttttagtagaattgagcttacatttgggatctgagccttgtcgtgtatggactagcactattaaacttcaattatgaccaagaaaggatacactggcccctacaatttgtataaatattgaacatgtctatatattagcatttttatttaatgacaaagcaaattaagtttttttatctcttttttttaaaacaacatactgtgaactttgtaaggaaatatttatttgtatttttatgttttgaatagggcaaataatcgaatgaggaatggaagttttaacatagtatatctatatgcttttccccataggaagaaattgactcttgcagtttttggatgctctgacttgtgcaatttcaatacacaggagattatgtaatgtaatattttacataagcggttactatcaattgaaagttcaagccatgctttaggcaagagcaggcagcctcacatctttatttttgttacatccaaggtgaagagggcaacacatctgtgtaagctgctttttagtgtgtttatctgaaggccgttttccattttgcttaatgtaactacagacattatccagaaaatgcaaaattttctatcaaatggagccacattcggggaattcgtggtatttttaagaattgagttgttcctgctgttttttatttgatccaaacaatgttttgttttgttcttctctgtatgctgttgacctaatgatttatgcaatctctgtaatttcttatgcagtaaaattactacacaaactagcatgaaaa

SEQ ID NO: 193162 - DNA, 2101 bp, Homo sapiens
  Payload ID: 18139
  Gene Name: transmembrane and tetratricopeptide repeat containing 4
  Uniprot ID: Q5T4D3
  ENST ID: ENST00000328767
  CDS Start-End: 86-1978
gagatgcggccggggctcaggctccttgcagattcctaaccagcataatgctggagccgggagccaccaacctgcagttttcagaatggccgtgttggacactgatttggatcacattcttccatcttctgttcttcctccattctgggctaagttagtagtgggatcggttgccattgtgtgttttgcacgcagctatgatggagactttgtctttgatgactcagaagctattgttaacaataaggttgctggtgttgtcggccgtgcagacctcctgtgtgccctgttcttcttgttatctttccttggctactgtaaagcatttagagaaagtaacaaggagggagcgcattcttccaccttctgggtgctgctgagtatctttctgggagcagtggccatgctgtgcaaagagcaagggatcactgtgctgggtttaaatgcggtatttgacatcttggtgataggcaaattcaatgttctggaaattgtccagaaggtactacataaggacaagtcattagagaatctcggcatgctcaggaacgggggcctcctcttcagaatgaccctgctcacctctggaggggctgggatgctctacgtgcgctggaggatcatgggcacgggcccgccggccttcaccgaggtggacaacccggcctcctttgctgacagcatgctggtgagggccgtaaactacaattactactattcattgaatgcctggctgctgctgtgtccctggtggctgtgttttgattggtcaatgggctgcatccccctcattaagtccatcagcgactggagggtaattgcacttgcagcactctggttctgcctaattggcctgatatgccaagccctgtgctctgaagacggccacaagagaaggatccttactctgggcctgggatttctcgttatcccatttctccccgcgagtaacctgttcttccgagtgggcttcgtggtcgcagagcgtgtcctctacctccccagcgttgggtactgtgtgctgctgacttttggattcggagccctgagcaaacataccaagaaaaagaaactcattgccgctgtcgtgctgggaatcttattcatcaacacgctgagatgtgtgctgcgcagcggcgagtggcggagtgaggaacagcttttcagaagtgctctgtctgtgtgtcccctcaatgctaaggttcactacaacattggcaaaaacctggctgataaaggcaaccagacagctgccatcagatactaccgggaagctgtaagattaaatcccaagtatgttcatgccatgaataatcttggaaatatcttaaaagaaaggaatgagctacaggaagctgaggagctgctgtctttggctgttcaaatacagccagactttgccgctgcgtggatgaatctaggcatagtgcagaatagcctgaaacggtttgaagcagcagagcaaagttaccggacagcaattaaacacagaaggaaatacccagactgttactacaacctcgggcgtctgtatgcagatctcaatcgccacgtggatgccttgaatgcgtggagaaatgccaccgtgctgaaaccagagcacagcctggcctggaacaacatgattatactcctcgacaatacaggtaatttagcccaagctgaagcagttggaagagaggcactggaattaatacctaatgatcactctctcatgttctcgttggcaaacgtgctggggaaatcccagaaatacaaggaatctgaagctttattcctcaaggcaattaaagcaaatccaaatgctgcaagttaccatggtaatttggctgtgctttatcatcgttggggacatctagacttggccaagaaacactatgaaatctccttgcagcttgaccccacggcatcaggaactaaggagaattacggtctgctgagaagaaagctagaactaatgcaaaagaaagctgtctgatcctgtttccttcatgttttgagtttgagtgtgtgtgtgcatgaggcatatcattaatagtatgtggttacatttaaccatttaaaagtcttagacatgttattttactgatttttttctatg

SEQ ID NO: 193163 - DNA, 584 bp, Homo sapiens
  Payload ID: 18139
  Gene Name: transmembrane and tetratricopeptide repeat containing 4
  ENST ID: ENST00000440120
  CDS Start-End: 107-451
agagtttccgcacccgggagggagatgcggccggggctcaggctccttgcagattcctaaccagcataatgctggagccgggagccaccaacctgcagttttcagaatggccgtgttggacactgatttggatcacattcttccatcttctgttcttcctccattctgggctaagttagtagtgggatcggttgccattgtgtgttttgcacgcagctatgatggagactttgtctttgatgactcagaagctattgttaacaataagcacaccctgctgtggaggctccacttaatcaaatatttagaacctcgttggtgttcatttcctgttcaaagggaggaaaagatcctctgccgaagcccttcacagctgaccgggtacttctgtaagagtgtagaagaaggacctccaagcagaaacgcccctgggggacctgtggcatcatgacttctggggcagtagactgagcagcaacaccagccacaagtcctaccggcctctcaccgtcctgactttcaggattaactactacctctcgggaggcttccaccccgtgggctttcacgtggtcaacatcctc

SEQ ID NO: 193164 - DNA, 639 bp, Homo sapiens
  Payload ID: 18139
  Gene Name: transmembrane and tetratricopeptide repeat containing 4
  ENST ID: ENST00000423847
  CDS Start-End: 478-639
gcgggaggcgcggcgcggggggggtcgggtgcgcggcgggcggcccctccccctgccaggtccgggcgggtgcctggagccgccagagtttccgcacccgggagggagatgcggccggggctcaggctccttgcagttgtaatttagattcgagaagtggtttatcctttgactggaaaagaaaagtagctgcagtattcccccagcacttgctgagagcatgccgtatgccaggctgtgaggctcgagagacaagcagtggaagagttgcggcctgtttcatctctggattgtaaatctgagcctccttctggcccctggaaggggacagcatcaccatggaatggtgtgtcccgttgcctgttggatctgtctccatcttcactcagacagaaggctatagaaagatgcctgtgacttcagattcctaaccagcataatgctggagccgggagccaccaacctgcagttttcagaatggccgtgttggacactgatttggatcacattcttccatcttctgttcttcctccattctgggctaagttagtagtgggatcggttgccattgtgtgttttgcacgcagctatgatggagactttgtctttgatgactcagaagctattgttaacaataag

SEQ ID NO: 193165 - DNA, 580 bp, Homo sapiens
  Payload ID: 18139
  Gene Name: transmembrane and tetratricopeptide repeat containing 4
  ENST ID: ENST00000475272
  CDS Start-End: 362-580
aacccggcttcctcctctcccgccgggtccgtctgtccctgcgcctccttcgccgccgactagcgccccctggcctgacgtcaccggcgcgtccgccaatgagctgaggagggacttggctgtggcctgaaagtgacgggagcagcagccaatgttgtaatttagattcgagaagtggtttatcctttgactggaaaagaaaagtagctgcagtattcccccagcacttgctgagagcatgccgtatgccaggctgtgaggctcgagagacaagcagtggaagagttgcggcctgtttcatctctggattgtaaatctgagcctccttctggcccctggaaggggacagcatcaccatggaatgattcctaaccagcataatgctggagccgggagccaccaacctgcagttttcagaatggccgtgttggacactgatttggatcacattcttccatcttctgttcttcctccattctgggctaagttagtagtgggatcggttgccattgtgtgttttgcacgcagctatgatggagactttgtctttgatgactcagaagctattgttaacaataag

SEQ ID NO: 193166 - DNA, 1353 bp, Homo sapiens
  Payload ID: 18140
  Gene Name: transmembrane and ubiquitin-like domain containing 1
  Uniprot ID: Q9BVT8
  ENST ID: ENST00000297533
  CDS Start-End: 144-884
aatgccccgggccgcggcggcggggaaggaggggtgcttcaggtgcctgcgacctccgcgcctcccgcccggaagtgcccgaggggccgcgatggagctgggggagccgggcgctcggtagcgcggcgggcaaggcaggcgccatgaccctgattgaaggggtgggtgatgaggtgaccgtccttttctcggtgcttgcctgccttctggtgctggcccttgcctgggtctcaacgcacaccgctgagggcggggacccactgccccagccgtcagggaccccaacgccatcccagcccagcgcagccatggcagctaccgacagcatgagaggggaggccccaggggcagagacccccagcctgagacacagaggtcaagctgcacagccagagcccagcacggggttcacagcaacaccgccagccccggactccccgcaggagcccctcgtgctacggctgaaattcctcaatgattcagagcaggtggccagggcctggccccacgacaccattggctccttgaaaaggacccagtttcccggccgggaacagcaggtgcgactcatctaccaagggcagctgctaggcgacgacacccagaccctgggcagccttcacctccctcccaactgcgttctccactgccacgtgtccacgagagtcggtcccccaaatcccccctgcccgccggggtccgagcccggcccctccgggctggaaatcggcagcctgctgctgcccctgctgctcctgctgttgctgctgctctggtactgccagatccagtaccggcccttctttcccctgaccgccactctgggcctggccggcttcaccctgctcctcagtctcctggcctttgccatgtaccgcccgtagtgcctccgcgggcgcttggcagcgtcgccggcccctccggaccttgctccccgcgccgcggcgggagctgctgcctgcccaggcccgcctctccggcctgcctcttcccgccgccctggagcccagccctgcgccgcagaggactcccgggactggcggaggccccgccctgcgaccgccggggctcggggccacctcccggggctgctgaccctcagcccgcactgggagtgggctcctcggggtcgggcatctgctgtcgctgcctcggccccgggcagagccgggccgccccgggggcccgtcttagtgttctgccggaggacccagccgcctccaatccctgacagctccttgggctgagttggggacgccaggtcggtgggaggctggtgaaggggagcggggaggggcagaggagttccccggaacccgtgcagattaaagtaactgtgaagttttcactctt

SEQ ID NO: 193167 - DNA, 1563 bp, Homo sapiens
  Payload ID: 18140
  Gene Name: transmembrane and ubiquitin-like domain containing 1
  Uniprot ID: Q9BVT8
  ENST ID: ENST00000392818
  CDS Start-End: 359-1099
gtgccgcgggtggggtttaggtgaaccgtaacgcggggggcgggggtgggggcacagaggctctacccccacctcttagaaactttagcagcggagtagatgagcctggggtgaagtcggtgaaggagtagacacactggggtgaagtgggcaggagaatagatacgcttgggggtgaagtttggttggggtgaagtttaggagaggcgttgcttaggcccttaccttgggatagggtttgggtgagttgggagctggttgaagacctcgagctcagatgacagaaagttaggacttgggattcggcgatgggaaggggcacccggagctcggtagcgcggcgggcaaggcaggcgccatgaccctgattgaaggggtgggtgatgaggtgaccgtccttttctcggtgcttgcctgccttctggtgctggcccttgcctgggtctcaacgcacaccgctgagggcggggacccactgccccagccgtcagggaccccaacgccatcccagcccagcgcagccatggcagctaccgacagcatgagaggggaggccccaggggcagagacccccagcctgagacacagaggtcaagctgcacagccagagcccagcacggggttcacagcaacaccgccagccccggactccccgcaggagcccctcgtgctacggctgaaattcctcaatgattcagagcaggtggccagggcctggccccacgacaccattggctccttgaaaaggacccagtttcccggccgggaacagcaggtgcgactcatctaccaagggcagctgctaggcgacgacacccagaccctgggcagccttcacctccctcccaactgcgttctccactgccacgtgtccacgagagtcggtcccccaaatcccccctgcccgccggggtccgagcccggcccctccgggctggaaatcggcagcctgctgctgcccctgctgctcctgctgttgctgctgctctggtactgccagatccagtaccggcccttctttcccctgaccgccactctgggcctggccggcttcaccctgctcctcagtctcctggcctttgccatgtaccgcccgtagtgcctccgcgggcgcttggcagcgtcgccggcccctccggaccttgctccccgcgccgcggcgggagctgctgcctgcccaggcccgcctctccggcctgcctcttcccgccgccctggagcccagccctgcgccgcagaggactcccgggactggcggaggccccgccctgcgaccgccggggctcggggccacctcccggggctgctgaccctcagcccgcactgggagtgggctcctcggggtcgggcatctgctgtcgctgcctcggccccgggcagagccgggccgccccgggggcccgtcttagtgttctgccggaggacccagccgcctccaatccctgacagctccttgggctgagttggggacgccaggtcggtgggaggctggtgaaggggagcggggaggggcagaggagttccccggaacccgtgcagattaaagtaactgtgaagttttca

SEQ ID NO: 193168 - DNA, 1549 bp, Homo sapiens
  Payload ID: 18140
  Gene Name: transmembrane and ubiquitin-like domain containing 1
  Uniprot ID: Q9BVT8
  ENST ID: ENST00000462940
  CDS Start-End: 346-1086
ggttggggtgaagtttaggagaggcgttgcttaggcccttaccttgggatagggtttgggtgagttgggagctggttgaagacctcgagctcagatgacagaaagttaggacttgggattcggcgatgggaaggggcacccggaggcaagtttggggcgactgggaggcagagaagccggtaccctggggtgggtgaggggacggaggctgaggacggtgggagcgtcgcggtggggtgagggcaggaccctgtggaggttccagggctcctggccagggggcccgggcctcacgggctctttgtgcctctccagctcggtagcgcggcgggcaaggcaggcgccatgaccctgattgaaggggtgggtgatgaggtgaccgtccttttctcggtgcttgcctgccttctggtgctggcccttgcctgggtctcaacgcacaccgctgagggcggggacccactgccccagccgtcagggaccccaacgccatcccagcccagcgcagccatggcagctaccgacagcatgagaggggaggccccaggggcagagacccccagcctgagacacagaggtcaagctgcacagccagagcccagcacggggttcacagcaacaccgccagccccggactccccgcaggagcccctcgtgctacggctgaaattcctcaatgattcagagcaggtggccagggcctggccccacgacaccattggctccttgaaaaggacccagtttcccggccgggaacagcaggtgcgactcatctaccaagggcagctgctaggcgacgacacccagaccctgggcagccttcacctccctcccaactgcgttctccactgccacgtgtccacgagagtcggtcccccaaatcccccctgcccgccggggtccgagcccggcccctccgggctggaaatcggcagcctgctgctgcccctgctgctcctgctgttgctgctgctctggtactgccagatccagtaccggcccttctttcccctgaccgccactctgggcctggccggcttcaccctgctcctcagtctcctggcctttgccatgtaccgcccgtagtgcctccgcgggcgcttggcagcgtcgccggcccctccggaccttgctccccgcgccgcggcgggagctgctgcctgcccaggcccgcctctccggcctgcctcttcccgccgccctggagcccagccctgcgccgcagaggactcccgggactggcggaggccccgccctgcgaccgccggggctcggggccacctcccggggctgctgaccctcagcccgcactgggagtgggctcctcggggtcgggcatctgctgtcgctgcctcggccccgggcagagccgggccgccccgggggcccgtcttagtgttctgccggaggacccagccgcctccaatccctgacagctccttgggctgagttggggacgccaggtcggtgggaggctggtgaaggggagcggggaggggcagaggagttccccggaacccgtgcagattaaagtaactgtgaagttttc

SEQ ID NO: 193169 - DNA, 899 bp, Homo sapiens
  Payload ID: 18140
  Gene Name: transmembrane and ubiquitin-like domain containing 1
  Uniprot ID: Q9BVT8
  ENST ID: ENST00000482202
  CDS Start-End: 94-834
ccgcccagggccccggtcgggccgggatcgccgtgccctcctgcggcttcggggggcgggaagctcggtagcgcggcgggcaaggcaggcgccatgaccctgattgaaggggtgggtgatgaggtgaccgtccttttctcggtgcttgcctgccttctggtgctggcccttgcctgggtctcaacgcacaccgctgagggcggggacccactgccccagccgtcagggaccccaacgccatcccagcccagcgcagccatggcagctaccgacagcatgagaggggaggccccaggggcagagacccccagcctgagacacagaggtcaagctgcacagccagagcccagcacggggttcacagcaacaccgccagccccggactccccgcaggagcccctcgtgctacggctgaaattcctcaatgattcagagcaggtggccagggcctggccccacgacaccattggctccttgaaaaggacccagtttcccggccgggaacagcaggtgcgactcatctaccaagggcagctgctaggcgacgacacccagaccctgggcagccttcacctccctcccaactgcgttctccactgccacgtgtccacgagagtcggtcccccaaatcccccctgcccgccggggtccgagcccggcccctccgggctggaaatcggcagcctgctgctgcccctgctgctcctgctgttgctgctgctctggtactgccagatccagtaccggcccttctttcccctgaccgccactctgggcctggccggcttcaccctgctcctcagtctcctggcctttgccatgtaccgcccgtagtgcctccgcgggcgcttggcagcgtcgccggcccctccggaccttgctccccgcgccgcggcggg

SEQ ID NO: 193170 - DNA, 882 bp, Homo sapiens
  Payload ID: 18140
  Gene Name: transmembrane and ubiquitin-like domain containing 1
  Uniprot ID: Q9BVT8
  ENST ID: ENST00000476627
  CDS Start-End: 89-829
gcgcggagttagtcctccgcggagtggggttgaggggacctggagggggccgagctggctcggtagcgcggcgggcaaggcaggcgccatgaccctgattgaaggggtgggtgatgaggtgaccgtccttttctcggtgcttgcctgccttctggtgctggcccttgcctgggtctcaacgcacaccgctgagggcggggacccactgccccagccgtcagggaccccaacgccatcccagcccagcgcagccatggcagctaccgacagcatgagaggggaggccccaggggcagagacccccagcctgagacacagaggtcaagctgcacagccagagcccagcacggggttcacagcaacaccgccagccccggactccccgcaggagcccctcgtgctacggctgaaattcctcaatgattcagagcaggtggccagggcctggccccacgacaccattggctccttgaaaaggacccagtttcccggccgggaacagcaggtgcgactcatctaccaagggcagctgctaggcgacgacacccagaccctgggcagccttcacctccctcccaactgcgttctccactgccacgtgtccacgagagtcggtcccccaaatcccccctgcccgccggggtccgagcccggcccctccgggctggaaatcggcagcctgctgctgcccctgctgctcctgctgttgctgctgctctggtactgccagatccagtaccggcccttctttcccctgaccgccactctgggcctggccggcttcaccctgctcctcagtctcctggcctttgccatgtaccgcccgtagtgcctccgcgggcgcttggcagcgtcgccggcccctccggaccttgctccccg

SEQ ID NO: 193171 - DNA, 550 bp, Homo sapiens
  Payload ID: 18140
  Gene Name: transmembrane and ubiquitin-like domain containing 1
  ENST ID: ENST00000492838
  CDS Start-End: 95-550
gtgaagtcggtgaaggagtagacacactggggtgaagtgggcaggagaatagatacgcttggggctcggtagcgcggcgggcaaggcaggcgccatgaccctgattgaaggggtgggtgatgaggtgaccgtccttttctcggtgcttgcctgccttctggtgctggcccttgcctgggtctcaacgcacaccgctgagggcggggacccactgccccagccgtcagggaccccaacgccatcccagcccagcgcagccatggcagctaccgacagcatgagaggggaggccccaggggcagagacccccagcctgagacacagaggtcaagctgcacagccagagcccagcacggggttcacagcaacaccgccagccccggactccccgcaggagcccctcgtgctacggctgaaattcctcaatgattcagagcaggtggccagggcctggccccacgacaccattggctccttgaaaaggacccagtttcccggccgggaacagcaggtgcgactcatctaccaagggcagctgctaggcgacgac

SEQ ID NO: 193172 - DNA, 584 bp, Homo sapiens
  Payload ID: 18140
  Gene Name: transmembrane and ubiquitin-like domain containing 1
  ENST ID: ENST00000488752
  CDS Start-End: 73-584
gtttgctgtgggggaagcctgggaagcagtcctgtgccgcggctcggtagcgcggcgggcaaggcaggcgccatgaccctgattgaaggggtgggtgatgaggtgaccgtccttttctcggtgcttgcctgccttctggtgctggcccttgcctgggtctcaacgcacaccgctgagggcggggacccactgccccagccgtcagggaccccaacgccatcccagcccagcgcagccatggcagctaccgacagcatgagaggggaggccccaggggcagagacccccagcctgagacacagaggtcaagctgcacagccagagcccagcacggggttcacagcaacaccgccagccccggactccccgcaggagcccctcgtgctacggctgaaattcctcaatgattcagagcaggtggccagggcctggccccacgacaccattggctccttgaaaaggacccagtttcccggccgggaacagcaggtgcgactcatctaccaagggcagctgctaggcgacgacacccagaccctgggcagccttcacctccctcccaactgcgttctccactgccacgt

SEQ ID NO: 193173 - DNA, 2418 bp, Homo sapiens
  Payload ID: 18141
  Gene Name: transmembrane and ubiquitin-like domain containing 2
  Uniprot ID: Q71RG4
  ENST ID: ENST00000319511
  CDS Start-End: 651-1556
cccgccccgaagtttgaggggtgtggacggtttgtgacccccttagccgaccctactcctcactggccgggacaactggtcttatcacggaggctggggccaggcagcccttcggttcgggtgggcccatggaccccagtccaacgccgagggaataggaccatccaaaagcggaaccttcgcctcagaaaaagggtgcgggacccctcctcaccgtgcggtcacggtacggacagggtagatcacaggctgagggacagagcaaagacccctgaggccggacacctggggtcctgccgggcccctccccacgagagttccctgtgtctgtgccaatcgttttcgtctttctttgccgcagtttcttttcctgtaaatcatggttaataacattaaccttcttaccatcaggggttagttgtggttgtgataaataattactaccgttattaagcaattgcaatttgcagtgtgccaggcactgtgccaagtattttgcttcgatgatttcacgtcatcttcaaaacaacctcatgagggctgggtcagttagaacctaaacaaactagagacctggttgcaacccctcaggctctgctgatgctgtccccctttgttcctgcagcgtggaccctgccagcagccaggccatggagctctctgatgtcaccctcattgagggtgtgggtaatgaggtgatggtggtggcaggtgtggtggtgctgattctagccttggtcctagcttggctctctacctacgtagcagacagcggtagcaaccagctcctgggcgctattgtgtcagcaggcgacacatccgtcctccacctggggcatgtggaccacctggtggcaggccaaggcaaccccgagccaactgaactcccccatccatcagagggtaatgatgagaaggctgaagaggcgggtgaaggtcggggagactccactggggaggctggagctgggggtggtgttgagcccagccttgagcatctccttgacatccaaggcctgcccaaaagacaagcaggtgcaggcagcagcagtccagaggcccccctgagatctgaggatagcacctgcctccctcccagccctggcctcatcactgtgcggctcaaattcctcaatgataccgaggagctggctgtggctaggccagaggataccgtgggtgccctgaagagcaaatacttccctggacaagaaagccagatgaaactgatctaccagggccgcctgctacaagacccagcccgcacactgcgttctctgaacattaccgacaactgtgtgattcactgccaccgctcacccccagggtcagctgttccaggcccctcagcctccttggccccctcggccactgagccacccagccttggtgtcaatgtgggcagcctcatggtgcctgtctttgtggtgctgttgggtgtggtctggtacttccgaatcaattaccgccaattcttcacagcacctgccactgtctccctggtgggagtcaccgtcttcttcagcttcctagtatttgggatgtatggacgataaggacataggaagaaaatgaaaggcatggtctttctcctttacggcctccccacttttcctggccagagctgggcccaagggccggggagggaggggtggaaaggatgtgatggaaatctcctccataggacacaggaggcaagtatgcggcctccccttctcatccacaggagtacagatgtccctcccgtgcgagcacaactcaggtagaaatgaggatgtcatcttccttcacttttagggtcctctgaaggagttcaaagctgctggccaagctcagtggggagcctgggctctgagattccctcccacctgtggttctgactcttcccagtgtcctgcatgtctgcccccagcacccagggctgcctgcaagggcagctcagcatggccccagcacaactccgtagggagcctggagtatccttccatttctcagccaaatactcatcttttgagactgaaatcacactggcgggaatgaagattgtgccagccttctcttatgggcacctagccgccttcaccttcttcctctaccccttagcaggaatagggtgtcctcccttctttcaaagcactttgcttgcattttattttatttttttaagagtccttcatagagctcagtcaggaaggggatggggcaccaagccaagcccccagcattgggagcggccaggccacagctgctgctcccgtagtcctcaggctgtaagcaagagacagcactggcccttggccagcgtcctaccctgcccaactccaaggactgggtatggattgctgggccctaggctcttgcttctggggctattggagggtcagtgtctgtgactgaataaagttccattttgtggtc

SEQ ID NO: 193174 - DNA, 1921 bp, Homo sapiens
  Payload ID: 18141
  Gene Name: transmembrane and ubiquitin-like domain containing 2
  Uniprot ID: Q71RG4
  ENST ID: ENST00000357984
  CDS Start-End: 150-1055
gaagccggaagagaccggaccctgaacagaatcgcagattgccagcccttttcccgacccctacggaaagacgagtccaggggccgtcctggcgaggtcaaaacatttagtctggtcttttcagcgtggaccctgccagcagccaggccatggagctctctgatgtcaccctcattgagggtgtgggtaatgaggtgatggtggtggcaggtgtggtggtgctgattctagccttggtcctagcttggctctctacctacgtagcagacagcggtagcaaccagctcctgggcgctattgtgtcagcaggcgacacatccgtcctccacctggggcatgtggaccacctggtggcaggccaaggcaaccccgagccaactgaactcccccatccatcagagggtaatgatgagaaggctgaagaggcgggtgaaggtcggggagactccactggggaggctggagctgggggtggtgttgagcccagccttgagcatctccttgacatccaaggcctgcccaaaagacaagcaggtgcaggcagcagcagtccagaggcccccctgagatctgaggatagcacctgcctccctcccagccctggcctcatcactgtgcggctcaaattcctcaatgataccgaggagctggctgtggctaggccagaggataccgtgggtgccctgaagagcaaatacttccctggacaagaaagccagatgaaactgatctaccagggccgcctgctacaagacccagcccgcacactgcgttctctgaacattaccgacaactgtgtgattcactgccaccgctcacccccagggtcagctgttccaggcccctcagcctccttggccccctcggccactgagccacccagccttggtgtcaatgtgggcagcctcatggtgcctgtctttgtggtgctgttgggtgtggtctggtacttccgaatcaattaccgccaattcttcacagcacctgccactgtctccctggtgggagtcaccgtcttcttcagcttcctagtatttgggatgtatggacgataaggacataggaagaaaatgaaaggcatggtctttctcctttacggcctccccacttttcctggccagagctgggcccaagggccggggagggaggggtggaaaggatgtgatggaaatctcctccataggacacaggaggcaagtatgcggcctccccttctcatccacaggagtacagatgtccctcccgtgcgagcacaactcaggtagaaatgaggatgtcatcttccttcacttttagggtcctctgaaggagttcaaagctgctggccaagctcagtggggagcctgggctctgagattccctcccacctgtggttctgactcttcccagtgtcctgcatgtctgcccccagcacccagggctgcctgcaagggcagctcagcatggccccagcacaactccgtagggagcctggagtatccttccatttctcagccaaatactcatcttttgagactgaaatcacactggcgggaatgaagattgtgccagccttctcttatgggcacctagccgccttcaccttcttcctctaccccttagcaggaatagggtgtcctcccttctttcaaagcactttgcttgcattttattttatttttttaagagtccttcatagagctcagtcaggaaggggatggggcaccaagccaagcccccagcattgggagcggccaggccacagctgctgctcccgtagtcctcaggctgtaagcaagagacagcactggcccttggccagcgtcctaccctgcccaactccaaggactgggtatggattgctgggccctaggctcttgcttctggggctattggagggtcagtgtctgtgactgaataaagttccattttgtggtcctgc

SEQ ID NO: 193175 - DNA, 1580 bp, Homo sapiens
  Payload ID: 18141
  Gene Name: transmembrane and ubiquitin-like domain containing 2
  ENST ID: ENST00000446571
  CDS Start-End: 424-1218
ataacagcttccgggagaagccggaagagaccggaccctgaacagaatcgcagattgccagcccttttcccgacccctacggaaagacgagtccaggggccgtcctggcgaggtcaaaacatttagtctggtcttttcagtgtgccaggcactgtgccaagtattttgcttcgatgatttcacgtcatcttcaaaacaacctcatgagataattctttgagcaactactggggcattatattggacacttcagtaccaagagaaatacatacgatccttgtctaccaggagtctaatagaaagatggacagggctgggtcagttagaacctaaacaaactagagacctggttgcaacccctcaggctctgctgatgctgtccccctttgttcctgcagcgtggaccctgccagcagccaggccatggagctctctgatgtcaccctcattgagggtgtgggtaatgaggtgatggtggtggcaggtgtggtggtgctgattctagccttggtcctagcttggctctctacctacgtagcagacagcggtagcaaccagctcctgggcgctattgtgtcagcaggcgacacatccgtcctccacctggggcatgtggaccacctggtggcaggccaaggcaaccccgagccaactgaactcccccatccatcagagggcctgcccaaaagacaagcaggtgcaggcagcagcagtccagaggcccccctgagatctgaggatagcacctgcctccctcccagccctggcctcatcactgtgcggctcaaattcctcaatgataccgaggagctggctgtggctaggccagaggataccgtgggtgccctgaagagcaaatacttccctggacaagaaagccagatgaaactgatctaccagggccgcctgctacaagacccagcccgcacactgcgttctctgaacattaccgacaactgtgtgattcactgccaccgctcacccccagggtcagctgttccaggcccctcagcctccttggccccctcggccactgagccacccagccttggtgtcaatgtgggcagcctcatggtgcctgtctttgtggtgctgttgggtgtggtctggtacttccgaatcaattaccgccaattcttcacagcacctgccactgtctccctggtgggagtcaccgtcttcttcagcttcctagtatttgggatgtatggacgataaggacataggaagaaaatgaaaggcatggtctttctcctttacggcctccccacttttcctggccagagctgggcccaagggccggggagggaggggtggaaaggatgtgatggaaatctcctccataggacacaggaggcaagtatgcggcctccccttctcatccacaggagtacagatgtccctcccgtgcgagcacaactcaggtagaaatgaggatgtcatcttccttcacttttagggtcctctgaaggagttcaaagctgctggccaagctcagtggggagcctgggctctgagattccctcccacctgtggttctgactcttcccagtgtcctgcatgtctgcccccagcaccca

SEQ ID NO: 193176 - DNA, 1953 bp, Homo sapiens
  Payload ID: 18141
  Gene Name: transmembrane and ubiquitin-like domain containing 2
  Uniprot ID: Q71RG4
  ENST ID: ENST00000538716
  CDS Start-End: 154-1119
ccggaagagaccggaccctgaacagaatcgcagattgccagcccttttcccgacccctacggaaagacgagtccaggggccgtcctggcgaggtcaaaacatttagtctggtcttttcagtgtgccaggcactgtgccaagtattttgcttcgatgatttcacgtcatcttcaaaacaacctcatgagcgtggaccctgccagcagccaggccatggagctctctgatgtcaccctcattgagggtgtgggtaatgaggtgatggtggtggcaggtgtggtggtgctgattctagccttggtcctagcttggctctctacctacgtagcagacagcggtagcaaccagctcctgggcgctattgtgtcagcaggcgacacatccgtcctccacctggggcatgtggaccacctggtggcaggccaaggcaaccccgagccaactgaactcccccatccatcagagggtaatgatgagaaggctgaagaggcgggtgaaggtcggggagactccactggggaggctggagctgggggtggtgttgagcccagccttgagcatctccttgacatccaaggcctgcccaaaagacaagcaggtgcaggcagcagcagtccagaggcccccctgagatctgaggatagcacctgcctccctcccagccctggcctcatcactgtgcggctcaaattcctcaatgataccgaggagctggctgtggctaggccagaggataccgtgggtgccctgaagagcaaatacttccctggacaagaaagccagatgaaactgatctaccagggccgcctgctacaagacccagcccgcacactgcgttctctgaacattaccgacaactgtgtgattcactgccaccgctcacccccagggtcagctgttccaggcccctcagcctccttggccccctcggccactgagccacccagccttggtgtcaatgtgggcagcctcatggtgcctgtctttgtggtgctgttgggtgtggtctggtacttccgaatcaattaccgccaattcttcacagcacctgccactgtctccctggtgggagtcaccgtcttcttcagcttcctagtatttgggatgtatggacgataaggacataggaagaaaatgaaaggcatggtctttctcctttacggcctccccacttttcctggccagagctgggcccaagggccggggagggaggggtggaaaggatgtgatggaaatctcctccataggacacaggaggcaagtatgcggcctccccttctcatccacaggagtacagatgtccctcccgtgcgagcacaactcaggtagaaatgaggatgtcatcttccttcacttttagggtcctctgaaggagttcaaagctgctggccaagctcagtggggagcctgggctctgagattccctcccacctgtggttctgactcttcccagtgtcctgcatgtctgcccccagcacccagggctgcctgcaagggcagctcagcatggccccagcacaactccgtagggagcctggagtatccttccatttctcagccaaatactcatcttttgagactgaaatcacactggcgggaatgaagattgtgccagccttctcttatgggcacctagccgccttcaccttcttcctctaccccttagcaggaatagggtgtcctcccttctttcaaagcactttgcttgcattttattttatttttttaagagtccttcatagagctcagtcaggaaggggatggggcaccaagccaagcccccagcattgggagcggccaggccacagctgctgctcccgtagtcctcaggctgtaagcaagagacagcactggcccttggccagcgtcctaccctgcccaactccaaggactgggtatggattgctgggccctaggctcttgcttctggggctattggagggtcagtgtctg

SEQ ID NO: 193177 - DNA, 1569 bp, Homo sapiens
  Payload ID: 18141
  Gene Name: transmembrane and ubiquitin-like domain containing 2
  Uniprot ID: Q71RG4
  ENST ID: ENST00000590235
  CDS Start-End: 86-370
ggaaagacgagtccaggggccgtcctggcgaggtcaaaacatttagtctggtcttttcagcgtggaccctgccagcagccaggccatggagctctctgatgtcaccctcattgagggtgtgggtaatgaggtgatggtggtggcaggtgtggtggtgctgattctagccttggtcctagcttggctctctacctacgtagcagacagcggtagcaaccagctcctgggcgctattgtgtcagcaggcgacacatccgtcctccacctggggcatgtggaccacctggtggcaggccaaggcaaccccgagccaactgaactcccccatccatcagaggcaaatacttccctggacaagaaagccagatgaaactgatctaccagggccgcctgctacaagacccagcccgcacactgcgttctctgaacattaccgacaactgtgtgattcactgccaccgctcacccccagggtcagctgttccaggcccctcagcctccttggccccctcggccactgagccacccagccttggtgtcaatgtgggcagcctcatggtgcctgtctttgtggtgctgttgggtgtggtctggtacttccgaatcaattaccgccaattcttcacagcacctgccactgtctccctggtgggagtcaccgtcttcttcagcttcctagtatttgggatgtatggacgataaggacataggaagaaaatgaaaggcatggtctttctcctttacggcctccccacttttcctggccagagctgggcccaagggccggggagggaggggtggaaaggatgtgatggaaatctcctccataggacacaggaggcaagtatgcggcctccccttctcatccacaggagtacagatgtccctcccgtgcgagcacaactcaggtagaaatgaggatgtcatcttccttcacttttagggtcctctgaaggagttcaaagctgctggccaagctcagtggggagcctgggctctgagattccctcccacctgtggttctgactcttcccagtgtcctgcatgtctgcccccagcacccagggctgcctgcaagggcagctcagcatggccccagcacaactccgtagggagcctggagtatccttccatttctcagccaaatactcatcttttgagactgaaatcacactggcgggaatgaagattgtgccagccttctcttatgggcacctagccgccttcaccttcttcctctaccccttagcaggaatagggtgtcctcccttctttcaaagcactttgcttgcattttattttatttttttaagagtccttcatagagctcagtcaggaaggggatggggcaccaagccaagcccccagcattgggagcggccaggccacagctgctgctcccgtagtcctcaggctgtaagcaagagacagcactggcccttggccagcgtcctaccctgcccaactccaaggactgggtatggattgctgggccctaggctcttgcttctggggctattggagggtcagtgtctgtgactgaataaagttccattttgtggtcctgca

SEQ ID NO: 193178 - DNA, 546 bp, Homo sapiens
  Payload ID: 18141
  Gene Name: transmembrane and ubiquitin-like domain containing 2
  ENST ID: ENST00000587775
  CDS Start-End: 191-376
cattatattggacacttcagtaccaagagaaatacatacgatccttgtctaccaggagtctaatagaaagatggacagggctgggtcagttagaacctaaacaaactagagacctggttgcaacccctcaggctctgctgatgctgtccccctttgttcctgcagcgtggaccctgccagcagccaggccatggagctctctgatgtcaccctcattgagggtgtgggtaatgaggcgacacatccgtcctccacctggggcatgtggaccacctggtggcaggccaaggcaaccccgagccaactgaactcccccatccatcagaggacaagcaggtgcaggcagcagcagtccagaggcccccctgagatctgaggatagcacctgcctccctcccagccctggcctcatcactgtgcggctcaaattcctcaatgataccgaggagctggctgtggctaggccagaggataccgtgggtgccctgaagagcaaatacttccctggacaagaaagccagatgaaactgatctaccagggccgcc

SEQ ID NO: 193179 - DNA, 1598 bp, Homo sapiens
  Payload ID: 18141
  Gene Name: transmembrane and ubiquitin-like domain containing 2
  Uniprot ID: Q71RG4
  ENST ID: ENST00000587172
  CDS Start-End: 115-399
agggctgggtcagttagaacctaaacaaactagagacctggttgcaacccctcaggctctgctgatgctgtccccctttgttcctgcagcgtggaccctgccagcagccaggccatggagctctctgatgtcaccctcattgagggtgtgggtaatgaggtgatggtggtggcaggtgtggtggtgctgattctagccttggtcctagcttggctctctacctacgtagcagacagcggtagcaaccagctcctgggcgctattgtgtcagcaggcgacacatccgtcctccacctggggcatgtggaccacctggtggcaggccaaggcaaccccgagccaactgaactcccccatccatcagaggcaaatacttccctggacaagaaagccagatgaaactgatctaccagggccgcctgctacaagacccagcccgcacactgcgttctctgaacattaccgacaactgtgtgattcactgccaccgctcacccccagggtcagctgttccaggcccctcagcctccttggccccctcggccactgagccacccagccttggtgtcaatgtgggcagcctcatggtgcctgtctttgtggtgctgttgggtgtggtctggtacttccgaatcaattaccgccaattcttcacagcacctgccactgtctccctggtgggagtcaccgtcttcttcagcttcctagtatttgggatgtatggacgataaggacataggaagaaaatgaaaggcatggtctttctcctttacggcctccccacttttcctggccagagctgggcccaagggccggggagggaggggtggaaaggatgtgatggaaatctcctccataggacacaggaggcaagtatgcggcctccccttctcatccacaggagtacagatgtccctcccgtgcgagcacaactcaggtagaaatgaggatgtcatcttccttcacttttagggtcctctgaaggagttcaaagctgctggccaagctcagtggggagcctgggctctgagattccctcccacctgtggttctgactcttcccagtgtcctgcatgtctgcccccagcacccagggctgcctgcaagggcagctcagcatggccccagcacaactccgtagggagcctggagtatccttccatttctcagccaaatactcatcttttgagactgaaatcacactggcgggaatgaagattgtgccagccttctcttatgggcacctagccgccttcaccttcttcctctaccccttagcaggaatagggtgtcctcccttctttcaaagcactttgcttgcattttattttatttttttaagagtccttcatagagctcagtcaggaaggggatggggcaccaagccaagcccccagcattgggagcggccaggccacagctgctgctcccgtagtcctcaggctgtaagcaagagacagcactggcccttggccagcgtcctaccctgcccaactccaaggactgggtatggattgctgggccctaggctcttgcttctggggctattggagggtcagtgtctgtgactgaataaagttccattttgtggtcctgca

SEQ ID NO: 193180 - DNA, 747 bp, Homo sapiens
  Payload ID: 18141
  Gene Name: transmembrane and ubiquitin-like domain containing 2
  ENST ID: ENST00000588413
  CDS Start-End: 224-409
ggtttgtgacccccttagccgaccctactcctcactggccgggacaactggtcttatcacggaggctggggccaggcagcccttcggttcgggtgggcccatggaccccagtccaacgccgagggaataggaccatccaaaagcggaaccttcgcctcagaaaaagggtgcgggacccctcctcaccgtgcggtcacgcgtggaccctgccagcagccaggccatggagctctctgatgtcaccctcattgagggtgtgggtaatgaggcgacacatccgtcctccacctggggcatgtggaccacctggtggcaggccaaggcaaccccgagccaactgaactcccccatccatcagaggacaagcaggtgcaggcagcagcagtccagaggcccccctgagatctgaggatagcacctgcctccctcccagccctggcctcatcactgtgcggctcaaattcctcaatgataccgaggagctggctgtggctaggccagaggataccgtgggtgccctgaagagcaaatacttccctggacaagaaagccagatgaaactgatctaccagggccgcctgctacaagacccagcccgcacactgcgttctctgaacattaccgacaactgtgtgattcactgccaccgctcacccccagggtcagctgttccaggcccctcagcctccttggccccctcggccactgagccacccagccttggtgtcaatgtgggcagcctcatgg

SEQ ID NO: 193181 - DNA, 1191 bp, Homo sapiens
  Payload ID: 18141
  Gene Name: transmembrane and ubiquitin-like domain containing 2
  ENST ID: ENST00000587630
  CDS Start-End: 1-583
tggtgttgagcccagccttgagcatctccttgacatccaaggcctgcccaaaagacaagcaggtgcaggcagcagcagtccagaggcccccctgagatctgaggatagcacctgcctccctcccagccctggcctcatcactgtgcggctcaaattcctcaatgataccgaggagctggctgtggctaggccagaggataccgtgggtgccctgaagagcaaatacttccctggacaagaaagccagatgaaactgatctaccagggccgcctgctacaagacccagcccgcacactgcgttctctgaacattaccgacaactgtgtgattcactgccaccgctcacccccagggtcagctgttccaggcccctcagcctccttggccccctcggccactgagccacccagccttggtgtcaatgtgggcagcctcatggtgcctgtctttgtggtgctgttgggtgtggtctggtacttccgaatcaattaccgccaattcttcacagcacctgccactgtctccctggtgggagtcaccgtcttcttcagcttcctagtatttgggatgtatggacgataaggacataggaagaaaatgaaagggtcctctgaaggagttcaaagctgctggccaagctcagtggggagcctgggctctgagattccctcccacctgtggttctgactcttcccagtgtcctgcatgtctgcccccagcacccagggctgcctgcaagggcagctcagcatggccccagcacaactccgtagggagcctggagtatccttccatttctcagccaaatactcatcttttgagactgaaatcacactggcgggaatgaagattgtgccagccttctcttatgggcacctagccgccttcaccttcttcctctaccccttagcaggaatagggtgtcctcccttctttcaaagcactttgcttgcattttattttatttttttaagagtccttcatagagctcagtcaggaaggggatggggcaccaagccaagcccccagcattgggagcggccaggccacagctgctgctcccgtagtcctcaggctgtaagcaagagacagcactggcccttggccagcgtcctaccctgcccaactccaaggactgggtatggattgctgggccctaggctcttgcttctggggctattggagggtca

SEQ ID NO: 193182 - DNA, 2151 bp, Homo sapiens
  Payload ID: 18141
  Gene Name: transmembrane and ubiquitin-like domain containing 2
  Uniprot ID: Q71RG4
  ENST ID: ENST00000592825
  CDS Start-End: 688-972
ccgggacaactggtcttatcacggaggctggggccaggcagcccttcggttcgggtgggcccatggaccccagtccaacgccgagggaataggaccatccaaaagcggaaccttcgcctcagaaaaagggtgcgggacccctcctcaccgtgcggtcacggtacggacagggtagatcacaggctgagggacagagcaaagacccctgaggccggacacctggggtcctgccgggcccctccccacgagagttccctgtgtctgtgccaatcgttttcgtctttctttgccgcagtttcttttcctgtaaatcatggttaataacattaaccttcttaccatcaggggttagttgtggttgtgataaataattactaccgttattaagcaattgcaatttgcagtgtgccaggcactgtgccaagtattttgcttcgatgatttcacgtcatcttcaaaacaacctcatgagataattctttgagcaactactggggcattatattggacacttcagtaccaagagaaatacatacgatccttgtctaccaggagtctaatagaaagatggacagggctgggtcagttagaacctaaacaaactagagacctggttgcaacccctcaggctctgctgatgctgtccccctttgttcctgcagcgtggaccctgccagcagccaggccatggagctctctgatgtcaccctcattgagggtgtgggtaatgaggtgatggtggtggcaggtgtggtggtgctgattctagccttggtcctagcttggctctctacctacgtagcagacagcggtagcaaccagctcctgggcgctattgtgtcagcaggcgacacatccgtcctccacctggggcatgtggaccacctggtggcaggccaaggcaaccccgagccaactgaactcccccatccatcagaggcaaatacttccctggacaagaaagccagatgaaactgatctaccagggccgcctgctacaagacccagcccgcacactgcgttctctgaacattaccgacaactgtgtgattcactgccaccgctcacccccagggtcagctgttccaggcccctcagcctccttggccccctcggccactgagccacccagccttggtgtcaatgtgggcagcctcatggtgcctgtctttgtggtgctgttgggtgtggtctggtacttccgaatcaattaccgccaattcttcacagcacctgccactgtctccctggtgggagtcaccgtcttcttcagcttcctagtatttgggatgtatggacgataaggacataggaagaaaatgaaaggcatggtctttctcctttacggcctccccacttttcctggccagagctgggcccaagggccggggagggaggggtggaaaggatgtgatggaaatctcctccataggacacaggaggcaagtatgcggcctccccttctcatccacaggagtacagatgtccctcccgtgcgagcacaactcaggtagaaatgaggatgtcatcttccttcacttttagggtcctctgaaggagttcaaagctgctggccaagctcagtggggagcctgggctctgagattccctcccacctgtggttctgactcttcccagtgtcctgcatgtctgcccccagcacccagggctgcctgcaagggcagctcagcatggccccagcacaactccgtagggagcctggagtatccttccatttctcagccaaatactcatcttttgagactgaaatcacactggcgggaatgaagattgtgccagccttctcttatgggcacctagccgccttcaccttcttcctctaccccttagcaggaatagggtgtcctcccttctttcaaagcactttgcttgcattttattttatttttttaagagtccttcatagagctcagtcaggaaggggatggggcaccaagccaagcccccagcattgggagcggccaggccacagctgctgctcccgtagtcctcaggctgtaagcaagagacagcactggcccttggccagcgtcctaccctgcccaactccaaggactgggtatggattgctgggccctaggctcttgcttctggggctattggagggtcagtgtctgtgactgaataaag

SEQ ID NO: 193183 - DNA, 1969 bp, Homo sapiens
  Payload ID: 18141
  Gene Name: transmembrane and ubiquitin-like domain containing 2
  Uniprot ID: Q71RG4
  ENST ID: ENST00000587989
  CDS Start-End: 154-1119
cggaaagacgagtccaggggccgtcctggcgaggtcaaaacatttagtctggtcttttcaggggttagttgtggttgtgataaataattactaccgttattaagcaattgcaatttgcagtgtgccaggcactgtgccaagtattttgcttcgatgatttcacgtcatcttcaaaacaacctcatgagcgtggaccctgccagcagccaggccatggagctctctgatgtcaccctcattgagggtgtgggtaatgaggtgatggtggtggcaggtgtggtggtgctgattctagccttggtcctagcttggctctctacctacgtagcagacagcggtagcaaccagctcctgggcgctattgtgtcagcaggcgacacatccgtcctccacctggggcatgtggaccacctggtggcaggccaaggcaaccccgagccaactgaactcccccatccatcagagggtaatgatgagaaggctgaagaggcgggtgaaggtcggggagactccactggggaggctggagctgggggtggtgttgagcccagccttgagcatctccttgacatccaaggcctgcccaaaagacaagcaggtgcaggcagcagcagtccagaggcccccctgagatctgaggatagcacctgcctccctcccagccctggcctcatcactgtgcggctcaaattcctcaatgataccgaggagctggctgtggctaggccagaggataccgtgggtgccctgaagagcaaatacttccctggacaagaaagccagatgaaactgatctaccagggccgcctgctacaagacccagcccgcacactgcgttctctgaacattaccgacaactgtgtgattcactgccaccgctcacccccagggtcagctgttccaggcccctcagcctccttggccccctcggccactgagccacccagccttggtgtcaatgtgggcagcctcatggtgcctgtctttgtggtgctgttgggtgtggtctggtacttccgaatcaattaccgccaattcttcacagcacctgccactgtctccctggtgggagtcaccgtcttcttcagcttcctagtatttgggatgtatggacgataaggacataggaagaaaatgaaaggcatggtctttctcctttacggcctccccacttttcctggccagagctgggcccaagggccggggagggaggggtggaaaggatgtgatggaaatctcctccataggacacaggaggcaagtatgcggcctccccttctcatccacaggagtacagatgtccctcccgtgcgagcacaactcaggtagaaatgaggatgtcatcttccttcacttttagggtcctctgaaggagttcaaagctgctggccaagctcagtggggagcctgggctctgagattccctcccacctgtggttctgactcttcccagtgtcctgcatgtctgcccccagcacccagggctgcctgcaagggcagctcagcatggccccagcacaactccgtagggagcctggagtatccttccatttctcagccaaatactcatcttttgagactgaaatcacactggcgggaatgaagattgtgccagccttctcttatgggcacctagccgccttcaccttcttcctctaccccttagcaggaatagggtgtcctcccttctttcaaagcactttgcttgcattttattttatttttttaagagtccttcatagagctcagtcaggaaggggatggggcaccaagccaagcccccagcattgggagcggccaggccacagctgctgctcccgtagtcctcaggctgtaagcaagagacagcactggcccttggccagcgtcctaccctgcccaactccaaggactgggtatggattgctgggccctaggctcttgcttctggggctattggagggtcagtgtctgtgactgaataaagttc

SEQ ID NO: 193184 - DNA, 1918 bp, Homo sapiens
  Payload ID: 18141
  Gene Name: transmembrane and ubiquitin-like domain containing 2
  Uniprot ID: Q71RG4
  ENST ID: ENST00000589785
  CDS Start-End: 165-1070
tcctcactggccgggacaactggtcttatcacggaggctggggccaggcagcccttcggttcgggtgggcccatggaccccagtccaacgccgagggaataggaccatccaaaagcggaaccttcgcctcagaaaaaggcgtggaccctgccagcagccaggccatggagctctctgatgtcaccctcattgagggtgtgggtaatgaggtgatggtggtggcaggtgtggtggtgctgattctagccttggtcctagcttggctctctacctacgtagcagacagcggtagcaaccagctcctgggcgctattgtgtcagcaggcgacacatccgtcctccacctggggcatgtggaccacctggtggcaggccaaggcaaccccgagccaactgaactcccccatccatcagagggtaatgatgagaaggctgaagaggcgggtgaaggtcggggagactccactggggaggctggagctgggggtggtgttgagcccagccttgagcatctccttgacatccaaggcctgcccaaaagacaagcaggtgcaggcagcagcagtccagaggcccccctgagatctgaggatagcacctgcctccctcccagccctggcctcatcactgtgcggctcaaattcctcaatgataccgaggagctggctgtggctaggccagaggataccgtgggtgccctgaagagcaaatacttccctggacaagaaagccagatgaaactgatctaccagggccgcctgctacaagacccagcccgcacactgcgttctctgaacattaccgacaactgtgtgattcactgccaccgctcacccccagggtcagctgttccaggcccctcagcctccttggccccctcggccactgagccacccagccttggtgtcaatgtgggcagcctcatggtgcctgtctttgtggtgctgttgggtgtggtctggtacttccgaatcaattaccgccaattcttcacagcacctgccactgtctccctggtgggagtcaccgtcttcttcagcttcctagtatttgggatgtatggacgataaggacataggaagaaaatgaaaggcatggtctttctcctttacggcctccccacttttcctggccagagctgggcccaagggccggggagggaggggtggaaaggatgtgatggaaatctcctccataggacacaggaggcaagtatgcggcctccccttctcatccacaggagtacagatgtccctcccgtgcgagcacaactcaggtagaaatgaggatgtcatcttccttcacttttagggtcctctgaaggagttcaaagctgctggccaagctcagtggggagcctgggctctgagattccctcccacctgtggttctgactcttcccagtgtcctgcatgtctgcccccagcacccagggctgcctgcaagggcagctcagcatggccccagcacaactccgtagggagcctggagtatccttccatttctcagccaaatactcatcttttgagactgaaatcacactggcgggaatgaagattgtgccagccttctcttatgggcacctagccgccttcaccttcttcctctaccccttagcaggaatagggtgtcctcccttctttcaaagcactttgcttgcattttattttatttttttaagagtccttcatagagctcagtcaggaaggggatggggcaccaagccaagcccccagcattgggagcggccaggccacagctgctgctcccgtagtcctcaggctgtaagcaagagacagcactggcccttggccagcgtcctaccctgcccaactccaaggactgggtatggattgctgggccctaggctcttgcttctggggctattggagggtcagtgtctgtgactgaataaagt

SEQ ID NO: 193185 - DNA, 1839 bp, Homo sapiens
  Payload ID: 18141
  Gene Name: transmembrane and ubiquitin-like domain containing 2
  ENST ID: ENST00000587326
  CDS Start-End: 197-490
tttaggtttaggttggggtgccggaattaggaaggtttgtgcccccttctacacaacactgaactccttttttttttttttcagggctgggtcagttagaacctaaacaaactagagacctggttgcaacccctcaggctctgctgatgctgtccccctttgttcctgcagcgtggaccctgccagcagccaggccatggagctctctgatgtcaccctcattgagggtgtgggtaatgaggtgatggtggtggcaggtgtggtggtgctgattctagccttggtcctagcttggctctctacctacgtagcagacagcggtagcaaccagctcctgggcgctattgtgtcagcaggcgacacatccgtcctccacctggggcatgtggaccacctggtggcaggccaaggcaaccccgagccaactgaactcccccatccatcagaggacaagcaggtgcaggcagcagcagtccagaggcccccctgagatctgaggatagcacctgcctccctcccagccctggcctcatcactgtgcggctcaaattcctcaatgataccgaggagctggctgtggctaggccagaggataccgtgggtgccctgaagagcaaatacttccctggacaagaaagccagatgaaactgatctaccagggccgcctgctacaagacccagcccgcacactgcgttctctgaacattaccgacaactgtgtgattcactgccaccgctcacccccagggtcagctgttccaggcccctcagcctccttggccccctcggccactgagccacccagccttggtgtcaatgtgggcagcctcatggtgcctgtctttgtggtgctgttgggtgtggtctggtacttccgaatcaattaccgccaattcttcacagcacctgccactgtctccctggtgggagtcaccgtcttcttcagcttcctagtatttgggatgtatggacgataaggacataggaagaaaatgaaaggcatggtctttctcctttacggcctccccacttttcctggccagagctgggcccaagggccggggagggaggggtggaaaggatgtgatggaaatctcctccataggacacaggaggcaagtatgcggcctccccttctcatccacaggagtacagatgtccctcccgtgcgagcacaactcaggtagaaatgaggatgtcatcttccttcacttttagggtcctctgaaggagttcaaagctgctggccaagctcagtggggagcctgggctctgagattccctcccacctgtggttctgactcttcccagtgtcctgcatgtctgcccccagcacccagggctgcctgcaagggcagctcagcatggccccagcacaactccgtagggagcctggagtatccttccatttctcagccaaatactcatcttttgagactgaaatcacactggcgggaatgaagattgtgccagccttctcttatgggcacctagccgccttcaccttcttcctctaccccttagcaggaatagggtgtcctcccttctttcaaagcactttgcttgcattttattttatttttttaagagtccttcatagagctcagtcaggaaggggatggggcaccaagccaagcccccagcattgggagcggccaggccacagctgctgctcccgtagtcctcaggctgtaagcaagagacagcactggcccttggccagcgtcctaccctgcccaactccaaggactgggtatggattgctgggccctaggctcttgcttctggggctattggagggtcagtgtctgtgactgaataaagttccattttgtggt

SEQ ID NO: 193186 - DNA, 1505 bp, Homo sapiens
  Payload ID: 18141
  Gene Name: transmembrane and ubiquitin-like domain containing 2
  Uniprot ID: Q71RG4
  ENST ID: ENST00000589856
  CDS Start-End: 203-748
attaagcaattgcaatttgcagtgtgccaggcactgtgccaagtattttgcttcgatgatttcacgtcatcttcaaaacaacctcatgagggctgggtcagttagaacctaaacaaactagagacctggttgcaacccctcaggctctgctgatgctgtccccctttgttcctgcagcgtggaccctgccagcagccaggccatggagctctctgatgtcaccctcattgagggtgtgggtaatgaggtgatggtggtggcaggtgtggtggtgctgattctagccttggtcctagcttggctctctacctacgtagcagacagcggtagcaaccagctcctgggcgctattgtgtcagcaggcgacacatccgtcctccacctggggcatgtggaccacctggtggcaggccaaggcaaccccgagccaactgaactcccccatccatcagagggtaatgatgagaaggctgaagaggcgggtgaaggtcggggagactccactggggaggctggagctgggggtggtgttgagcccagccttgagcatctccttgacatccaaggcctgcccaaaagacaagcaggtgcaggcagcagcagtccagaggcccccctgagatctgaggatagcacctgcctccctcccagccctggcctcatcactgtgcggctcaaattcctcaatgataccgaggagctggctgtggctaggccagaggataccgtgggtgccctgaagaggtgagtggcctgggaagtgggaagctgcttgtgctcatcccccagcccttggttgcctctaaggaggctggtgcagacatgggagctgcagcaaagtgtaagatccagcccctaccaagggcaggtagatactttcttagaaatacacccttcaggccgggtgcagtggctcccgggactttgggaggccgaggcgggtgcatcacgaggttaggagttcgagaccagcctgaccaacatggtgaaaccccatctctactaaacatacaaaaatcagccgggcgtggtggcgcacgcctgcaatcccagctactcaggaggctgaggcaggagaatcgcttgaacccaggaggtggaggttgcagtgagccgagattgcgccactgcactccagcctgggcgacagagtgagactccatctaaaaaaacaaaacaaacaaatacacccctcattagttaaggataaagatgaggggggcctgtcgcggtggctcacgcctgtaatcccagcactttgggaggccaaggcgggcagatcacaaggtcaagatatcaagaccatcctggccagcatggtgaaaccctgtctctactaaaaaaaaaaatacaaaaattagctgggcatggtggcgcactcctgtagtcccagctactcgggagggtgaggcaggagaattgcttgaacccgggaggcagaggttgcagtgagccgagatcgcgccactgcactccagcctggcaacagagtgagactccgtctc

SEQ ID NO: 193187 - DNA, 1837 bp, Homo sapiens
  Payload ID: 18141
  Gene Name: transmembrane and ubiquitin-like domain containing 2
  ENST ID: ENST00000589184
  CDS Start-End: 582-809
ggacaactggtcttatcacggaggctggggccaggcagcccttcggttcgggtgggcccatggaccccagtccaacgccgagggaataggaccatccaaaagcggaaccttcgcctcagaaaaagggtgcgggacccctcctcaccgtgcggtcacggtacggacagggtagatcacaggctgagggacagagcaaagacccctgaggccggacacctggggtcctgccgggcccctccccacgagagttccctgtgtctgtgccaatcgttttcgtctttctttgccgcagtttcttttcctgtaaatcatggttaataacattaaccttcttaccatcaggggttagttgtggttgtgataaataattactaccgttattaagcaattgcaatttgcagtgtgccaggcactgtgccaagtattttgcttcgatgatttcacgtcatcttcaaaacaacctcatgagggctgggtcagttagaacctaaacaaactagagacctggttgcaacccctcaggctctgctgatgctgtccccctttgttcctgcagcgtggaccctgccagcagccaggccatggagctctctgatgtcaccctcattgagggtgtgggtaatgagcaaatacttccctggacaagaaagccagatgaaactgatctaccagggccgcctgctacaagacccagcccgcacactgcgttctctgaacattaccgacaactgtgtgattcactgccaccgctcacccccagggtcagctgttccaggcccctcagcctccttggccccctcggccactgagccacccagccttggtgtcaatgtgggcagcctcatggtgcctgtctttgtggtgctgttgggtgtggtctggtacttccgaatcaattaccgccaattcttcacagcacctgccactgtctccctggtgggagtcaccgtcttcttcagcttcctagtatttgggatgtatggacgataaggacataggaagaaaatgaaaggcatggtctttctcctttacggcctccccacttttcctggccagagctgggcccaagggccggggagggaggggtggaaaggatgtgatggaaatctcctccataggacacaggaggcaagtatgcggcctccccttctcatccacaggagtacagatgtccctcccgtgcgagcacaactcaggtagaaatgaggatgtcatcttccttcacttttagggtcctctgaaggagttcaaagctgctggccaagctcagtggggagcctgggctctgagattccctcccacctgtggttctgactcttcccagtgtcctgcatgtctgcccccagcacccagggctgcctgcaagggcagctcagcatggccccagcacaactccgtagggagcctggagtatccttccatttctcagccaaatactcatcttttgagactgaaatcacactggcgggaatgaagattgtgccagccttctcttatgggcacctagccgccttcaccttcttcctctaccccttagcaggaatagggtgtcctcccttctttcaaagcactttgcttgcattttattttatttttttaagagtccttcatagagctcagtcaggaaggggatggggcaccaagccaagcccccagcattgggagcggccaggccacagctgctgctcccgtagtcctcaggctgtaagcaagagacagcactggcccttggccagcgtcctaccctgcccaactccaaggactgggtatggattgctgggccctaggctcttgcttctggggctattggagggtcagtgtctgtgactgaataaag

SEQ ID NO: 193188 - DNA, 4591 bp, Homo sapiens
  Payload ID: 18142
  Gene Name: transmembrane anterior posterior transformation 1
  Uniprot ID: Q6NXT6
  ENST ID: ENST00000405303
  CDS Start-End: 85-1788
gaggggcggggcgaggcggggagggggccggccggaggcagaggctggagggaggcggcggggacagtttgttgtgctcggaacatggcgggcgtcggcgacgcggccgctccgggagaaggcggcggtggcggcgtggacggcccgcagcgggacggccgcggcgaggcggagcagccgggcggcagcggcggacaggggcccccgccggcgcctcagctcacagagacgctgggcttctacgagagcgaccggcggcgggagaggcgccggggccgcacagagctttcattgttgaggttcctcagtgctgaactaacaagagggtacttccttgaacataatgaggccaagtatacagaaagaagagaaagagtatacacttgtttgcgaataccaagagaattggaaaagctgatggtttttggaatctttctgtgcctggatgcgtttttgtatgtgttcaccctgcttcctttaagagttttcctggcactattcaggctcctcactttgccttgctatggcttaagggacagacgtttgcttcagcctgcccaggtgtgtgacattttgaagggtgtcattttggtaatctgctattttatgatgcactatgttgactactccatgatgtaccacctgataagggggcagtccgtcatcaagctctacatcatctacaacatgctggaggtagctgatcgtctgttttcatcttttggacaagacatattagatgctctctattggacagcaacagagcctaaagaaagaaaaagagcccacattggggtgattcctcactttttcatggctgttctctatgtctttttgcatgcaattcttataatggttcaagcaacaactctcaatgtagcttttaactcacacaacaagtctttgcttactatcatgatgtctaataattttgttgaaattaaaggaagtgttttcaagaagtttgaaaagaacaatctctttcaaatgtcaaatagcgatattaaggaacgattcacaaattatgtgcttttactgatagtgtgtctaagaaacatggaacagttttcttggaatccagatcatctctgggtgttgtttccagatgtctgtatggtaattgcatcagaaattgccgtggatattgtaaaacatgcctttattactaaattcaatgacattactgcagatgtctacagtgaatatagagccagtcttgcttttgaccttgttagcagccgacagaaaaatgcatacactgattacagtgactctgtagcacggaggatgggctttattcctctcccactagctgttttactcatcagagttgtaacaagctcaattaaagtgcaaggaatcctgtcttatgcctgtgtcatactcttctattttgggttgatatccctgaaagtacttaatagcatcgtgctgttggggaaatcgtgccagtatgtgaaggaagccaaaatggaagagaagctgtcgaatcctcccgcaacctgcactccaggcaagccgtccagtaaatcacagaacaaatgtaaaccctctcaaggcctttccacagaagaaaacctgtctgcctccatcaccaaacaacctattcatcaaaaggaaaatatcataccattacttgtgacaagcaattctgatcagtttttgacaactccagatggtgacgagaaggacataacgcaggacaattctgaattaaaacacagatcctcaaagaaagatttgttagagatagacaggttcacaatttgtggaaaccgaattgactgaatctgtggcttcatgcgctgaagaagctgggtcctggggcaacaagtgctgtgttgccaggacaaatagatgctaaacatggcacttaaatatttatttaaaaacttaaattattattggcaagcaaatcttagtatctttcttccagtaatatggcctggctgagggtcagaccacaggacaggagcgacctccggccttgactgtctgggaagcttgatggattataaaacttcctcctgcctggccaagcagcagcatcatttccaggacccaacaaaggcaacatcaaaatctgttttgctttgtcagtctgggcttccagaatgttgaatttgcctcaaggcctcttcagtataaggaaatacctggaaaactgtgaaacttttaccacgacgtaatctttccagtctcatactattttcacaaacagttttcaaacgttacttcatctgccaaagcattaaaaaaattaaacataagtcaagataaatgttcttaccaccagaataacccttaaagatgtatcttaattaatcagaataaaaggctaccttaaataagacatgatgaatagtagcattttgtagggttaaaaaaaaatgctaaactagtttatttattaaaaaaataattaatgaaggctatgcattactgggaaaaatccttcataatttttcagtttactctttaaagcaaaatgtgagctgtatgtcatttaattggtggataaaacaaatttccttacaaaagggcactttttacaccaaggaagcagagcagtgttaactttaaggtatacttaactgattttgctttaaaactaattacttcataaattattacagctaaaaggattcgatgttgaacaggctgaaaaattgtcaatgtacaaaattcaaaactgtcaactttaactgtaaagtaaatgctccaagtgtgttagacagcatcatcttgcttgggcttaccaaatgcattagtctttgtgtttgggtcgacagcgagtgtgcctgtgctggggcagggtgtgtgttctgtgggagggtgtctgtggggatgtgactatcagggtgggcctgtgctggggatggggcaggcctgggtctggagaggattttgtgtgaaagtaaatggggtgtttgaggcgtatgggtggctgttggtgtggggaggcatctgtgtatggctgttgggaacagcaaccaaaaggtgctttttggttttatttgagatgaagattgtgtttccgcttaattactagtttgtggtctatatcatagaagttatttcccaccccattttatcttgacaaccgtgtttgcatttctgtaaaacttctacaacttctggtgtcagaactgtccagaagatggtactgttaactgttatttcctttgatgttttgattttgaagtttagctctcatgcaaatgtttcaggcgtacatacataggcagaaagcaatttttaggtgatttgtctgtttcttggatgaaatataaagcaagctttaatgttctgacttgttcatttgaaatacaaaaaagtaagtgaattttaatgttttgcattaactaaagaaatctgaagattaatgttgaggaaattgtatggacatgcctttgtgaaaccaggaagtattttaagttaaaaatgaaaaaggttttaattgctttgtgtgtgttttaatggagccccattttagaattattttttccatctccctttaccaacaaaaggaacaatgccaccgtgaatggaatagtttggggaaagctttgccaaacacaaccctgatttcagagcaggaacatggtttggatagatcttcagttccgcttgaattattctgttactgcgctgtcattttcagaagatttccattcctttgcagatgctgttgggagttcgggattatgttcatttcttctgttttaatggcattcagtactaattttataagtgcatcttgtgtgaatctcaataaattcagttttgtaatcttttttaaaaaggtcactgaatttattttaatatttactattgtatttggtagagtgaatttcccactgtataataagtatttatttgtaattcacaagtgatagagctatcttaatttgaattattgctttggtcttaatggtggcaaaatgtttaattttgtctttggaaaaaataggctcggccttgattatagaccatttaatatttctcagcaaatgaaggtatttgcattttacaagtgttttgaatgtcacacaaaatatttttcacatctgggagtcaagttcaagacagtgctttggttttaaaaaaatctaatgaaggcacaggataggccagacccttattaggttttcctttagaataagtgtaaagaccaagtgtcactgatacgcttgtccagattttcttgtggactttggccagtatttagagtttatattcatgttacataaagtgaaagaaacttgctataattaggccatcaaaatatatcctgccactcctggtaactcagcagaggaggagataaatttacaaaataatgtaatatctctacattgttacatgttttcaactattttttatcaacaaagatttgttaatcacttcctatgtgtcagaaactgttctaagtggtgggatcagcaatgagcaagataagtccctgttcgtctgtggaagactgataggaacaagtcgatgaaataatgtctgctggtcacagagtgtccactgaccaaatgatctctcaggcttatttcagctctaaaatatagttctttaaaacgtt

SEQ ID NO: 193189 - DNA, 1634 bp, Homo sapiens
  Payload ID: 18142
  Gene Name: transmembrane anterior posterior transformation 1
  ENST ID: ENST00000505603
  CDS Start-End: 15-368
gttgtgctcggaacatggcgggcgtcggcgacgcggccgctccgggagaaggcggcggtggcggcgtggacggcccgcagcgggacggccgcggcgaggcggagcagccgggcggcagcggcggacaggggcccccgccggcgcctcagctcacagagacgctgggcttctacgagagcgaccggcggcgggagaggcgccggggccgcacagctgatggtttttggaatctttctgtgcctggatgcgtttttgtatgtgttcaccctgcttcctttaagagttttcctggcactattcaggctcctcactttgccttgctatggcttaagggacagacgtttgcttcagcctgcccaggtgtgtgacattttgaagggtgtcattttggtaatctgctattttatgatgcactatgttgactactccatgatgtaccacctgataagggggcagtccgtcatcaagctctacatcatctacaacatgctggaggtagctgatcgtctgttttcatcttttggacaagacatattagatgctctctattggacagcaacagagcctaaagaaagaaaaagagcccacattggggtgattcctcactttttcatggctgttctctatgtctttttgcatgcaattcttataatggttcaagcaacaactctcaatgtagcttttaactcacacaacaagtctttgcttactatcatgatgtctaataattttgttgaaattaaaggaagtgttttcaagaagtttgaaaagaacaatctctttcaaatgtcaaatagcgatattaaggaacgattcacaaattatgtgcttttactgatagtgtgtctaagaaacatggaacagttttcttggaatccagatcatctctgggtgttgtttccagatgtctgtatggtaattgcatcagaaattgccgtggatattgtaaaacatgcctttattactaaattcaatgacattactgcagatgtctacagtgaatatagagccagtcttgcttttgaccttgttagcagccgacagaaaaatgcatacactgattacagtgactctgtagcacggaggatgggctttattcctctcccactagctgttttactcatcagagttgtaacaagctcaattaaagtgcaaggaatcctgtcttatgcctgtgtcatactcttctattttgggttgatatccctgaaagtacttaatagcatcgtgctgttggggaaatcgtgccagtatgtgaaggaagccaaaatggaagagaagctgtcgaatcctcccgcaacctgcactccaggcaagccgtccagtaaatcacagaacaaatgtaaaccctctcaaggcctttccacagaagaaaacctgtctgcctccatcaccaaacaacctattcatcaaaaggaaaatatcataccattacttgtgacaagcaattctgatcagtttttgacaactccagatggtgacgagaaggacataacgcaggacaattctgaattaaaacacagatcctcaaagaaagatttgttagagatagacaggttcacaatttgtggaaaccgaattgactgaatctgtggcttcatgcgctgaagaagctgggtcctggggcaacaagt

SEQ ID NO: 193190 - DNA, 431 bp, Homo sapiens
  Payload ID: 18142
  Gene Name: transmembrane anterior posterior transformation 1
  ENST ID: ENST00000513833
  CDS Start-End: 1-155
agctgatggtttttggaatctttctgtgcctggatgcgtttttgtatgtgttcaccctgcttcctttaagagttttcctggcactattcaggctcctcactttgccttgctatggcttaagaccgaagggaggagcactttcacttcctttatagaatggaatgtggtggcacagggactccttgtgggacagacgtttgcttcagcctgcccaggtgtgtgacattttgaagggtgtcattttggtaatctgctattttatgatgcactatgttgactactccatgatgtaccacctgataagggggcagtccgtcatcaagctctacatcatctacaacatgctggaggtagctgatcgtctgttttcatcttttggacaagacatattagatgctctctattggacagcaacagagcctaaagaaaga

SEQ ID NO: 193191 - DNA, 1016 bp, Homo sapiens
  Payload ID: 18142
  Gene Name: transmembrane anterior posterior transformation 1
  ENST ID: ENST00000513782
  CDS Start-End: 1-637
tttgaagggtgtcattttggtaatctgctattttatgatgcactatgttgactactccatgatgtaccacctgataagggggcagtccgtcatcaagctctacatcatctacaacatgctggaggtagctgatcgtctgttttcatcttttggacaagacatattagatgctctctattggacagcaacagagcctaaagaaagaaaaagagcccacattgggtttgttgaaattaaaggaagtgttttcaagaagtttgaaaagaacaatctctttcaaatgtcaaatagcgatattaaggaacgattcacaaattatgtgcttttactgatagtgtgtctaagaaacatggaacagttttcttggaatccagatcatctctgggtgttgtttccagatgtctgtatggtaattgcatcagaaattgccgtggatattgtaaaacatgcctttattactaaattcaatgacattactgcagatgtctacagtgaatatagagccagtcttgcttttgaccttgttagcagccgacagaaaaatgcatacactgattacagtgactctgtagcacggaggatgggctttattcctctcccactagctgttttagttgatatccctgaaagtacttaatagcatcgtgctgttggggaaatcgtgccagtatgtgaaggaagccaaaatggaagagaagctgtcgaatcctcccgcaacctgcactccaggcaagccgtccagtaaatcacagaacaaatgtaaaccctctcaaggcctttccacagaagaaaacctgtctgcctccatcaccaaacaacctattcatcaaaaggaaaatatcataccattacttgtgacaagcaattctgatcagtttttgacaactccagatggtgacgagaaggacataacgcaggacaattctgaattaaaacacagatcctcaaagaaagatttgttagagatagacaggttcacaatttgtggaaaccgaattgactgaatctgtggcttc

SEQ ID NO: 193192 - DNA, 2371 bp, Homo sapiens
  Payload ID: 18143
  Gene Name: transmembrane BAX inhibitor motif containing 1
  Uniprot ID: Q969X1
  ENST ID: ENST00000258412
  CDS Start-End: 153-1088
gaggccggcgcgacggggcggggcgcggagccccagccgagcctagccctgcccggccccggaggacttgcaacactccgaggccaggaacgctccgtctggaacggcgcaggtcccagcagctggggttccccctcagcccgtgagcagccatgtccaaccccagcgccccaccaccatatgaagaccgcaaccccctgtacccaggccctccgccccctgggggctatgggcagccatctgtcctgccaggagggtatcctgcctaccctggctacccgcagcctggctacggtcaccctgctggctacccacagcccatgccccccacccacccgatgcccatgaactacggcccaggccatggctatgatggggaggagagagcagtgagtgatagcttcgggcctggagagtgggatgaccggaaagtgcgacacacttttatccgaaaggtttactccatcatctccgtgcagctgctcatcactgtggccatcattgctatcttcacctttgtggaacctgtcagcgcctttgtgaggagaaatgtggctgtctactacgtgtcctatgctgtcttcgttgtcacctacctgatccttgcctgctgccagggacccagacgccgtttcccatggaacatcattctgctgaccctttttacttttgccatgggcttcatgacgggcaccatttccagtatgtaccaaaccaaagccgtcatcattgcaatgatcatcactgcggtggtatccatttcagtcaccatcttctgctttcagaccaaggtggacttcacctcgtgcacaggcctcttctgtgtcctgggaattgtgctcctggtgactgggattgtcactagcattgtgctctacttccaatacgtttactggctccacatgctctatgctgctctgggggccatttgtttcaccctgttcctggcttacgacacacagctggtcctggggaaccggaagcacaccatcagccccgaggactacatcactggcgccctgcagatttacacagacatcatctacatcttcacctttgtgctgcagctgatgggggatcgcaattaaggagcaagcccccattttcacccgatcctgggctctcccttccaagctagagggctgggccctatgactgtggtctgggctttaggcccctttccttccccttgagtaacatgcccagtttcctttctgtcctggagacaggtggcctctctggctatggatgtgtgggtacttggtggggacggaggagctagggactaactgttgctcttggtgggcttggcagggactaggctgaagatgtgtcttctccccgccacctactgtatgacaccacattcttcctaacagctggggttgtgaggaatatgaaaagagcctattcgatagctagaagggaatatgaaaggtagaagtgacttcaaggtcacgaggttcccctcccacctctgtcacaggcttcttgactacgtagttggagctatttcttcccccagcaaagccagagagctttgtccccggcctcctggacacataggccattatcctgtattcctttggcttggcatcttttagctcaggaaggtagaagagatctgtgcccatgggtctccttgcttcaatcccttcttgtttcagtgacatatgtattgtttatctgggttagggatgggggacagataacagaacgagcaaagtaacctatacaggccagcatggaacagcatctcccctgggcttgctcctggcttgtgacgctataagacagagcaggccacatgtggccatctgctccccattcttgaaagctgctggggcctccttgcaggcttctggatctctggtcagagtgaactcttgcttcctgtattcaggcagctcagagcagaaagtaaggggcagagtcatacgtgtggccaggaagtagccagggtgaagagagactcggtgcgggcagggagaatgcctgggggtccctcacctggctagggagataccgaagcctactgtggtactgaagacttctgggttctttccttctgctaacccagggagggtcctaagaggaaggtgacttctctctgtttgtcttaagttgcactgggggatttctgacttgaggcccatctctccagccagccactgccttctttgtaatattaagtgccttgagctggaatggggaagggggacaagggtcagtctgtcgggtgggggcagaaatcaaatcagcccaaggatatagttaggattaattacttaatagagaaatcctaactatatcacacaaagggatacaactataaatgtaataaagtttatgtctagaagttaaaaccctg

SEQ ID NO: 193193 - DNA, 2422 bp, Homo sapiens
  Payload ID: 18143
  Gene Name: transmembrane BAX inhibitor motif containing 1
  Uniprot ID: Q969X1
  ENST ID: ENST00000396809
  CDS Start-End: 213-1148
atgccagccccaaacctcatccctagtggaggccttgctgatgtggaagtggccagggccctcatggaggctgggcagaagcccaagagcaggctctaaagctgccaaacccggcagccctggtccccggaggctcttgccagtctgacagtgttcttggcactgctcagaggtcccagcagctggggttccccctcagcccgtgagcagccatgtccaaccccagcgccccaccaccatatgaagaccgcaaccccctgtacccaggccctccgccccctgggggctatgggcagccatctgtcctgccaggagggtatcctgcctaccctggctacccgcagcctggctacggtcaccctgctggctacccacagcccatgccccccacccacccgatgcccatgaactacggcccaggccatggctatgatggggaggagagagcagtgagtgatagcttcgggcctggagagtgggatgaccggaaagtgcgacacacttttatccgaaaggtttactccatcatctccgtgcagctgctcatcactgtggccatcattgctatcttcacctttgtggaacctgtcagcgcctttgtgaggagaaatgtggctgtctactacgtgtcctatgctgtcttcgttgtcacctacctgatccttgcctgctgccagggacccagacgccgtttcccatggaacatcattctgctgaccctttttacttttgccatgggcttcatgacgggcaccatttccagtatgtaccaaaccaaagccgtcatcattgcaatgatcatcactgcggtggtatccatttcagtcaccatcttctgctttcagaccaaggtggacttcacctcgtgcacaggcctcttctgtgtcctgggaattgtgctcctggtgactgggattgtcactagcattgtgctctacttccaatacgtttactggctccacatgctctatgctgctctgggggccatttgtttcaccctgttcctggcttacgacacacagctggtcctggggaaccggaagcacaccatcagccccgaggactacatcactggcgccctgcagatttacacagacatcatctacatcttcacctttgtgctgcagctgatgggggatcgcaattaaggagcaagcccccattttcacccgatcctgggctctcccttccaagctagagggctgggccctatgactgtggtctgggctttaggcccctttccttccccttgagtaacatgcccagtttcctttctgtcctggagacaggtggcctctctggctatggatgtgtgggtacttggtggggacggaggagctagggactaactgttgctcttggtgggcttggcagggactaggctgaagatgtgtcttctccccgccacctactgtatgacaccacattcttcctaacagctggggttgtgaggaatatgaaaagagcctattcgatagctagaagggaatatgaaaggtagaagtgacttcaaggtcacgaggttcccctcccacctctgtcacaggcttcttgactacgtagttggagctatttcttcccccagcaaagccagagagctttgtccccggcctcctggacacataggccattatcctgtattcctttggcttggcatcttttagctcaggaaggtagaagagatctgtgcccatgggtctccttgcttcaatcccttcttgtttcagtgacatatgtattgtttatctgggttagggatgggggacagataacagaacgagcaaagtaacctatacaggccagcatggaacagcatctcccctgggcttgctcctggcttgtgacgctataagacagagcaggccacatgtggccatctgctccccattcttgaaagctgctggggcctccttgcaggcttctggatctctggtcagagtgaactcttgcttcctgtattcaggcagctcagagcagaaagtaaggggcagagtcatacgtgtggccaggaagtagccagggtgaagagagactcggtgcgggcagggagaatgcctgggggtccctcacctggctagggagataccgaagcctactgtggtactgaagacttctgggttctttccttctgctaacccagggagggtcctaagaggaaggtgacttctctctgtttgtcttaagttgcactgggggatttctgacttgaggcccatctctccagccagccactgccttctttgtaatattaagtgccttgagctggaatggggaagggggacaagggtcagtctgtcgggtgggggcagaaatcaaatcagcccaaggatatagttaggattaattacttaatagagaaatcctaactatatcacacaaagggatacaactataaatgtaataaagtttatgtctagaagtt

SEQ ID NO: 193194 - DNA, 464 bp, Homo sapiens
  Payload ID: 18143
  Gene Name: transmembrane BAX inhibitor motif containing 1
  ENST ID: ENST00000451181
  CDS Start-End: 246-464
ggattcctgcagctagttcatgaacccaggcagatgccagccccaaacctcatccctagtggaggccttgctgatgtggaagtggccagggccctcatggaggctgggcagaagcccaagagcaggctctaaagctgccaaacccggcagccctggtccccggaggctcttgccagtctgacagtgttcttggcactgctcagaggtcccagcagctggggttccccctcagcccgtgagcagccatgtccaaccccagcgccccaccaccatatgaagaccgcaaccccctgtacccaggccctccgccccctgggggctatgggcagccatctgtcctgccaggagggtatcctgcctaccctggctacccgcagcctggctacggtcaccctgctggctacccacagcccatgccccccacccacccgatgcccatgaactacggcccaggccatggctat

SEQ ID NO: 193195 - DNA, 534 bp, Homo sapiens
  Payload ID: 18143
  Gene Name: transmembrane BAX inhibitor motif containing 1
  ENST ID: ENST00000453281
  CDS Start-End: 283-534
ctagccctgcccggccccggaggacttgcaacactccgaggccaggaacgctccgtctggaacggcgcagatgccagccccaaacctcatccctagtggaggccttgctgatgtggaagtggccagggccctcatggaggctgggcagaagcccaagagcaggctctaaagctgccaaacccggcagccctggtccccggaggctcttgccagtctgacagtgttcttggcactgctcagaggtcccagcagctggggttccccctcagcccgtgagcagccatgtccaaccccagcgccccaccaccatatgaagaccgcaaccccctgtacccaggccctccgccccctgggggctatgggcagccatctgtcctgccaggagggtatcctgcctaccctggctacccgcagcctggctacggtcaccctgctggctacccacagcccatgccccccacccacccgatgcccatgaactacggcccaggccatggctatgatggggaggagagagcagtgagtgatagcttc

SEQ ID NO: 193196 - DNA, 569 bp, Homo sapiens
  Payload ID: 18143
  Gene Name: transmembrane BAX inhibitor motif containing 1
  ENST ID: ENST00000425694
  CDS Start-End: 68-569
gattgcttttctcctctcccatttcaggtcccagcagctggggttccccctcagcccgtgagcagccatgtccaaccccagcgccccaccaccatatgaagaccgcaaccccctgtacccaggccctccgccccctgggggctatgggcagccatctgtcctgccaggagggtatcctgcctaccctggctacccgcagcctggctacggtcaccctgctggctacccacagcccatgccccccacccacccgatgcccatgaactacggcccaggccatggctatgatggggaggagagagcagtgagtgatagcttcgggcctggagagtgggatgaccggaaagtgcgacacacttttatccgaaaggtttactccatcatctccgtgcagctgctcatcactgtggccatcattgctatcttcacctttgtggaacctgtcagcgcctttgtgaggagaaatgtggctgtctactacgtgtcctatgctgtcttcgttgtcacctacctgatccttgcctgctgccagggacccagacgccgtttcccatggaacatcattctgc

SEQ ID NO: 193197 - DNA, 677 bp, Homo sapiens
  Payload ID: 18143
  Gene Name: transmembrane BAX inhibitor motif containing 1
  ENST ID: ENST00000429501
  CDS Start-End: 165-677
tttctccactgtggctcccataaacaagtccctactcctttcccccacgtgggctgatttagggataaaaggaggccaggggaggtcatttgcctggattcctgcagctagttcatgaacccaggtcccagcagctggggttccccctcagcccgtgagcagccatgtccaaccccagcgccccaccaccatatgaagaccgcaaccccctgtacccaggccctccgccccctgggggctatgggcagccatctgtcctgccaggagggtatcctgcctaccctggctacccgcagcctggctacggtcaccctgctggctacccacagcccatgccccccacccacccgatgcccatgaactacggcccaggccatggctatgatggggaggagagagcagtgagtgatagcttcgggcctggagagtgggatgaccggaaagtgcgacacacttttatccgaaaggtttactccatcatctccgtgcagctgctcatcactgtggccatcattgctatcttcacctttgtggaacctgtcagcgcctttgtgaggagaaatgtggctgtctactacgtgtcctatgctgtcttcgttgtcacctacctgatccttgcctgctgccagggacccagacgccgtttcccatggaacatcattctgctgacccttttt

SEQ ID NO: 193198 - DNA, 1251 bp, Homo sapiens
  Payload ID: 18143
  Gene Name: transmembrane BAX inhibitor motif containing 1
  ENST ID: ENST00000445635
  CDS Start-End: 369-782
gacttgcaacactccgaggccaggaacgctccgtctggaacggcgcaggcccaggccatggctatgatggggaggagagagcagtgagtgatagcttcgggcctggagagtgggatgaccggaaagtgcgacacacttttatccgaaaggtttactccatcatctccgtgcagctgctcatcactgtggccatcattgctatcttcacctttgtggaacctgtcagcgcctttgtgaggagaaatgtggctgtctactacgtgtcctatgctgtcttcgttgtcacctacctgatccttgcctgctgccagggacccagacgccgtttcccatggaacatcattctgctgaccctttttacttttgccatgggcttcatgacgggcaccatttccagtatgtaccaaaccaaagccgtcatcattgcaatgatcatcactgcggtggtatccatttcagtcaccatcttctgctttcagaccaaggtggacttcacctcgtgcacaggcctcttctgtgtcctgggaattgtgctcctggtgactgggattgtcactagcattgtgctctacttccaatacgtttactggctccacatgctctatgctgctctgggggccatttgtttcaccctgttcctggcttacgacacacagctggtcctggggaaccggaagcacaccatcagccccgaggactacatcactggcgccctgcagatttacacagacatcatctacatcttcacctttgtgctgcagctgatgggggatcgcaattaaggagcaagcccccattttcacccgatcctgggctctcccttccaagctagagggctgggccctatgactgtggtctgggctttaggcccctttccttccccttgagtaacatgcccagtttcctttctgtcctggagacaggtggcctctctggctatggatgtgtgggtacttggtggggacggaggagctagggactaactgttgctcttggtgggcttggcagggactaggctgaagatgtgtcttctccccgccacctactgtatgacaccacattcttcctaacagctggggttgtgaggaatatgaaaagagcctattcgatagctagaagggaatatgaaaggtagaagtgacttcaaggtcacgaggttcccctcccacctctgtcacaggcttcttgactacgtagttggagctatttcttcccccagcaaagccagagagctttgtccccggcctcctg

SEQ ID NO: 193199 - DNA, 571 bp, Homo sapiens
  Payload ID: 18143
  Gene Name: transmembrane BAX inhibitor motif containing 1
  ENST ID: ENST00000444000
  CDS Start-End: 302-571
aaacccatgacgaagaagagggctgttctggggtggagcaggaactttcttggctctggggtttccttgtctgtcaaatgaccaggcagatgccagccccaaacctcatccctagtggaggccttgctgatgtggaagtggccagggccctcatggaggctgggcagaagcccaagagcaggctctaaagctgccaaacccggcagccctggtccccggaggctcttgccagtctgacagtgttcttggcactgctcagaggtcccagcagctggggttccccctcagcccgtgagcagccatgtccaaccccagcgccccaccaccatatgaagaccgcaaccccctgtacccaggccctccgccccctgggggctatgggcagccatctgtcctgccaggagggtatcctgcctaccctggctacccgcagcctggctacggtcaccctgctggctacccacagcccatgccccccacccacccgatgcccatgaactacggcccaggccatggctatgatggggaggagagagcagtgagtgatagcttcgggcctggagagtgggat

SEQ ID NO: 193200 - DNA, 992 bp, Homo sapiens
  Payload ID: 18143
  Gene Name: transmembrane BAX inhibitor motif containing 1
  ENST ID: ENST00000437694
  CDS Start-End: 79-726
actccgaggccaggaacgctccgtctggaacggcgcaggtcccagcagctggggttccccctcagcccgtgagcagccatgtccaaccccagcgccccaccaccatatgaagaccgcaaccccctgtacccaggccctccgccccctgggggctatgggcagccatctgtcctgccaggagggtatcctgcctaccctggctacccgcagcctggctacggtcaccctgctggctacccacagcccatgccccccacccacccgatgcccatgaactacggcccaggccatggctatgatggggaggagagagcagtgagtgatagcttcgggcctggagagtgggatgaccggaaagtgcgacacacttttatccgaaagggaacctgtcagcgcctttgtgaggagaaatgtggctgtctactacgtgtcctatgctgtcttcgttgtcacctacctgatccttgcctgctgccagggacccagacgccgtttcccatggaacatcattctgctgaccctttttacttttgccatgggcttcatgacgggcaccatttccagtatgtaccaaaccaaagccgtcatcattgcaatgatcatcactgcggtggtatccatttcagtcaccatcttctgctttcagaccaaggtggacttcacctcgtgcacaggcctcttctgtgtcctgggaattgtgctcctggtgactgggattgtcactagcattgtgctctacttccaatacgtttactggctccacatgctctatgctgctctgggggccatttgtttcaccctgttcctggcttacgacacacagctggtcctggggaaccggaagcacaccatcagccccgaggactacatcactggcgccctgcagatttacacagacatcatctacatcttcacctttgtgctgcagctgatgggggatcgcaattaaggagcaagcccccattttcacccgatcctgggctctcccttcc

SEQ ID NO: 193201 - DNA, 580 bp, Homo sapiens
  Payload ID: 18143
  Gene Name: transmembrane BAX inhibitor motif containing 1
  ENST ID: ENST00000434015
  CDS Start-End: 379-580
ctgcccggccccggaggacttgcaacactccgaggccaggaacgctccgtctggaacggcgcaggcagatgccagccccaaacctcatccctagtggaggccttgctgatgtggaagtggccagggccctcatggaggctgggcagaagcccaagagcaggctctaaagctgccaaacccggcagccctggtccccggaggctcttgccagtctgacagtgttcttggcactgctcagaggctggagtacggtggcgcgatctcagctcaccacaacctctgcctcccaggttcaagtgattctcctgcctcggcctcctgagtaactgggactacaggtcccagcagctggggttccccctcagcccgtgagcagccatgtccaaccccagcgccccaccaccatatgaagaccgcaaccccctgtacccaggccctccgccccctgggggctatgggcagccatctgtcctgccaggagggtatcctgcctaccctggctacccgcagcctggctacggtcaccctgctggctacccacagcccatgccccccacccacccgatgcccatgaactacg

SEQ ID NO: 193202 - DNA, 589 bp, Homo sapiens
  Payload ID: 18143
  Gene Name: transmembrane BAX inhibitor motif containing 1
  ENST ID: ENST00000418569
  CDS Start-End: 138-589
aagggaagttccaaacccatgacgaagaagagggctgttctggggtggagcaggaactttcttggctctggggtttccttgtctgtcaaatgaccaggtcccagcagctggggttccccctcagcccgtgagcagccatgtccaaccccagcgccccaccaccatatgaagaccgcaaccccctgtacccaggccctccgccccctgggggctatgggcagccatctgtcctgccaggagggtatcctgcctaccctggctacccgcagcctggctacggtcaccctgctggctacccacagcccatgccccccacccacccgatgcccatgaactacggcccaggccatggctatgatggggaggagagagcagtgagtgatagcttcgggcctggagagtgggatgaccggaaagtgcgacacacttttatccgaaaggtttactccatcatctccgtgcagctgctcatcactgtggccatcattgctatcttcacctttgtggaacctgtcagcgcctttgtgaggagaaatgtggctgtctactacgtgtcctatgctgtcttcgttgtcacctacctgatcct

SEQ ID NO: 193203 - DNA, 348 bp, Homo sapiens
  Payload ID: 18143
  Gene Name: transmembrane BAX inhibitor motif containing 1
  ENST ID: ENST00000413976
  CDS Start-End: 211-348
gacttgcaacactccgaggccaggaacgctccgtctggaacggcgcagatggagtctcactctgttgcccaggctggagtacggtggcgcgatctcagctcaccacaacctctgcctcccaggttcaagtgattctcctgcctcggcctcctgagtaactgggactacaggtcccagcagctggggttccccctcagcccgtgagcagccatgtccaaccccagcgccccaccaccatatgaagaccgcaaccccctgtacccaggccctccgccccctgggggctatgggcagccatctgtcctgccaggagggtatcctgcctaccctggctacccgcagcctggc

SEQ ID NO: 193204 - DNA, 2936 bp, Homo sapiens
  Payload ID: 18143
  Gene Name: transmembrane BAX inhibitor motif containing 1
  Uniprot ID: Q969X1
  ENST ID: ENST00000444881
  CDS Start-End: 727-1662
atccgtctctggcagggaggagggcaggctgcctggaccagtcagctgctcctttccatccctccctccagtacacatactctcctcttgctgtaaccccagtagctcaggcctcctctgcagattccggagccttaacccttcaaatacccccaggagagccccagccggggcctcagtaggcagacagcaggattaccacactgagagggctccaggggaggaggtgcttccgcctctgcatctgaaaaccttgacacccagcaagtcctgctgtctgagctcacccacttgtgccgctgctgtggtagaaagcaggggctctggttccttcctaatgggggactggggccctgagagaggagcaaacttagatctataatgggcaaggatagggcacagtctgaatgccttgataacaggcattgtgaggcaaggaagaatgttctaatcgagctgtctgcagacaaggggcttgctccatgttgctggagttccttcaagcagaaggcagatgccagccccaaacctcatccctagtggaggccttgctgatgtggaagtggccagggccctcatggaggctgggcagaagcccaagagcaggctctaaagctgccaaacccggcagccctggtccccggaggctcttgccagtctgacagtgttcttggcactgctcagaggtcccagcagctggggttccccctcagcccgtgagcagccatgtccaaccccagcgccccaccaccatatgaagaccgcaaccccctgtacccaggccctccgccccctgggggctatgggcagccatctgtcctgccaggagggtatcctgcctaccctggctacccgcagcctggctacggtcaccctgctggctacccacagcccatgccccccacccacccgatgcccatgaactacggcccaggccatggctatgatggggaggagagagcagtgagtgatagcttcgggcctggagagtgggatgaccggaaagtgcgacacacttttatccgaaaggtttactccatcatctccgtgcagctgctcatcactgtggccatcattgctatcttcacctttgtggaacctgtcagcgcctttgtgaggagaaatgtggctgtctactacgtgtcctatgctgtcttcgttgtcacctacctgatccttgcctgctgccagggacccagacgccgtttcccatggaacatcattctgctgaccctttttacttttgccatgggcttcatgacgggcaccatttccagtatgtaccaaaccaaagccgtcatcattgcaatgatcatcactgcggtggtatccatttcagtcaccatcttctgctttcagaccaaggtggacttcacctcgtgcacaggcctcttctgtgtcctgggaattgtgctcctggtgactgggattgtcactagcattgtgctctacttccaatacgtttactggctccacatgctctatgctgctctgggggccatttgtttcaccctgttcctggcttacgacacacagctggtcctggggaaccggaagcacaccatcagccccgaggactacatcactggcgccctgcagatttacacagacatcatctacatcttcacctttgtgctgcagctgatgggggatcgcaattaaggagcaagcccccattttcacccgatcctgggctctcccttccaagctagagggctgggccctatgactgtggtctgggctttaggcccctttccttccccttgagtaacatgcccagtttcctttctgtcctggagacaggtggcctctctggctatggatgtgtgggtacttggtggggacggaggagctagggactaactgttgctcttggtgggcttggcagggactaggctgaagatgtgtcttctccccgccacctactgtatgacaccacattcttcctaacagctggggttgtgaggaatatgaaaagagcctattcgatagctagaagggaatatgaaaggtagaagtgacttcaaggtcacgaggttcccctcccacctctgtcacaggcttcttgactacgtagttggagctatttcttcccccagcaaagccagagagctttgtccccggcctcctggacacataggccattatcctgtattcctttggcttggcatcttttagctcaggaaggtagaagagatctgtgcccatgggtctccttgcttcaatcccttcttgtttcagtgacatatgtattgtttatctgggttagggatgggggacagataacagaacgagcaaagtaacctatacaggccagcatggaacagcatctcccctgggcttgctcctggcttgtgacgctataagacagagcaggccacatgtggccatctgctccccattcttgaaagctgctggggcctccttgcaggcttctggatctctggtcagagtgaactcttgcttcctgtattcaggcagctcagagcagaaagtaaggggcagagtcatacgtgtggccaggaagtagccagggtgaagagagactcggtgcgggcagggagaatgcctgggggtccctcacctggctagggagataccgaagcctactgtggtactgaagacttctgggttctttccttctgctaacccagggagggtcctaagaggaaggtgacttctctctgtttgtcttaagttgcactgggggatttctgacttgaggcccatctctccagccagccactgccttctttgtaatattaagtgccttgagctggaatggggaagggggacaagggtcagtctgtcgggtgggggcagaaatcaaatcagcccaaggatatagttaggattaattacttaatagagaaatcctaactatatcacacaaagggatacaactataaatgtaataaagtttatgtctagaagtt

SEQ ID NO: 193205 - DNA, 526 bp, Homo sapiens
  Payload ID: 18143
  Gene Name: transmembrane BAX inhibitor motif containing 1
  ENST ID: ENST00000444183
  CDS Start-End: 208-526
tagccctgcccggccccggaggacttgcaacactccgaggccaggaacgctccgtctggaacggcgcaggctggagtacggtggcgcgatctcagctcaccacaacctctgcctcccaggttcaagtgattctcctgcctcggcctcctgagtaactgggactacaggtcccagcagctggggttccccctcagcccgtgagcagccatgtccaaccccagcgccccaccaccatatgaagaccgcaaccccctgtacccaggccctccgccccctgggggctatgggcagccatctgtcctgccaggagggtatcctgcctaccctggctacccgcagcctggctacggtcaccctgctggctacccacagcccatgccccccacccacccgatgcccatgaactacggcccaggccatggctatgatggggaggagagagcagtgagtgatagcttcgggcctggagagtgggatgaccggaaagtgcgacacacttttatccgaaaggtttactccatcatct

SEQ ID NO: 193206 - DNA, 561 bp, Homo sapiens
  Payload ID: 18143
  Gene Name: transmembrane BAX inhibitor motif containing 1
  ENST ID: ENST00000453776
  CDS Start-End: 287-561
ctctagcctccacccttagacatagctacgaaagtaaacactgaccctttccccctttgctgctacctaggcagatgccagccccaaacctcatccctagtggaggccttgctgatgtggaagtggccagggccctcatggaggctgggcagaagcccaagagcaggctctaaagctgccaaacccggcagccctggtccccggaggctcttgccagtctgacagtgttcttggcactgctcagaggtcccagcagctggggttccccctcagcccgtgagcagccatgtccaaccccagcgccccaccaccatatgaagaccgcaaccccctgtacccaggccctccgccccctgggggctatgggcagccatctgtcctgccaggagggtatcctgcctaccctggctacccgcagcctggctacggtcaccctgctggctacccacagcccatgccccccacccacccgatgcccatgaactacggcccaggccatggctatgatggggaggagagagcagtgagtgatagcttcgggcctggagagtgggatgaccg

SEQ ID NO: 193207 - DNA, 659 bp, Homo sapiens
  Payload ID: 18143
  Gene Name: transmembrane BAX inhibitor motif containing 1
  ENST ID: ENST00000440422
  CDS Start-End: 338-659
ccgccccacgaggccggcgcgacggggcggggcgcggagccccagccgagcctagccctgcccggccccggaggacttgcaacactccgaggccaggaacgctccgtctggaacggcgcaggcagatgccagccccaaacctcatccctagtggaggccttgctgatgtggaagtggccagggccctcatggaggctgggcagaagcccaagagcaggctctaaagctgccaaacccggcagccctggtccccggaggctcttgccagtctgacagtgttcttggcactgctcagaggtcccagcagctggggttccccctcagcccgtgagcagccatgtccaaccccagcgccccaccaccatatgaagaccgcaaccccctgtacccaggccctccgccccctgggggctatgggcagccatctgtcctgccaggagggtatcctgcctaccctggctacccgcagcctggctacggtcaccctgctggctacccacagcccatgccccccacccacccgatgcccatgaactacggcccaggccatggctatgatggggaggagagagcagtgagtgatagcttcgggcctggagagtgggatgaccggaaagtgcgacacacttttatccgaaaggtttactccatcatctccg

SEQ ID NO: 193208 - DNA, 361 bp, Homo sapiens
  Payload ID: 18143
  Gene Name: transmembrane BAX inhibitor motif containing 1
  ENST ID: ENST00000420341
  CDS Start-End: 338-361
tagccctgcccggccccggaggacttgcaacactccgaggccaggaacgctccgtctggaacggcgcagaggtgcaccctgaggaggtgctgggacacgtcatggtgacatcacggttggggtttctgcccacagagcctttccggccagtgcttttttttttttttcttttgagatggagtctcactctgttgcccaggctggagtacggtggcgcgatctcagctcaccacaacctctgcctcccaggttcaagtgattctcctgcctcggcctcctgagtaactgggactacaggtcccagcagctggggttccccctcagcccgtgagcagccatgtccaaccccagcgccccacca

SEQ ID NO: 193209 - DNA, 631 bp, Homo sapiens
  Payload ID: 18143
  Gene Name: transmembrane BAX inhibitor motif containing 1
  ENST ID: ENST00000439306
  CDS Start-End: 41-463
gtcccagcagctggggttccccctcagcccgtgagcagccatgtccaaccccagcgccccaccaccatatgaagaccgcaaccccctgtacccaggccctccgccccctgggggctatgggcagccatctgtcctgccaggagggtatcctgcctaccctggctacccgcagcctggctacggtcaccctgctggctacccacagcccatgccccccacccacccgatgcccatgaactacggcccaggccatggctatgatggggaggagagagcagtgagtgatagcttcgggcctggagagtgggatgaccggaaagtgcgacacacttttatccgaaaggtttactccatcatctccgtgcagctgctcatcactgtggccatcattgctatcttcacctttgtggaacctgtcagcgcctttgtgaggagaaatgtggctgtctactacgtgtcctaacgccgtttcccatggaacatcattctgctgaccctttttacttttgccatgggcttcatgacgggcaccatttccagtatgtaccaaaccaaagccgtcatcattgcaatgatcatcactgcggtggtatccatttcagtcaccatcttctgctttcagaccaaggtg

SEQ ID NO: 193210 - DNA, 989 bp, Homo sapiens
  Payload ID: 18144
  Gene Name: transmembrane BAX inhibitor motif containing 4
  ENST ID: ENST00000286424
  CDS Start-End: 12-869
ctgttgccatcatggctgaccccgacccccggtaccctcgctcctcgatcgaggacgacttcaactatggcagcagcgtggcctccgccaccgtgcacatccgaatggttctccagagagattgtaccttcagcaaacaatatatgaggataccttctgcaccctcagccacactgaatatcatcagattttttcatctccggcaatctggtagatcagggatggtgaacattttctacaaagggccaacctttctgagaaaagtctacagcattctttctctgcaggttctcttaactacagtgacttcaacagtttttttatactttgagtctgtacggacatttgtacatgagagtcctgccttaattttgctgtttgccctcggatctctgggtttgatttttgcgttgattttaaacagacataagtatccccttaacctgtacctactttttggatttacgctgttggaagctctgactgtggcagttgttgttactttctatgatgtatatattattctgcaagctttcatactgactactacagtattttttggtttgactgtgtatactctacaatctaagaaggatttcagcaaatttggagcagggctgtttgctcttttgtggatattgtgcctgtcaggattcttgaagttttttttttatagtgagataatggagttggtcttagccgctgcaggagcccttcttttctgtggattcatcatctatgacacacactcactgatgcataaactgtcacctgaagagtacgtattagctgccatcagcctctacttggatatcatcaatctattcctgcacctgttacggtttctggaagcagttaataaaaagtaattaaaagtatctcagctcaactgaagaacaacaaaaaaaatttaatgagaaaaaaggattaaagtaattggaagcagtatatagaaactgtttcattaagtaataaagtttgaaacaatg

SEQ ID NO: 193211 - DNA, 2952 bp, Homo sapiens
  Payload ID: 18144
  Gene Name: transmembrane BAX inhibitor motif containing 4
  Uniprot ID: Q9HC24
  ENST ID: ENST00000358230
  CDS Start-End: 122-838
ctcgctcggtgttcgcccgccgacgccgcacggcttgctggggctgggctcttcctcgcggaagtggggaggaggcggttgcggttagtggaccgggaccggtaggggtgctgttgccatcatggctgaccccgacccccggtaccctcgctcctcgatcgaggacgacttcaactatggcagcagcgtggcctccgccaccgtgcacatccgaatggcctttctgagaaaagtctacagcattctttctctgcaggttctcttaactacagtgacttcaacagtttttttatactttgagtctgtacggacatttgtacatgagagtcctgccttaattttgctgtttgccctcggatctctgggtttgatttttgcgttgattttaaacagacataagtatccccttaacctgtacctactttttggatttacgctgttggaagctctgactgtggcagttgttgttactttctatgatgtatatattattctgcaagctttcatactgactactacagtattttttggtttgactgtgtatactctacaatctaagaaggatttcagcaaatttggagcagggctgtttgctcttttgtggatattgtgcctgtcaggattcttgaagttttttttttatagtgagataatggagttggtcttagccgctgcaggagcccttcttttctgtggattcatcatctatgacacacactcactgatgcataaactgtcacctgaagagtacgtattagctgccatcagcctctacttggatatcatcaatctattcctgcacctgttacggtttctggaagcagttaataaaaagtaattaaaagtatctcagctcaactgaagaacaacaaaaaaaatttaatgagaaaaaaggattaaagtaattggaagcagtatatagaaactgtttcattaagtaataaagtttgaaacaatgattaaatactgttacaatctttatttgtatcatatgtaattttgagagctttaaaatcttactattctttatgatacctcatttctaaatccttgatttaggatctcagttaagagctatcaaaattctattaaaaatgcttttctggctgggcacagtggctcacgcctgtaatcccaccactttgggagaccgaggcaggtggatcacgaggtcaagaggttgagaccatcctggccaacatggtgaaaccccgtctctactaaaaatacaaaaattagctggatgtggtggcacacacctgtagtcccagctagtcaagaggctgaggccagagaatcgcttgaacctgggaggtggaggttgcattgagccaagatcacgccactgcattccagcctggtgacagagcgagactcagtctcaaaaaaaaaaaaaaaatttttcttcctaaattagccacgcatagcagttcgtttgcaattcaaaaataattttatgagtagataagaatatcagtttaccgttgtctagtgattttatctaaattttccctgaattattaagtaatattgatttggctttgattctgaagtagtagagtctttaccattataaactgtaaatctctttttgcttaaaaggaaaaaaatgtaaaagataaattccacagagaattattcagtattacattaaaatgttaatgactttttattttaaattgtactaacattaaaagttggcctgaaagtcagatattatgacaaaatttgacattaattgtttttaaagtatagatttcatttgaaattatagaatggtaatgtggttagaggacaccaaagatactgggtcatcagccattaagtatatctatttcaaaattaaaatatttgggaagtattgtcttatggtttcatttgtgttggtccacacagcatgttaggtcagtgtaccagtaaccaatgaaattttgtcaaattccctcactgtactagtttgttaggctgccataacaaagttctacagcttgggtggcttcaacaagaaatttgttttcccacagttctggaggctaaaagtccaagatcaaggtgttagcagggttggtttcctttgaggcctttctctttgatttgtagatggccatcttctccctgtgtctttaaatggccttccctctgtacttgtctgtgcccaaatttcttcttcttatgaggacaccagtcatactggattagggcccacactgaggacctcatttttccttaattatctctttcaaaacctatctccaaatacagtcacattctgaagtgctgggattaggatttcttcatgtgaattttggggggactacaactcagcccataacaccccctaagtatttcccagctattaagttgaaataaacttgtagtatcaatttaagcttgcatgatttgtagatgtaaatttgactttattatcattaactgttgaattatcaagtgtatgatgcagtgcaatcaagtttaacagcatggtgggtaagagcatctagattagaatcattgcagtccaaccaggtgcttaagtgacatttggcgaattatttatccttccttaggtcttctgcctcatcttcataatgggaataatgatgtctagcttattgggctgttataaggattaaatgagatagataaataaactaaactaagtgcttaattaatgtcagctgatggtattaataccattttctttttttttttttttttttttttttaatttatttttttattgataattcttggttgtttctcacagagggggatttggcagggtcatgggacaatagtggagggaaggtcagcagataaacaagtgaacaaaggtctctggttttcctaggcagaggaccctgcagccttccgcagtgtttgtgtccctgattacttgagattagggattggtgatgactcttaacgagcatgctgccttcaagcatctgt

SEQ ID NO: 193212 - DNA, 844 bp, Homo sapiens
  Payload ID: 18144
  Gene Name: transmembrane BAX inhibitor motif containing 4
  ENST ID: ENST00000398033
  CDS Start-End: 48-533
gcggttgcggttagtggaccgggaccggtaggggtgctgttgccatcatggctgaccccgacccccggtaccctcgctcctcgatcgaggacgacttcaactatggcagcagcgtggcctccgccaccgtgcacatccgaatggcctttctgagaaaagtctacagcattctttctctgcaggttctcttaactacagtgacttcaacagtttttttatactttgagtctgtacggacatttgtacatgagagtcctgccttaattttgctgtttgccctcggatctctgggtttgatttttgcgttgattttaaacagacataagtatccccttaacctgtacctactttttggatttacgctgttggaagctctgactgtggcagttgttgttactttctatgatgtatatattattctgcaagctttcatactgactactacagtattttttggtttgactgtgtatactctacaatctaagaaggatttcagcaaatttggagcaggttttttttttatagtgagataatggagttggtcttagccgctgcaggagcccttcttttctgtggattcatcatctatgacacacactcactgatgcataaactgtcacctgaagagtacgtattagctgccatcagcctctacttggatatcatcaatctattcctgcacctgttacggtttctggaagcagttaataaaaagtaattaaaagtatctcagctcaactgaagaacaacaaaaaaaatttaatgagaaaaaaggattaaagtaattggaagcagtatatagaaactgtttcattaagtaataaagtttgaaacaatgattaaa

SEQ ID NO: 193213 - DNA, 409 bp, Homo sapiens
  Payload ID: 18144
  Gene Name: transmembrane BAX inhibitor motif containing 4
  ENST ID: ENST00000545504
  CDS Start-End: 54-197
gaggaggcggttgcggttagtggaccgggaccggtaggggtgctgttgccatcatggctgaccccgacccccggtaccctcgctcctcgatcgaggacgacttcaactatggcagcagcgtggcctccgccaccgtgcacatccgaatggacgctgttggaagctctgactgtggcagttgttgttactttctatgatgtatatattattctgcaagctttcatactgactactacagtattttttggtttgactgtgtatactctacaatctaagaaggatttcagcaaatttggagcagggctgtttgctcttttgtggatattgtgcctgtcaggattcttgaagttttttttttatagtgagataatggagttggtcttagccgctgcaggagcccttcttttct

SEQ ID NO: 193214 - DNA, 571 bp, Homo sapiens
  Payload ID: 18144
  Gene Name: transmembrane BAX inhibitor motif containing 4
  ENST ID: ENST00000534930
  CDS Start-End: 19-150
aggggtgctgttgccatcatggctgaccccgacccccggtaccctcgctcctcgatcgaggacgacttcaactatggcagcagcgtggcctccgccaccgtgcacatccgaatggggcccagaatgcaacaggtctttgaggattattgaggaagttgctcaacacagaagcttcctaacctttctgagaaaagtctacagcattctttctctgcaggttctcttaactacagtgacttcaacagtttttttatactttgagtctgtacggacatttgtacatgagagtcctgccttaattttgctgtttgccctcggatctctgggtttgatttttgcgttgattttaaacagacataagtatccccttaacctgtacctactttttggatttacgctgttggaagctctgactgtggcagttgttgttactttctatgatgtatatattattctgcaagctttcatactgactactacagtattttttggtttgactgtgtatactctacaatctaagaaggatttcagcaaatttggagcagggctgtttgctcttttgtggatattg

SEQ ID NO: 193215 - DNA, 1303 bp, Homo sapiens
  Payload ID: 18144
  Gene Name: transmembrane BAX inhibitor motif containing 4
  ENST ID: ENST00000545407
  CDS Start-End: 30-161
ccgggaccggtaggggtgctgttgccatcatggctgaccccgacccccggtaccctcgctcctcgatcgaggacgacttcaactatggcagcagcgtggcctccgccaccgtgcacatccgaatggggcccagaatgcaacaggtctttgaggattattgaggaagttgctcaacacagaagcttcctaagtcagtctaaattgtgttttaagttattacgtagtagccaatgggcagaaatttttgaatttaaaatgctcagcttcatctacgtggaagccattgcctgctctagtttggtcatttgatcgccgaaacagccccagactttcagcctgtttaggcagctggaacttgttctggaaaaggaaagatgaagatagttctgatgtgctaagaatcttagtgcctagaacttgttctggaaaaggaaagatgaagatagttctgatgcaccaagaatcttggtgcctagcatttatatttttggaattgaattttgaaattattttggccagtgaactcagcttttttttaaaaaaaattaattgtggtaaaatacagcctttctgagaaaagtctacagcattctttctctgcaggttctcttaactacagtgacttcaacagtttttttatactttgagtctgtacggacatttgtacatgagagtcctgccttaattttgctgtttgccctcggatctctgggtttgatttttgcgttgattttaaacagacataagtatccccttaacctgtacctactttttggatttacgctgttggaagctctgactgtggcagttgttgttactttctatgatgtatatattattctgcaagctttcatactgactactacagtattttttggtttgactgtgtatactctacaatctaagaaggatttcagcaaatttggagcagggctgtttgctcttttgtggatattgtgcctgtcaggattcttgaagttttttttttatagtgagataatggagttggtcttagccgctgcaggagcccttcttttctgtggattcatcatctatgacacacactcactgatgcataaactgtcacctgaagagtacgtattagctgccatcagcctctacttggatatcatcaatctattcctgcacctgttacggtttctggaagcagttaataaaaagtaattaaaagtatctcagctcaactgaagaacaacaaaaaaaatttaatgagaaaaaaggattaaagtaattggaagcagtatatagaaactgtttcattaagtaataaagtttgaaacaa

SEQ ID NO: 193216 - DNA, 770 bp, Homo sapiens
  Payload ID: 18144
  Gene Name: transmembrane BAX inhibitor motif containing 4
  ENST ID: ENST00000542724
  CDS Start-End: 49-537
ggcggttgcggttagtggaccgggaccggtaggggtgctgttgccatcatggctgaccccgacccccggtaccctcgctcctcgatcgaggacgacttcaactatggcagcagcgtggcctccgccaccgtgcacatccgaatggcctttctgagaaaagtctacagcattctttctctgcaggttctcttaactacagtgacttcaacagtttttttatactttgagtctgtacggacatttgtacatgagagtcctgccttaattttgctgtttgccctcggatctctgggtttgatttttgcgttgattttaaacagacataagtatccccttaacctgtacctactttttggatttacgctgttggaagctctgactgtggcagttgttgttactttctatgatgtatatattattctgcaagctttcatactgactactacagtattttttggtttgactgtgtatactctacaatctaagaaggatttcagcaaatttggagcagggattcttgaagttttttttttatagtgagataatggagttggtcttagccgctgcaggagcccttcttttctgtggattcatcatctatgacacacactcactgatgcataaactgtcacctgaagagtacgtattagctgccatcagcctctacttggatatcatcaatctattcctgcacctgttacggtttctggaagcagttaataaaaagtaattaaaagtatctcagctcaactgaagaacaacaaaaaaaa

SEQ ID NO: 193217 - DNA, 2240 bp, Homo sapiens
  Payload ID: 18144
  Gene Name: transmembrane BAX inhibitor motif containing 4
  ENST ID: ENST00000544599
  CDS Start-End: 1032-1217
gtcgtggaaatgagtcggttgatcactgtgactgacgtacacacgagtggaatccacggcctgatgtttttgttctgtggggtttcgcgttacaggcttatatttaccgtcctgtgctaggctggaagctccctgacggcactatttcctctccgcagggcccagaatgcaacaggtctttgaggattattgaggaagttgctcaacacagaagcttcctaagtcagtctaaattgtgttttaagttattacgtagtagccaatgggcagaaatttttgaatttaaaatgctcagcttcatctacgtggaagccattgcctgctctagtttggtcatttgatcgccgaaacagccccagactttcagcctgtttaggcagctggaacttgttctggaaaaggaaagatgaagatagttctgatgtgctaagaatcttagtgcctagaacttgttctggaaaaggaaagatgaagatagttctgatgcaccaagaatcttggtgcctagcatttatatttttggaattgaattttgaaattattttggccagtgaactcagcttttttttaaaaaaaattaattgtggtaaaatacagcctttctgagaaaagtctacagcattctttctctgcaggttctcttaactacagtgacttcaacagtttttttatactttgagtctgtacggacatttgtacatgagagtcctgccttaattttgctgtttgccctcggatctctgggtttgatttttgcgttgattttaaacagacataagtatccccttaacctgtacctactttttggatttacgctgttggaagctctgactgtggcagttgttgttactttctatgatgtatatattattctgcaagctttcatactgactactacagtattttttggtttgactgtgtatactctacaatctaagaaggatttcagcaaatttggagcagggctgtttgctcttttgtggatattgtgcctgtcaggattcttgaagttttttttttatagtgagataatggagttggtcttagccgctgcaggagcccttcttttctgtggattcatcatctatgacacacactcactgatgcataaactgtcacctgaagagtacgtattagctgccatcagcctctacttggatatcatcaatctattcctgcacctgttacggtttctggaagcagttaataaaaagtaattaaaagtatctcagctcaactgaagaacaacaaaaaaaatttaatgagaaaaaaggattaaagtaattggaagcagtatatagaaactgtttcattaagtaataaagtttgaaacaatgattaaatactgttacaatctttatttgtatcatatgtaattttgagagctttaaaatcttactattctttatgatacctcatttctaaatccttgatttaggatctcagttaagagctatcaaaattctattaaaaatgcttttctggctgggcacagtggctcacgcctgtaatcccaccactttgggagaccgaggcaggtggatcacgaggtcaagaggttgagaccatcctggccaacatggtgaaaccccgtctctactaaaaatacaaaaattagctggatgtggtggcacacacctgtagtcccagctagtcaagaggctgaggccagagaatcgcttgaacctgggaggtggaggttgcattgagccaagatcacgccactgcattccagcctggtgacagagcgagactcagtctcaaaaaaaaaaaaaaaatttttcttcctaaattagccacgcatagcagttcgtttgcaattcaaaaataattttatgagtagataagaatatcagtttaccgttgtctagtgattttatctaaattttccctgaattattaagtaatattgatttggctttgattctgaagtagtagagtctttaccattataaactgtaaatctctttttgcttaaaaggaaaaaaatgtaaaagataaattccacagagaattattcagtattacattaaaatgttaatgactttttattttaaattgtactaacattaaaagttggcctgaaagtcagatattatgacaaaatttgacattaattgtttttaaagtatagatttcatttgaaattatagaatggtaatgtggttagaggacaccaaagatactgggtcatcagccattaagtatatctatttcaaaattaaaatatttgggaagta

SEQ ID NO: 193218 - DNA, 610 bp, Homo sapiens
  Payload ID: 18144
  Gene Name: transmembrane BAX inhibitor motif containing 4
  ENST ID: ENST00000556010
  CDS Start-End: 122-610
ctcgctcggtgttcgcccgccgacgccgcacggcttgctggggctgggctcttcctcgcggaagtggggaggaggcggttgcggttagtggaccgggaccggtaggggtgctgttgccatcatggctgaccccgacccccggtaccctcgctcctcgatcgaggacgacttcaactatggcagcagcgtggcctccgccaccgtgcacatccgaatggcctttctgagaaaagtctacagcattctttctctgcaggttctcttaactacagtgacttcaacagtttttttatactttgagtctgtacggacatttgtacatgagagtcctgccttaattttgctgtttgccctcggatctctgggtttgatttttgcgttgattttaaacagacataagtatccccttaacctgtacctactttttggatttacgctgttggaagctctgactgtggcagttgttgttactttctatgatgtatatattattctgcaagctttcatactgactactacagtattttttggtttgactgtgtatactctacaatctaagaaggatttcagcaaatttggagcagggattatggatattttctttctttaa

SEQ ID NO: 193219 - DNA, 851 bp, Homo sapiens
  Payload ID: 18144
  Gene Name: transmembrane BAX inhibitor motif containing 4
  ENST ID: ENST00000613669
  CDS Start-End: 13-645
gctgttgccatcatggctgaccccgacccccggtaccctcgctcctcgatcgaggacgacttcaactatggcagcagcgtggcctccgccaccgtgcacatccgaatggcctttctgagaaaagtctacagcattctttctctgcaggttctcttaactacagtgacttcaacagtttttttatactttgagtctgtacggacatttgtacatgagagtcctgccttaattttgctgtttgccctcggatctctgggtttgatttttgcgttgattttaaacagacataagtatccccttaacctgtacctactttttggatttacgctgttggaagctctgactgtggcagttgttgttactttctatgatgtatatattattctgcaagctttcatactgactactacagtattttttggtttgactgtgtatactctacaatctaagaaggatttcagcaaatttggagcagggctgtttgctcttttgtggatattgcctgtcaggattcttgaagtttttttttatagtgagataatggagttggtcttagccgctgcaggagcccttcttttctgtggattcatcatctatgacacacactcactgatgcataaactgtcacctaagagtacgtattagctgccatcagcctctacttggatatcatcaatctattcctgcacctgttacggtttctggaagcagttaataaaaagtaattaaaagtatctcagctcaactgaagaacaacaaaaaaaatttaatgagaaaaaaggattaaagtaattggaagcagtatatagaaactgtttcattaagtaataaagtttgaaacaatgattaaa

SEQ ID NO: 193220 - DNA, 766 bp, Homo sapiens
  Payload ID: 18144
  Gene Name: transmembrane BAX inhibitor motif containing 4
  ENST ID: ENST00000535812
  CDS Start-End: 62-193
gaagtggggaggaggcggttgcggttagtggaccgggaccggtaggggtgctgttgccatcatggctgaccccgacccccggtaccctcgctcctcgatcgaggacgacttcaactatggcagcagcgtggcctccgccaccgtgcacatccgaatggggcccagaatgcaacaggtctttgaggattattgaggaagttgctcaacacagaagcttcctaagtcagtctaaattgtgttttaagttattacgtagtagccaatgggcagaaatttttgaatttaaaatgctcagcttcatctacgtggaagccattgcctgctctagtttggtcatttgatcgccgaaacagccccagactttcagcctgtttaggcagctggaacttgttctggaaaaggaaagatgaagatagttctgatgtgctaagaatcttagtgcctagaacttgttctggaaaaggaaagatgaagatagttctgatgcaccaagaatcttggtgcctagcatttatatttttggaattgaattttgaaattattttggccagtgaactcagcttttttttaaaaaaaattaattgtggtaaaatacaggtaacataaaatttaccgtcttaactatttttaagtgtatagttcagtagtgttaagttattcacatggttgtgcactgttaaaagaaaaactttagacacattaaatctaacggagtttgagcacagaatgatttgcgaattgggcaggtcccggaaccagaataagg

SEQ ID NO: 193221 - DNA, 876 bp, Homo sapiens
  Payload ID: 18144
  Gene Name: transmembrane BAX inhibitor motif containing 4
  ENST ID: ENST00000633367
  CDS Start-End: 77-217
gggctcttcctcgcggaagtggggaggaggcggttgcggttagtggaccgggaccggtaggggtgctgttgccatcatggctgaccccgacccccggtaccctcgctcctcgatcgaggacgacttcaactatggcagcagcgtggcctccgccaccgtgcacatccgaatgggttctcttaactacagtgacttcaacagtttttttatactttgagtctgtacggacatttgtacatgagagtcctgccttaattttgctgtttgccctcggatctctgggtttgatttttgcgttgattttaaacagacataagtatccccttaacctgtacctactttttggatttacgctgttggaagctctgactgtggcagttgttgttactttctatgatgtatatattattctgcaagctttcatactgactactacagtattttttggtttgactgtgtatactctacaatctaagaaggatttcagcaaatttggagcagggctgtttgctcttttgtggatattgtgcctgtcaggattcttgaagttttttttttatagtgagataatggagttggtcttagccgctgcaggagcccttcttttctgtggattcatcatctatgacacacactcactgatgcataaactgtcacctgaagagtacgtattagctgccatcagcctctacttggatatcatcaatctattcctgcacctgttacggtttctggaagcagttaataaaaagtaattaaaagtatctcagctcaactgaagaacaacaaaaaaaatttaatgagaaaaaaggattaaagtaattggaagcagtatatagaaactgtttcattaagtaataaagtttgaaacaatga

SEQ ID NO: 193222 - DNA, 624 bp, Homo sapiens
  Payload ID: 18145
  Gene Name: transmembrane BAX inhibitor motif containing 4 [Source:EntrezGene
  Acc:51643]
  ENST ID: ENST00000632662
  CDS Start-End: 1-624
atggcagcagcgtggcctccgccaccgtgcacatccgaatgggttctcttaactacagtgacttcaacagtttttttatactttgagtctgtacggacatttgtacatgagagtcctgccttaattttgctgtttgccctcggatctctgggtttgatttttgcgttgattttaaacagacataagtatccccttaacctgtacctactttttggatttacgctgttggaagctctgactgtggcagttgttgttactttctatgatgtatatattattctgcaagctttcatactgactactacagtattttttggtttgactgtgtatactctacaatctaagaaggatttcagcaaatttggagcagggctgtttgctcttttgtggatattgtgcctgtcaggattcttgaagttttttttttatagtgagataatggagttggtcttagccgctgcaggagcccttcttttctgtggattcatcatctatgacacacactcactgatgcataaactgtcacctgaagagtacgtattagctgccatcagcctctacttggatatcatcaatctattcctgcacctgttacggtttctggaagcagttaataaaaagtaa

SEQ ID NO: 193223 - DNA, 2836 bp, Homo sapiens
  Payload ID: 18146
  Gene Name: transmembrane BAX inhibitor motif containing 6
  Uniprot ID: P55061
  ENST ID: ENST00000267115
  CDS Start-End: 86-799
agagcacatccggtgttagaagcgctggtaggccttggagaggcgggttaggaagagtggagactgctgcacggactctggaaccatgaacatatttgatcgaaagatcaactttgatgcgcttttaaaattttctcatataaccccgtcaacgcagcagcacctgaagaaggtctatgcaagttttgccctttgtatgtttgtggcggctgcaggggcctatgtccatatggtcactcatttcattcaggctggcctgctgtctgccttgggctccctgatattgatgatttggctgatggcaacacctcatagccatgaaactgaacagaaaagactgggacttcttgctggatttgcattccttacaggagttggcctgggccctgccctggagttttgtattgctgtcaaccccagcatccttcccactgctttcatgggcacggcaatgatctttacctgcttcaccctcagtgcactctatgccaggcgccgtagctacctctttctgggaggtatcttgatgtcagccctgagcttgttgcttttgtcttccctggggaatgttttctttggatccatttggcttttccaggcaaacctgtatgtgggactggtggtcatgtgtggcttcgtcctttttgatactcaactcattattgaaaaggccgaacatggagatcaagattatatctggcactgcattgatctcttcttagatttcattactgtcttcagaaaactcatgatgatcctggccatgaatgaaaaggataagaagaaagagaagaaatgaagtgaccatccagcctttcccaattagacttcctctccttccacccctcatttcctttttgcacacattacaggtggtgtgttctgtgataatgaaaagcatcagaaaagcttttgtactttgtggtttcctctattttgaattttttgatcaaaaaactgattagcagaatatagtttggagtttggcttcatcttcctggggttcccctcactcccttttttgtcaaccccatctgtagcctcttcctctactcaggcagtcgacccgccacgatgagaagtgggaccagcagagggcgccaacttcaggagtccgctttcccaccaggcttcattcacccagtggacctgaactgtttggtagagccacccggcccttccttcctcattgttgtttggtatgcgcacagttcctgtgggactgggccgtgagttttccattggaaagaagttcagtggtcccattgttaactcagcctcaaatctcaactgtcaggccctacaaagaaaatggagagcctcttctggtggatgctttgctccctctgagctgcccatgctggtctggcaaacacacctttctgctttgccttcacaaaagtaatgtgttccctttcccaccccttgcctgaccctcagggagtcagcctgcttccatccatgggtgggaagacttcagcacaaaggaaagactaattcttgtcaggcatttttgaaaaggctgattatgtgtatcaaggtacagcatcgtagggttcccctaaacttgccctgtttttgtttttttagtttgttatccccttactgagcggcctctactaggtggctgtgattaaatgtcccaagcaaggatagggaaggggaatggttgagcctctggagatcattgtaaccaatcctgccagacctgtttggggcagtggggagcaaacctagataaggacctgtttggggcagcagggagcaaaatctcctttaacaaccaagcagttcctcattcacatcaacagagcgaggctgtgataacttaggaggcagcaatcctaatagtccttcagtgcattttagtctgtctccaactggacaccagtaggtagtgtcaagccagagattcggggcagtagataaatgttcattttactgatgcactttagtttttggtctgttacctgttttccagaaatttgtggccttttaggcgggagttaggcgaccaaaccagtgagagccccaatccctgcagttttgtggcttcaagtgtgggtggacagtcctaatggggatctccagctccttcctgtgggctgccacagacagctacccccagaagggtcaatgttgggagtggttgtggctctgagctgctctacagagcttcagtgtgagaggatcgagccattgaaagctcattaccagtaggacataatttttggctctccctattcacaaccagtgcacagtttgacacagtggcctcaggttcacagtgcaccatgtcactgtgctatcctacgaaatcatttgtttctaagttgtgtttattcctggagtgacatgccaccccgaatggctcactttcactgaggatgctgtcctctgatttagctgctgcctccagcctctggcttgagaacttactaaaggcacttccttcctgttaaacccctgttaactctccataaatttggtgattctctgctaggcctaagattttgagttaacatctcttgaagccaaactccaccttctgtgctttttgcttgggataatggagtttttctttagaaacagtgccaagaatgacaagatattaaaaaaaaaaaagaaagaaaaaaaaaaaaacacctacttttaaagaaaatacctaacagatttttaatatagttatctctaccactttcttttctagtttcttgattttcagctcaggctgcattctaactcatactgtgaagacaaaggtgtttttgattcagaaatatatgaaatctgcatagtcttaatttgtaaaaaataaagaaaattccttaacctt

SEQ ID NO: 193224 - DNA, 2598 bp, Homo sapiens
  Payload ID: 18146
  Gene Name: transmembrane BAX inhibitor motif containing 6
  Uniprot ID: P55061
  ENST ID: ENST00000395006
  CDS Start-End: 39-752
ttctgcagagtggagactgctgcacggactctggaaccatgaacatatttgatcgaaagatcaactttgatgcgcttttaaaattttctcatataaccccgtcaacgcagcagcacctgaagaaggtctatgcaagttttgccctttgtatgtttgtggcggctgcaggggcctatgtccatatggtcactcatttcattcaggctggcctgctgtctgccttgggctccctgatattgatgatttggctgatggcaacacctcatagccatgaaactgaacagaaaagactgggacttcttgctggatttgcattccttacaggagttggcctgggccctgccctggagttttgtattgctgtcaaccccagcatccttcccactgctttcatgggcacggcaatgatctttacctgcttcaccctcagtgcactctatgccaggcgccgtagctacctctttctgggaggtatcttgatgtcagccctgagcttgttgcttttgtcttccctggggaatgttttctttggatccatttggcttttccaggcaaacctgtatgtgggactggtggtcatgtgtggcttcgtcctttttgatactcaactcattattgaaaaggccgaacatggagatcaagattatatctggcactgcattgatctcttcttagatttcattactgtcttcagaaaactcatgatgatcctggccatgaatgaaaaggataagaagaaagagaagaaatgaagtgaccatccagcctttcccaattagacttcctctccttccacccctcatttcctttttgcacacattacaggtggtgtgttctgtgataatgaaaagcatcagaaaagcttttgtactttgtggtttcctctattttgaattttttgatcaaaaaactgattagcagaatatagtttggagtttggcttcatcttcctggggttcccctcactcccttttttgtcaaccccatctgtagcctcttcctctactcaggcagtcgacccgccacgatgagaagtgggaccagcagagggcgccaacttcaggagtccgctttcccaccaggcttcattcacccagtggacctgaactgtttggtagagccacccggcccttccttcctcattgttgtttggtatgcgcacagttcctgtgggactgggccgtgagttttccattggaaagaagttcagtggtcccattgttaactcagcctcaaatctcaactgtcaggccctacaaagaaaatggagagcctcttctggtggatgctttgctccctctgagctgcccatgctggtctggcaaacacacctttctgctttgccttcacaaaagtaatgtgttccctttcccaccccttgcctgaccctcagggagtcagcctgcttccatccatgggtgggaagacttcagcacaaaggaaagactaattcttgtcaggcatttttgaaaaggctgattatgtgtatcaaggtacagcatcgtagggttcccctaaacttgccctgtttttgtttttttagtttgttatccccttactgagcggcctctactaggtggctgtgattaaatgtcccaagcaaggatagggaaggggaatggttgagcctctggagatcattgtaaccaatcctgccagacctgtttggggcagtggggagcaaacctagataaggacctgtttggggcagcagggagcaaaatctcctttaacaaccaagcagttcctcattcacatcaacagagcgaggctgtgataacttaggaggcagcaatcctaatagtccttcagtgcattttagtctgtctccaactggacaccagtaggtagtgtcaagccagagattcggggcagtagataaatgttcattttactgatgcactttagtttttggtctgttacctgttttccagaaatttgtggccttttaggcgggagttaggcgaccaaaccagtgagagccccaatccctgcagttttgtggcttcaagtgtgggtggacagtcctaatggggatctccagctccttcctgtgggctgccacagacagctacccccagaagggtcaatgttgggagtggttgtggctctgagctgctctacagagcttcagtgtgagaggatcgagccattgaaagctcattaccagtaggacataatttttggctctccctattcacaaccagtgcacagtttgacacagtggcctcaggttcacagtgcaccatgtcactgtgctatcctacgaaatcatttgtttctaagttgtgtttattcctggagtgacatgccaccccgaatggctcactttcactgaggatgctgtcctctgatttagctgctgcctccagcctctggcttgagaacttactaaaggcacttccttcctgttaaacccctgttaactctccataaatttggtgattctctgctaggcctaagattttgagttaacatctcttgaagccaaactccaccttctgtgctttttgcttgggataatggagtttttctttagaaacagtgccaagaatgacaagatattaaaaaaaaaaaagaaagaaaaaaaaaaaaaca

SEQ ID NO: 193225 - DNA, 3254 bp, Homo sapiens
  Payload ID: 18146
  Gene Name: transmembrane BAX inhibitor motif containing 6
  Uniprot ID: P55061
  ENST ID: ENST00000423828
  CDS Start-End: 329-1216
acagtgctgaagcgggggtggggcggaggcgagtctgcgggggttttggggggtgtcgaggcctctattctgccccagagcgctggcgaaggccccttctcagcccgccttttcctttctcccgctccttctcctctactaagtgtagacgcagggccccttggcctagcttcgatcgttcgaattcagagcacgtccttccgaggtgaaggaacgcgaaactccacccatccgattgctgttcggctgcgggcgggtcctttggtcgggctgaccctgggtgagcggcccggagccaagactcgaggtagggcctggcgggcgggtgatgtcacactcctctgtgacacgcgaggctcctcagttacttagccaacggcagaggcgggaagtgagaggagtctggggctggggctgccttccaggcccacggggcggccccgctcttttcggattggttacctttgggcagagtggagactgctgcacggactctggaaccatgaacatatttgatcgaaagatcaactttgatgcgcttttaaaattttctcatataaccccgtcaacgcagcagcacctgaagaaggtctatgcaagttttgccctttgtatgtttgtggcggctgcaggggcctatgtccatatggtcactcatttcattcaggctggcctgctgtctgccttgggctccctgatattgatgatttggctgatggcaacacctcatagccatgaaactgaacagaaaagactgggacttcttgctggatttgcattccttacaggagttggcctgggccctgccctggagttttgtattgctgtcaaccccagcatccttcccactgctttcatgggcacggcaatgatctttacctgcttcaccctcagtgcactctatgccaggcgccgtagctacctctttctgggaggtatcttgatgtcagccctgagcttgttgcttttgtcttccctggggaatgttttctttggatccatttggcttttccaggcaaacctgtatgtgggactggtggtcatgtgtggcttcgtcctttttgatactcaactcattattgaaaaggccgaacatggagatcaagattatatctggcactgcattgatctcttcttagatttcattactgtcttcagaaaactcatgatgatcctggccatgaatgaaaaggataagaagaaagagaagaaatgaagtgaccatccagcctttcccaattagacttcctctccttccacccctcatttcctttttgcacacattacaggtggtgtgttctgtgataatgaaaagcatcagaaaagcttttgtactttgtggtttcctctattttgaattttttgatcaaaaaactgattagcagaatatagtttggagtttggcttcatcttcctggggttcccctcactcccttttttgtcaaccccatctgtagcctcttcctctactcaggcagtcgacccgccacgatgagaagtgggaccagcagagggcgccaacttcaggagtccgctttcccaccaggcttcattcacccagtggacctgaactgtttggtagagccacccggcccttccttcctcattgttgtttggtatgcgcacagttcctgtgggactgggccgtgagttttccattggaaagaagttcagtggtcccattgttaactcagcctcaaatctcaactgtcaggccctacaaagaaaatggagagcctcttctggtggatgctttgctccctctgagctgcccatgctggtctggcaaacacacctttctgctttgccttcacaaaagtaatgtgttccctttcccaccccttgcctgaccctcagggagtcagcctgcttccatccatgggtgggaagacttcagcacaaaggaaagactaattcttgtcaggcatttttgaaaaggctgattatgtgtatcaaggtacagcatcgtagggttcccctaaacttgccctgtttttgtttttttagtttgttatccccttactgagcggcctctactaggtggctgtgattaaatgtcccaagcaaggatagggaaggggaatggttgagcctctggagatcattgtaaccaatcctgccagacctgtttggggcagtggggagcaaacctagataaggacctgtttggggcagcagggagcaaaatctcctttaacaaccaagcagttcctcattcacatcaacagagcgaggctgtgataacttaggaggcagcaatcctaatagtccttcagtgcattttagtctgtctccaactggacaccagtaggtagtgtcaagccagagattcggggcagtagataaatgttcattttactgatgcactttagtttttggtctgttacctgttttccagaaatttgtggccttttaggcgggagttaggcgaccaaaccagtgagagccccaatccctgcagttttgtggcttcaagtgtgggtggacagtcctaatggggatctccagctccttcctgtgggctgccacagacagctacccccagaagggtcaatgttgggagtggttgtggctctgagctgctctacagagcttcagtgtgagaggatcgagccattgaaagctcattaccagtaggacataatttttggctctccctattcacaaccagtgcacagtttgacacagtggcctcaggttcacagtgcaccatgtcactgtgctatcctacgaaatcatttgtttctaagttgtgtttattcctggagtgacatgccaccccgaatggctcactttcactgaggatgctgtcctctgatttagctgctgcctccagcctctggcttgagaacttactaaaggcacttccttcctgttaaacccctgttaactctccataaatttggtgattctctgctaggcctaagattttgagttaacatctcttgaagccaaactccaccttctgtgctttttgcttgggataatggagtttttctttagaaacagtgccaagaatgacaagatattaaaaaaaaaaaagaaagaaaaaaaaaaaaacacctacttttaaagaaaatacctaacagatttttaatatagttatctctaccactttcttttctagtttcttgattttcagctcaggctgcattctaactcatactgtgaagacaaaggtgtttttgattcagaaatatatgaaatctgcatagtcttaatttgtaaaaaataaagaaaattccttaaccttt

SEQ ID NO: 193226 - DNA, 538 bp, Homo sapiens
  Payload ID: 18146
  Gene Name: transmembrane BAX inhibitor motif containing 6
  ENST ID: ENST00000549966
  CDS Start-End: 214-538
aagtgggcgagtcagagcacatccggtgttagaagcgctggtaggccttggagaggcgggttaggaagagacagggtttcgccgtgttggccagactggtctcgaactcctgacgtcaaagtgatccacctgcctcggcctcccaaagtactgggattacaggcgtgagccactgtgcccaaccttggagactgctgcacggactctggaaccatgaacatatttgatcgaaagatcaactttgatgcgcttttaaaattttctcatataaccccgtcaacgcagcagcacctgaagaaggtctatgcaagttttgccctttgtatgtttgtggcggctgcaggggcctatgtccatatggtcactcatttcattcaggctggcctgctgtctgccttgggctccctgatattgatgatttggctgatggcaacacctcatagccatgaaactgaacagaaaagactgggacttcttgctggatttgcattccttacaggagttggcctgggccctgccctggagttttgtattgctg

SEQ ID NO: 193227 - DNA, 2964 bp, Homo sapiens
  Payload ID: 18146
  Gene Name: transmembrane BAX inhibitor motif containing 6
  Uniprot ID: P55061
  ENST ID: ENST00000552699
  CDS Start-End: 236-1123
agagcacatccggtgttagaagcgctggtaggccttggagaggcgggttaggaagacgcagggccccttggcctagcttcgatcgttcgaattcagagcacgtccttccgaggtgaaggaacgcgaaactccacccatccgattgctgttcggctgcgggcgggtcctttggtcgggctgaccctgggtgagcggcccggagccaagactcgaggtagggcctggcgggcgggtgatgtcacactcctctgtgacacgcgaggctcctcagttacttagccaacggcagaggcgggaagtgagaggagtctggggctggggctgccttccaggcccacggggcggccccgctcttttcggattggttacctttgggcagagtggagactgctgcacggactctggaaccatgaacatatttgatcgaaagatcaactttgatgcgcttttaaaattttctcatataaccccgtcaacgcagcagcacctgaagaaggtctatgcaagttttgccctttgtatgtttgtggcggctgcaggggcctatgtccatatggtcactcatttcattcaggctggcctgctgtctgccttgggctccctgatattgatgatttggctgatggcaacacctcatagccatgaaactgaacagaaaagactgggacttcttgctggatttgcattccttacaggagttggcctgggccctgccctggagttttgtattgctgtcaaccccagcatccttcccactgctttcatgggcacggcaatgatctttacctgcttcaccctcagtgcactctatgccaggcgccgtagctacctctttctgggaggtatcttgatgtcagccctgagcttgttgcttttgtcttccctggggaatgttttctttggatccatttggcttttccaggcaaacctgtatgtgggactggtggtcatgtgtggcttcgtcctttttgatactcaactcattattgaaaaggccgaacatggagatcaagattatatctggcactgcattgatctcttcttagatttcattactgtcttcagaaaactcatgatgatcctggccatgaatgaaaaggataagaagaaagagaagaaatgaagtgaccatccagcctttcccaattagacttcctctccttccacccctcatttcctttttgcacacattacaggtggtgtgttctgtgataatgaaaagcatcagaaaagcttttgtactttgtggtttcctctattttgaattttttgatcaaaaaactgattagcagaatatagtttggagtttggcttcatcttcctggggttcccctcactcccttttttgtcaaccccatctgtagcctcttcctctactcaggcagtcgacccgccacgatgagaagtgggaccagcagagggcgccaacttcaggagtccgctttcccaccaggcttcattcacccagtggacctgaactgtttggtagagccacccggcccttccttcctcattgttgtttggtatgcgcacagttcctgtgggactgggccgtgagttttccattggaaagaagttcagtggtcccattgttaactcagcctcaaatctcaactgtcaggccctacaaagaaaatggagagcctcttctggtggatgctttgctccctctgagctgcccatgctggtctggcaaacacacctttctgctttgccttcacaaaagtaatgtgttccctttcccaccccttgcctgaccctcagggagtcagcctgcttccatccatgggtgggaagacttcagcacaaaggaaagactaattcttgtcaggcatttttgaaaaggctgattatgtgtatcaaggtacagcatcgtagggttcccctaaacttgccctgtttttgtttttttagtttgttatccccttactgagcggcctctactaggtggctgtgattaaatgtcccaagcaaggatagggaaggggaatggttgagcctctggagatcattgtaaccaatcctgccagacctgtttggggcagtggggagcaaacctagataaggacctgtttggggcagcagggagcaaaatctcctttaacaaccaagcagttcctcattcacatcaacagagcgaggctgtgataacttaggaggcagcaatcctaatagtccttcagtgcattttagtctgtctccaactggacaccagtaggtagtgtcaagccagagattcggggcagtagataaatgttcattttactgatgcactttagtttttggtctgttacctgttttccagaaatttgtggccttttaggcgggagttaggcgaccaaaccagtgagagccccaatccctgcagttttgtggcttcaagtgtgggtggacagtcctaatggggatctccagctccttcctgtgggctgccacagacagctacccccagaagggtcaatgttgggagtggttgtggctctgagctgctctacagagcttcagtgtgagaggatcgagccattgaaagctcattaccagtaggacataatttttggctctccctattcacaaccagtgcacagtttgacacagtggcctcaggttcacagtgcaccatgtcactgtgctatcctacgaaatcatttgtttctaagttgtgtttattcctggagtgacatgccaccccgaatggctcactttcactgaggatgctgtcctctgatttagctgctgcctccagcctctggcttgagaacttactaaaggcacttccttcctgttaaacccctgttaactctccataaatttggtgattctctgctaggcctaagattttgagttaacatctcttgaagccaaactccaccttctgtgctttttgcttgggataatggagtttttctttagaaacagtgccaagaatgacaagatattaaaaaaaaaaaagaaagaaaaaaaaaa

SEQ ID NO: 193228 - DNA, 2494 bp, Homo sapiens
  Payload ID: 18146
  Gene Name: transmembrane BAX inhibitor motif containing 6
  ENST ID: ENST00000547798
  CDS Start-End: 65-667
ttttcttagaaccccgtcaacgcagcagcacctgaagaaggtctatgcaagttttgccctttgtatgtttgtggcggctgcaggggcctatgtccatatggtcactcatttcattcaggctggcctgctgtctgccttgggctccctgatattgatgatttggctgatggcaacacctcatagccatgaaactgaacagaaaagactgggacttcttgctggatttgcattccttacaggagttggcctgggccctgccctggagttttgtattgctgtcaaccccagcatccttcccactgctttcatgggcacggcaatgatctttacctgcttcaccctcagtgcactctatgccaggcgccgtagctacctctttctgggaggtatcttgatgtcagccctgagcttgttgcttttgtcttccctggggaatgttttctttggatccatttggcttttccaggcaaacctgtatgtgggactggtggtcatgtgtggcttcgtcctttttgatactcaactcattattgaaaaggccgaacatggagatcaagattatatctggcactgcattgatctcttcttagatttcattactgtcttcagaaaactcatgatgatcctggccatgaatgaaaaggataagaagaaagagaagaaatgaagtgaccatccagcctttcccaattagacttcctctccttccacccctcatttcctttttgcacacattacaggtggtgtgttctgtgataatgaaaagcatcagaaaagcttttgtactttgtggtttcctctattttgaattttttgatcaaaaaactgattagcagaatatagtttggagtttggcttcatcttcctggggttcccctcactcccttttttgtcaaccccatctgtagcctcttcctctactcaggcagtcgacccgccacgatgagaagtgggaccagcagagggcgccaacttcaggagtccgctttcccaccaggcttcattcacccagtggacctgaactgtttggtagagccacccggcccttccttcctcattgttgtttggtatgcgcacagttcctgtgggactgggccgtgagttttccattggaaagaagttcagtggtcccattgttaactcagcctcaaatctcaactgtcaggccctacaaagaaaatggagagcctcttctggtggatgctttgctccctctgagctgcccatgctggtctggcaaacacacctttctgctttgccttcacaaaagtaatgtgttccctttcccaccccttgcctgaccctcagggagtcagcctgcttccatccatgggtgggaagacttcagcacaaaggaaagactaattcttgtcaggcatttttgaaaaggctgattatgtgtatcaaggtacagcatcgtagggttcccctaaacttgccctgtttttgtttttttagtttgttatccccttactgagcggcctctactaggtggctgtgattaaatgtcccaagcaaggatagggaaggggaatggttgagcctctggagatcattgtaaccaatcctgccagacctgtttggggcagtggggagcaaacctagataaggacctgtttggggcagcagggagcaaaatctcctttaacaaccaagcagttcctcattcacatcaacagagcgaggctgtgataacttaggaggcagcaatcctaatagtccttcagtgcattttagtctgtctccaactggacaccagtaggtagtgtcaagccagagattcggggcagtagataaatgttcattttactgatgcactttagtttttggtctgttacctgttttccagaaatttgtggccttttaggcgggagttaggcgaccaaaccagtgagagccccaatccctgcagttttgtggcttcaagtgtgggtggacagtcctaatggggatctccagctccttcctgtgggctgccacagacagctacccccagaagggtcaatgttgggagtggttgtggctctgagctgctctacagagcttcagtgtgagaggatcgagccattgaaagctcattaccagtaggacataatttttggctctccctattcacaaccagtgcacagtttgacacagtggcctcaggttcacagtgcaccatgtcactgtgctatcctacgaaatcatttgtttctaagttgtgtttattcctggagtgacatgccaccccgaatggctcactttcactgaggatgctgtcctctgatttagctgctgcctccagcctctggcttgagaacttactaaaggcacttccttcctgttaaacccctgttaactctccataaatttggtgattctctgctaggcctaagattttgagttaacatctcttgaagccaaactccaccttctgtgctttttgcttgggataatggagtttttctttagaaacagtgccaagaatgacaagatattaaaaaaaaaaaag

SEQ ID NO: 193229 - DNA, 373 bp, Homo sapiens
  Payload ID: 18146
  Gene Name: transmembrane BAX inhibitor motif containing 6
  ENST ID: ENST00000548894
  CDS Start-End: 325-373
agagcacatccggtgttagaagcgctggtaggccttggagaggcgggttaggaagagacagggtttcgccgtgttggccagactggtctcgaactcctgacgtcaaagtgatccacctgcctcggcctcccaaagtactgggattacaggcgtgagccactgtgcccaacctgtaagtcatttttgagtcaacgatatttttaatttacaatgggtgtatccagatgtaagccatcgcaaatcaaggagtgtaccgaatgagtatcaatttctcccagtgataggtcaaccctgagtggagactgctgcacggactctggaaccatgaacatatttgatcgaaagatcaactttgatgcgcttttaaaatttt

SEQ ID NO: 193230 - DNA, 669 bp, Homo sapiens
  Payload ID: 18146
  Gene Name: transmembrane BAX inhibitor motif containing 6
  ENST ID: ENST00000547187
  CDS Start-End: 383-669
ggcgagtcagagcacatccggtgttagaagcgctggtaggccttggagaggcgggttaggaagacgcagggccccttggcctagcttcgatcgttcgaattcagagcacgtccttccgaggtgaaggaacgcgaaactccacccatccgattgctgttcggctgcgggcgggtcctttggtcgggctgaccctgggtgagcggcccggagccaagactcgagagtttctaaccaaactgcatgcagcccttcgtagtttttatacacattttgttttccaaagatggtgttcgagaccaaggagagaaaggctgtctccttgacttaaaggttacctaagtgaccccttgagagtggagactgctgcacggactctggaaccatgaacatatttgatcgaaagatcaactttgatgcgcttttaaaattttctcatataaccccgtcaacgcagcagcacctgaagaaggtctatgcaagttttgccctttgtatgtttgtggcggctgcaggggcctatgtccatatggtcactcatttcattcaggctggcctgctgtctgccttgggctccctgatattgatgatttggctgatggcaacacctcatagccatgaaactgaacagaaaagactgggacttcttgctggatttgcattccttacagg

SEQ ID NO: 193231 - DNA, 551 bp, Homo sapiens
  Payload ID: 18146
  Gene Name: transmembrane BAX inhibitor motif containing 6
  ENST ID: ENST00000548713
  CDS Start-End: 521-551
gaaggtacgtctgaacctagtactgggcgaactgggagtgagaaatggaaagggagttagcagttactgtctgagcaagagtggcagtagcttccttctgcggacagatggcaccctgaaggaacgaggccctgctcggagaccagactcgggaaaacaggacgcagggccccttggcctagcttcgatcgttcgaattcagagcacgtccttccgaggtgaaggaacgcgaaactccacccatccgattgctgttcggctgcgggcgggtcctttggtcgggctgaccctgggtgagcggcccggagccaagactcgagaattactacccggtgccagcccgggctgcttggggtcatcagcctttcattgaccacccccacaacaaaaatcactatgaacttgagactgtgttctagcaacttgtgaatgtgtaacccagtagaagggctgactgtgcttgaaacagacaaggattttaaggtcaaagagtggagactgctgcacggactctggaaccatgaacatatttgatcgaaagatcaactttg

SEQ ID NO: 193232 - DNA, 2771 bp, Homo sapiens
  Payload ID: 18146
  Gene Name: transmembrane BAX inhibitor motif containing 6
  Uniprot ID: P55061
  ENST ID: ENST00000549385
  CDS Start-End: 228-941
agaagcgctggtaggccttggagaggcgggttaggaagacgcagggccccttggcctagcttcgatcgttcgaattcagagcacgtccttccgaggtgaaggaacgcgaaactccacccatccgattgctgttcggctgcgggcgggtcctttggtcgggctgaccctgggtgagcggcccggagccaagactcgagagtggagactgctgcacggactctggaaccatgaacatatttgatcgaaagatcaactttgatgcgcttttaaaattttctcatataaccccgtcaacgcagcagcacctgaagaaggtctatgcaagttttgccctttgtatgtttgtggcggctgcaggggcctatgtccatatggtcactcatttcattcaggctggcctgctgtctgccttgggctccctgatattgatgatttggctgatggcaacacctcatagccatgaaactgaacagaaaagactgggacttcttgctggatttgcattccttacaggagttggcctgggccctgccctggagttttgtattgctgtcaaccccagcatccttcccactgctttcatgggcacggcaatgatctttacctgcttcaccctcagtgcactctatgccaggcgccgtagctacctctttctgggaggtatcttgatgtcagccctgagcttgttgcttttgtcttccctggggaatgttttctttggatccatttggcttttccaggcaaacctgtatgtgggactggtggtcatgtgtggcttcgtcctttttgatactcaactcattattgaaaaggccgaacatggagatcaagattatatctggcactgcattgatctcttcttagatttcattactgtcttcagaaaactcatgatgatcctggccatgaatgaaaaggataagaagaaagagaagaaatgaagtgaccatccagcctttcccaattagacttcctctccttccacccctcatttcctttttgcacacattacaggtggtgtgttctgtgataatgaaaagcatcagaaaagcttttgtactttgtggtttcctctattttgaattttttgatcaaaaaactgattagcagaatatagtttggagtttggcttcatcttcctggggttcccctcactcccttttttgtcaaccccatctgtagcctcttcctctactcaggcagtcgacccgccacgatgagaagtgggaccagcagagggcgccaacttcaggagtccgctttcccaccaggcttcattcacccagtggacctgaactgtttggtagagccacccggcccttccttcctcattgttgtttggtatgcgcacagttcctgtgggactgggccgtgagttttccattggaaagaagttcagtggtcccattgttaactcagcctcaaatctcaactgtcaggccctacaaagaaaatggagagcctcttctggtggatgctttgctccctctgagctgcccatgctggtctggcaaacacacctttctgctttgccttcacaaaagtaatgtgttccctttcccaccccttgcctgaccctcagggagtcagcctgcttccatccatgggtgggaagacttcagcacaaaggaaagactaattcttgtcaggcatttttgaaaaggctgattatgtgtatcaaggtacagcatcgtagggttcccctaaacttgccctgtttttgtttttttagtttgttatccccttactgagcggcctctactaggtggctgtgattaaatgtcccaagcaaggatagggaaggggaatggttgagcctctggagatcattgtaaccaatcctgccagacctgtttggggcagtggggagcaaacctagataaggacctgtttggggcagcagggagcaaaatctcctttaacaaccaagcagttcctcattcacatcaacagagcgaggctgtgataacttaggaggcagcaatcctaatagtccttcagtgcattttagtctgtctccaactggacaccagtaggtagtgtcaagccagagattcggggcagtagataaatgttcattttactgatgcactttagtttttggtctgttacctgttttccagaaatttgtggccttttaggcgggagttaggcgaccaaaccagtgagagccccaatccctgcagttttgtggcttcaagtgtgggtggacagtcctaatggggatctccagctccttcctgtgggctgccacagacagctacccccagaagggtcaatgttgggagtggttgtggctctgagctgctctacagagcttcagtgtgagaggatcgagccattgaaagctcattaccagtaggacataatttttggctctccctattcacaaccagtgcacagtttgacacagtggcctcaggttcacagtgcaccatgtcactgtgctatcctacgaaatcatttgtttctaagttgtgtttattcctggagtgacatgccaccccgaatggctcactttcactgaggatgctgtcctctgatttagctgctgcctccagcctctggcttgagaacttactaaaggcacttccttcctgttaaacccctgttaactctccataaatttggtgattctctgctaggcctaagattttgagttaacatctcttgaagccaaactccaccttctgtgctttttgcttgggataatggagtttttctttagaaacagtgccaagaatgacaagatattaaaaaaaaaaaagaaa

SEQ ID NO: 193233 - DNA, 640 bp, Homo sapiens
  Payload ID: 18146
  Gene Name: transmembrane BAX inhibitor motif containing 6
  ENST ID: ENST00000547832
  CDS Start-End: 226-640
tgggcgagtcagagcacatccggtgttagaagcgctggtaggccttggagaggcgggttaggaagagtttctaaccaaactgcatgcagcccttcgtagtttttatacacattttgttttccaaagatggtgttcgagaccaaggagagaaaggctgtctccttgacttaaaggttacctaagtgaccccttgagagtggagactgctgcacggactctggaaccatgaacatatttgatcgaaagatcaactttgatgcgcttttaaaattttctcatataaccccgtcaacgcagcagcacctgaagaaggtctatgcaagttttgccctttgtatgtttgtggcggctgcaggggcctatgtccatatggtcactcatttcattcaggctggcctgctgtctgccttgggctccctgatattgatgatttggctgatggcaacacctcatagccatgaaactgaacagaaaagactgggacttcttgctggatttgcattccttacaggagttggcctgggccctgccctggagttttgtattgctgtcaaccccagcatccttcccactgctttcatgggcacggcaatgatctttacctgcttcaccctcagtgcactctatgccaggcgccgta

SEQ ID NO: 193234 - DNA, 521 bp, Homo sapiens
  Payload ID: 18146
  Gene Name: transmembrane BAX inhibitor motif containing 6
  ENST ID: ENST00000546914
  CDS Start-End: 235-521
agagcacatccggtgttagaagcgctggtaggccttggagaggcgggttaggaagtagagacgggcttttgccaagttgtccagcctggtctcgaactccacacctcaagcgattcgcccgccttgacctcccaaattgctaggattacaggtgtaatcctttcctaaagaaaaagagtcatctctcctgaagaataagaaaagagtggagactgctgcacggactctggaaccatgaacatatttgatcgaaagatcaactttgatgcgcttttaaaattttctcatataaccccgtcaacgcagcagcacctgaagaaggtctatgcaagttttgccctttgtatgtttgtggcggctgcaggggcctatgtccatatggtcactcatttcattcaggctggcctgctgtctgccttgggctccctgatattgatgatttggctgatggcaacacctcatagccatgaaactgaacagaaaagactgggacttcttgctggatttgcattccttacagg

SEQ ID NO: 193235 - DNA, 469 bp, Homo sapiens
  Payload ID: 18146
  Gene Name: transmembrane BAX inhibitor motif containing 6
  ENST ID: ENST00000548809
  CDS Start-End: 437-469
tggcggcctcagccggcatcgaatcaccgcggttcccagagggcgtgaggggctggcgtggacacaccgggaatggaccgtaccctttttcaaaaggaactcatgatgtatacaaatagaatgctcttccccttctttgctggccaattcctactcatctgttaaaaccaagcttagagattacctctttgatgacatctctaccaagtctgattgagaacatctctgtgagcacatagtattctaacatctctatcatcataccatgaaatcatcagactaaagccagaatcccaagactgcagcgctaccccttcacaagccgtcgggctgtcccgggcggggccggcccattttcactttctccactagaggcagcagcgcaccgtgaccctggcttactacgagtggagactgctgcacggactctggaaccatgaacatatttgatcgaaagatcaactttgat

SEQ ID NO: 193236 - DNA, 533 bp, Homo sapiens
  Payload ID: 18146
  Gene Name: transmembrane BAX inhibitor motif containing 6
  ENST ID: ENST00000550951
  CDS Start-End: 401-533
gttagaagcgctggtaggccttggagaggcgggttaggaagacgcagggccccttggcctagcttcgatcgttcgaattcagagcacgtccttccgaggtgaaggaacgcgaaactccacccatccgattgctgttcggctgcgggcgggtcctttggtcgggctgaccctgggtgagcggcccggagccaagactcgagaattactacccggtgccagcccgggctgcttggggtcatcagcctttcattgaccacccccacaacaaaaatcactatgaacttgagactgtgttctagcaacttgtgaatgtgtaacccagtagaagggctgactgtgcttgaaacagacaaggattttaaggtcaaagagtggagactgctgcacggactctggaaccatgaacatatttgatcgaaagatcaactttgatgcgcttttaaaattttctcatataaccccgtcaacgcagcagcacctgaagaaggtctatgcaagttttgccctttgtatgtttgtggcggctgcagggg

SEQ ID NO: 193237 - DNA, 759 bp, Homo sapiens
  Payload ID: 18146
  Gene Name: transmembrane BAX inhibitor motif containing 6
  ENST ID: ENST00000549445
  CDS Start-End: 473-759
ggtgttagaagcgctggtaggccttggagaggcgggttaggaagacgcagggccccttggcctagcttcgatcgttcgaattcagagcacgtccttccgaggtgaaggaacgcgaaactccacccatccgattgctgttcggctgcgggcgggtcctttggtcgggctgaccctgggtgagcggcccggagccaagactcgagagacagggtttcgccgtgttggccagactggtctcgaactcctgacgtcaaagtgatccacctgcctcggcctcccaaagtactgggattacaggcgtgagccactgtgcccaacctgtaagtcatttttgagtcaacgatatttttaatttacaatgggtgtatccagatgtaagccatcgcaaatcaaggagtgtaccgaatgagtatcaatttctcccagtgataggtcaaccctgagtggagactgctgcacggactctggaaccatgaacatatttgatcgaaagatcaactttgatgcgcttttaaaattttctcatataaccccgtcaacgcagcagcacctgaagaaggtctatgcaagttttgccctttgtatgtttgtggcggctgcaggggcctatgtccatatggtcactcatttcattcaggctggcctgctgtctgccttgggctccctgatattgatgatttggctgatggcaacacctcatagccatgaaactgaacagaaaagactgggacttcttgctggatttgcattccttacagg

SEQ ID NO: 193238 - DNA, 761 bp, Homo sapiens
  Payload ID: 18146
  Gene Name: transmembrane BAX inhibitor motif containing 6
  ENST ID: ENST00000550445
  CDS Start-End: 325-761
gggggtggggcggaggcgagtctgcgggggttttggggggtgtcgaggcctctattctgccccagagcgctggcgaaggccccttctcagcccgccttttcctttctcccgctccttctcctctactaagtgtagacgcagggccccttggcctagcttcgatcgttcgaattcagagcacgtccttccgaggtgaaggaacgcgaaactccacccatccgattgctgttcggctgcgggcgggtcctttggtcgggctgaccctgggtgagcggcccggagccaagactcgagagtggagactgctgcacggactctggaaccatgaacatatttgatcgaaagatcaactttgatgcgcttttaaaattttctcatataaccccgtcaacgcagcagcacctgaagaaggtctatgcaagttttgccctttgtatgtttgtggcggctgcaggggcctatgtccatatggtcactcatttcattcaggctggcctgctgtctgccttgggctccctgatattgatgatttggctgatggcaacacctcatagccatgaaactgaacagaaaagactgggacttcttgctggatttgcattccttacaggagttggcctgggccctgccctggagttttgtattgctgtcaaccccagcatccttcccactgctttcatgggcacggcaatgatctttacctgcttcaccctcagtgcactctatgccaggcgccgtagctacctctttctgggaggtat

SEQ ID NO: 193239 - DNA, 574 bp, Homo sapiens
  Payload ID: 18146
  Gene Name: transmembrane BAX inhibitor motif containing 6
  ENST ID: ENST00000552635
  CDS Start-End: 86-427
agagcacatccggtgttagaagcgctggtaggccttggagaggcgggttaggaagagtggagactgctgcacggactctggaaccatgaacatatttgatcgaaagatcaactttgatgcgcttttaaaattttctcatataaccccgtcaacgcagcagcacctgaagaaggtctatgcaagttttgccctttgtatgtttgtggcggctgcaggggcctatgtccatatggtcactcatttcattcaggctggcctgctgtctgccttgggctccctgatattgatgatttggctgatggcaacacctcatagccatgaaactgaacagaaaagactgggacttcttgctggatttgcattccttacaggagttggcctgggccctgccctggagttttgtattgctgtcaaccccagcccttaatctaatggtctttttttctaacagcatccttcccactgctttcatgggcacggcaatgatctttacctgcttcaccctcagtgcactctatgccaggcgccgtagctacctctttctgggaggtatcttgatgtcagccctgagctt

SEQ ID NO: 193240 - DNA, 882 bp, Homo sapiens
  Payload ID: 18146
  Gene Name: transmembrane BAX inhibitor motif containing 6
  Uniprot ID: P55061
  ENST ID: ENST00000552370
  CDS Start-End: 117-830
ctcagaggagagagcaacaaccttagtaggttctgcagcttctcactgtatctgtccttaagaacagaattaacaaaagttctgagagtggagactgctgcacggactctggaaccatgaacatatttgatcgaaagatcaactttgatgcgcttttaaaattttctcatataaccccgtcaacgcagcagcacctgaagaaggtctatgcaagttttgccctttgtatgtttgtggcggctgcaggggcctatgtccatatggtcactcatttcattcaggctggcctgctgtctgccttgggctccctgatattgatgatttggctgatggcaacacctcatagccatgaaactgaacagaaaagactgggacttcttgctggatttgcattccttacaggagttggcctgggccctgccctggagttttgtattgctgtcaaccccagcatccttcccactgctttcatgggcacggcaatgatctttacctgcttcaccctcagtgcactctatgccaggcgccgtagctacctctttctgggaggtatcttgatgtcagccctgagcttgttgcttttgtcttccctggggaatgttttctttggatccatttggcttttccaggcaaacctgtatgtgggactggtggtcatgtgtggcttcgtcctttttgatactcaactcattattgaaaaggccgaacatggagatcaagattatatctggcactgcattgatctcttcttagatttcattactgtcttcagaaaactcatgatgatcctggccatgaatgaaaaggataagaagaaagagaagaaatgaagtgaccatccagcctttcccaattagacttcctctccttccacccctcatt

SEQ ID NO: 193241 - DNA, 556 bp, Homo sapiens
  Payload ID: 18146
  Gene Name: transmembrane BAX inhibitor motif containing 6
  ENST ID: ENST00000546796
  CDS Start-End: 121-556
ttccttaaaatttggacttgtacagtaaggacttcaactgaccttcctcagactgaggactgttcccagtgtatacatcaagtcactgagagtggagactgctgcacggactctggaaccatgaacatatttgatcgaaagatcaactttgatgcgcttttaaaattttctcatataaccccgtcaacgcagcagcacctgaagaaggtctatgcaagttttgccctttgtatgtttgtggcggctgcaggggcctatgtccatatggtcactcatttcattcaggctggcctgctgtctgccttgggctccctgatattgatgatttggctgatggcaacacctcatagccatgaaactgaacagaaaagactgggacttcttgctggatttgcattccttacaggagttggcctgggccctgccctggagttttgtattgctgtcaaccccagcatccttcccactgctttcatgggcacggcaatgatctttacctgcttcaccctcagtgcactctatgccaggcgccgtagctacctctttctgggaggta

SEQ ID NO: 193242 - DNA, 582 bp, Homo sapiens
  Payload ID: 18146
  Gene Name: transmembrane BAX inhibitor motif containing 6
  ENST ID: ENST00000548201
  CDS Start-End: 192-582
gaaggtacgtctgaacctagtactgggcgaactgggagtgagaaatggaaagggagttagcagttactgtctgagcaagagtggcagtagcttccttctgcggacagatggcaccctgaaggaacgaggccctgctcggagaccagactcgggaaaacaggagtggagactgctgcacggactctggaaccatgaacatatttgatcgaaagatcaactttgatgcgcttttaaaattttctcatataaccccgtcaacgcagcagcacctgaagaaggtctatgcaagttttgccctttgtatgtttgtggcggctgcaggggcctatgtccatatggtcactcatttcattcaggctggcctgctgtctgccttgggctccctgatattgatgatttggctgatggcaacacctcatagccatgaaactgaacagaaaagactgggacttcttgctggatttgcattccttacaggagttggcctgggccctgccctggagttttgtattgctgtcaaccccagcatccttcccactgctttcatgggcacggcaatgatctttacctgcttcaccctca

SEQ ID NO: 193243 - DNA, 446 bp, Homo sapiens
  Payload ID: 18146
  Gene Name: transmembrane BAX inhibitor motif containing 6
  ENST ID: ENST00000549130
  CDS Start-End: 180-446
tagagacgggcttttgccaagttgtccagcctggtctcgaactccacacctcaagcgattcgcccgccttgacctcccaaattgctaggattacaggtgtaatcctttcctaaagaaaaagagtcatctctcctgaagaataagaaaagagtggagactgctgcacggactctggaaccatgaacatatttgatcgaaagatcaactttgatgcgcttttaaaattttctcatataaccccgtcaacgcagcagcacctgaagaaggtctatgcaagttttgccctttgtatgtttgtggcggctgcaggggcctatgtccatatggtcactcatttcattcaggctggcctgctgtctgccttgggctccctgatattgatgatttggctgatggcaacacctcatagccatgaaactgaacagaaaagactgggacttcttgct

SEQ ID NO: 193244 - DNA, 423 bp, Homo sapiens
  Payload ID: 18146
  Gene Name: transmembrane BAX inhibitor motif containing 6
  ENST ID: ENST00000551154
  CDS Start-End: 301-423
tcagccggcatcgaatcaccgcggttcccagagggcgtgaggggctggcgtggacacaccgggaatggaccgtaccctttttcaaaaggaactcatgatgtatacaaatagaatgctcttccccttctttgctggccaattcctactcatctgttaaaaccaagcttagagattacctctttgatgacatctctaccaagtctgattgagaacatctctgtgagcacatagtattctaacatctctatcatcataccatgaaatcatcagagtggagactgctgcacggactctggaaccatgaacatatttgatcgaaagatcaactttgatgcgcttttaaaattttctcatataaccccgtcaacgcagcagcacctgaagaaggtctatgcaagttttgccctttgtatgtttgtggcg

SEQ ID NO: 193245 - DNA, 3201 bp, Homo sapiens
  Payload ID: 18147
  Gene Name: transmembrane channel-like 1
  Uniprot ID: Q8TDI8
  ENST ID: ENST00000297784
  CDS Start-End: 541-2823
cagaaactatgagggcagaacccagcaatctgtgctttctttcacaagccctccaggagttgctgaaatttaggaatcattgccccaaaaagtggccctcataatgatgccagatgggatcttactctgttgcccaggctggagtgcagtggtgcgatctcggctctctgcaacctccgcctcccaggttcaagtgattctcctgcctcggcctcctgagtagctgggatttcaggccatgaaagatcactgttttagtctgcgtggtgcagtggaacagatagacctcggtttgaatctcagctctactgtttactagacatgaaatggggaaatctaaaatgagatgccagaagcctcaaaaatggaaaaccccctgtgcttcacatctgaaaatctctgctgggggcagcaactttgagcctgtggggaaggaactgtccacgtggagtggtctggtgaatgcttaaggagctgcagaagggaagtccctctccaaactagccagccactgagaccttctgacaggacacccccaggatgtcacccaaaaaagtacaaatcaaagtggaggaaaaagaagacgagactgaggaaagctcaagtgaagaggaagaggaggtggaagataagctacctcgaagagagagcttgagaccaaagaggaaacggaccagagatgttatcaatgaggatgacccagaacctgaaccagaggatgaagaaacaaggaaggcaagagaaaaagagaggaggaggaggctaaagagaggagcagaagaagaagaaattgatgaagaggaattggaaagattgaaggcagagttagatgagaaaagacaaataattgctactgtcaaatgcaaaccatggaagatggagaagaaaattgaagttctcaaggaggcaaaaaaatttgtgagtgaaaatgaaggggctcttgggaaaggaaaaggaaaacggtggtttgcatttaagatgatgatggccaagaaatgggcaaaattcctccgtgattttgagaacttcaaagctgcgtgtgtcccatgggaaaataaaatcaaggctattgaaagtcagtttggctcctcagtggcctcatacttcctcttcttgagatggatgtatggagtcaatatggttctctttatcctgacatttagcctcatcatgttgccagagtacctctggggtttgccatatggcagtttacctaggaaaaccgttcccagagccgaagaggcatcggcagcaaactttggtgtgttgtacgacttcaatggtttggcacaatattccgttctcttttatggctattatgacaataaacgaacaattggatggatgaatttcaggttgccgctctcctattttctagtggggattatgtgcattggatacagctttctggttgtcctcaaagcaatgaccaaaaacattggtgatgatggaggtggagatgacaacactttcaatttcagctggaaggtctttaccagctgggactacctgatcggcaatcctgaaacagcagacaacaaatttaattctatcacaatgaactttaaggaagctatcacagaagaaaaagcagcccaagtagaagaaaacgtccacttgatcagattcctgaggtttctggctaacttcttcgtgtttctaacacttggagggagtggatacctcatcttttgggctgtgaagcgatcccaggaatttgcacagcaagatcctgacacccttgggtggtgggaaaaaaatgaaatgaacatggttatgtccctcctagggatgttctgtccaacattgtttgacttatttgctgaattagaagactaccatcctctcatcgctttgaaatggctactgggacgcatttttgctcttcttttaggcaatttatacgtatttattcttgcattaatggatgagattaacaacaagattgaagaggagaagctagtaaaggccaatattaccctttgggaagccaatatgatcaaggcctacaatgcatcattctctgaaaatagcactggaccacccttttttgttcaccctgcagatgtacctcgaggaccttgctgggaaacaatggtgggacaggagtttgtgaggctgacagtctctgatgttctgaccacctacgtcacaatcctcattggggactttctaagggcatgttttgtgaggttttgcaattattgctggtgctgggacttggagtatggatatccttcatacaccgaattcgacatcagtggcaacgtcctcgctctgatcttcaaccaaggcatgatctggatgggctccttctttgctcccagcctcccaggcatcaatatccttcgactccatacatccatgtacttccagtgctgggccgttatgtgctgcaatgttcctgaggccagggtcttcaaagcttccagatcaaataacttctacctgggcatgctactgctcatcctcttcctgtccacaatgcctgtcttgtacatgatcgtgtccctcccaccatcttttgattgtggtccattcagtggcaaaaatagaatgtttgaagtcattggagagaccctggagcacgatttcccaagctggatggcgaagatcttgagacagctttcaaaccctgggctggtcattgctgtcattttggtgatggttttggccatctattatctcaatgctactgccaagggccagaaggcagcgaatctggatctcaaaaagaagatgaaaatgcaagctttggagaacaaaatgcgaaacaagaaaatggcagctgcacgagcagctgcagctgctggtcgccagtaataagtatcctgagagcccagaaaaggtacactttgccttgctgtttaaaagtaatgcaatatgtgaacgcccagagaacaagcactgtggaactgctattttcctgttctacccttgatggattttcaaggtcatgctggccaattaaggcatcatcagtcctacctgagcaacaagaatctaaactttattccaagtcagaaactgtttctgcagagccactctctcccctgctccatttcgtgactttttttttttttttaacaaattgagtttagaagtgagtgtaatccagcaatacagtttactggtttagttggtgggttaattaaaaaaaatttgctcatatgaactttcattttatatgtttcttttgcc

SEQ ID NO: 193246 - DNA, 3068 bp, Homo sapiens
  Payload ID: 18147
  Gene Name: transmembrane channel-like 1
  Uniprot ID: Q8TDI8
  ENST ID: ENST00000340019
  CDS Start-End: 408-2690
ttcacaaagttggtttacagcagaactgtgctacagttatctggattcagatccaagtcccctccaaatgaatcacaaccacttctacctttataattccaggccatgaaagatcactgttttagtctgcgtggtgcagtggaacagatagacctcggtttgaatctcagctctactgtttactagacatgaaatggggaaatctaaaatgagatgccagaagcctcaaaaatggaaaaccccctgtgcttcacatctgaaaatctctgctgggggcagcaactttgagcctgtggggaaggaactgtccacgtggagtggtctggtgaatgcttaaggagctgcagaagggaagtccctctccaaactagccagccactgagaccttctgacaggacacccccaggatgtcacccaaaaaagtacaaatcaaagtggaggaaaaagaagacgagactgaggaaagctcaagtgaagaggaagaggaggtggaagataagctacctcgaagagagagcttgagaccaaagaggaaacggaccagagatgttatcaatgaggatgacccagaacctgaaccagaggatgaagaaacaaggaaggcaagagaaaaagagaggaggaggaggctaaagagaggagcagaagaagaagaaattgatgaagaggaattggaaagattgaaggcagagttagatgagaaaagacaaataattgctactgtcaaatgcaaaccatggaagatggagaagaaaattgaagttctcaaggaggcaaaaaaatttgtgagtgaaaatgaaggggctcttgggaaaggaaaaggaaaacggtggtttgcatttaagatgatgatggccaagaaatgggcaaaattcctccgtgattttgagaacttcaaagctgcgtgtgtcccatgggaaaataaaatcaaggctattgaaagtcagtttggctcctcagtggcctcatacttcctcttcttgagatggatgtatggagtcaatatggttctctttatcctgacatttagcctcatcatgttgccagagtacctctggggtttgccatatggcagtttacctaggaaaaccgttcccagagccgaagaggcatcggcagcaaactttggtgtgttgtacgacttcaatggtttggcacaatattccgttctcttttatggctattatgacaataaacgaacaattggatggatgaatttcaggttgccgctctcctattttctagtggggattatgtgcattggatacagctttctggttgtcctcaaagcaatgaccaaaaacattggtgatgatggaggtggagatgacaacactttcaatttcagctggaaggtctttaccagctgggactacctgatcggcaatcctgaaacagcagacaacaaatttaattctatcacaatgaactttaaggaagctatcacagaagaaaaagcagcccaagtagaagaaaacgtccacttgatcagattcctgaggtttctggctaacttcttcgtgtttctaacacttggagggagtggatacctcatcttttgggctgtgaagcgatcccaggaatttgcacagcaagatcctgacacccttgggtggtgggaaaaaaatgaaatgaacatggttatgtccctcctagggatgttctgtccaacattgtttgacttatttgctgaattagaagactaccatcctctcatcgctttgaaatggctactgggacgcatttttgctcttcttttaggcaatttatacgtatttattcttgcattaatggatgagattaacaacaagattgaagaggagaagctagtaaaggccaatattaccctttgggaagccaatatgatcaaggcctacaatgcatcattctctgaaaatagcactggaccacccttttttgttcaccctgcagatgtacctcgaggaccttgctgggaaacaatggtgggacaggagtttgtgaggctgacagtctctgatgttctgaccacctacgtcacaatcctcattggggactttctaagggcatgttttgtgaggttttgcaattattgctggtgctgggacttggagtatggatatccttcatacaccgaattcgacatcagtggcaacgtcctcgctctgatcttcaaccaaggcatgatctggatgggctccttctttgctcccagcctcccaggcatcaatatccttcgactccatacatccatgtacttccagtgctgggccgttatgtgctgcaatgttcctgaggccagggtcttcaaagcttccagatcaaataacttctacctgggcatgctactgctcatcctcttcctgtccacaatgcctgtcttgtacatgatcgtgtccctcccaccatcttttgattgtggtccattcagtggcaaaaatagaatgtttgaagtcattggagagaccctggagcacgatttcccaagctggatggcgaagatcttgagacagctttcaaaccctgggctggtcattgctgtcattttggtgatggttttggccatctattatctcaatgctactgccaagggccagaaggcagcgaatctggatctcaaaaagaagatgaaaatgcaagctttggagaacaaaatgcgaaacaagaaaatggcagctgcacgagcagctgcagctgctggtcgccagtaataagtatcctgagagcccagaaaaggtacactttgccttgctgtttaaaagtaatgcaatatgtgaacgcccagagaacaagcactgtggaactgctattttcctgttctacccttgatggattttcaaggtcatgctggccaattaaggcatcatcagtcctacctgagcaacaagaatctaaactttattccaagtcagaaactgtttctgcagagccactctctcccctgctccatttcgtgactttttttttttttttaacaaattgagtttagaagtgagtgtaatccagcaatacagtttactggtttagttggtgggttaattaaaaaaaatttgctcatatgaactttcattttatatgtttcttttgcc

SEQ ID NO: 193247 - DNA, 3169 bp, Homo sapiens
  Payload ID: 18148
  Gene Name: transmembrane channel-like 2
  Uniprot ID: Q8TDI7
  ENST ID: ENST00000358864
  CDS Start-End: 16-2736
gcagtgctgctgaccatgagccaccaggtaaagggcctgaaagaggaagcacgaggcggagtgaaagggcgggtgaagagcggctctccacacacaggtgacaggctgggaaggagatcctcaagcaagcgggctctcaaagccgaggggaccccaggcaggcgcggagctcagcgaagccagaaggagcgcgccgggggcagcccaagcccggggtctccccggaggaagcaaacagggcgcaggagacacagagaagagctgggggagcaggagcggggcgaggcagagaggacctgcgagggcaggagaaagcgcgacgagagggcctccttccaggagcggacagcagccccaaagagggaaaaggagattccgaggagggaggagaagtcgaagcggcagaagaaacccaggtcatcctccttggcctccagtgcctctggtggggagtccctgtccgaggaggaactggcccagatcctggagcaggtggaagaaaaaaagaagctcattgccaccatgcggagcaagccctggcccatggcgaagaagctgacagagctcagggaggcccaggaatttgtggagaagtatgaaggtgccttgggaaaggggaaaggcaagcaactatatgcctacaagatgctgatggccaagaaatgggtcaaatttaagagagactttgataatttcaagactcaatgtatcccctgggaaatgaagatcaaggacattgaaagtcactttggttcttcagtggcatcgtatttcatctttctccgatggatgtatggagttaaccttgtcctttttggcttaatatttggtctagtcataatcccagaggtactgatgggcatgccctatgggagtattcccagaaagacagtgcctcgggctgaggaagaaaaggccatggatttttctgtcctttgggattttgagggctatatcaagtactctgcactcttctatggctactacaacaaccagaggaccatcgggtggctgaggtaccggctgcctatggcttactttatggtgggggtcagcgtgttcggctacagcctgattattgtcattcgatcgatggccagcaatacccaaggaagcacaggcgaaggggagagtgacaacttcacattcagcttcaagatgttcaccagctgggactacctgatcgggaattcagagacagctgataacaaatatgcatccatcaccaccagcttcaaggaatcaatagtggatgaacaagagagtaacaaagaagaaaatatccatctgacaagatttcttcgtgtcctggccaactttctcatcatctgctgtttgtgtggaagtgggtacctcatttactttgtggttaagcgatctcagcaattctccaaaatgcagaatgtcagctggtatgaaaggaatgaggtagagatcgtgatgtccctgcttggaatgttttgtccccctctgtttgaaaccatcgctgccctggagaattaccacccacgcactggactgaagtggcagctgggacgcatctttgcactcttcctggggaacctctacacatttctcttggccctgatggatgacgtccacctcaagcttgctaatgaagagacaataaagaacatcactcactggactctgtttaactattacaactcttctggttggaacgagagtgtcccccgaccacccctgcaccctgcagatgtgccccggggttcttgctgggagacagctgtgggcattgaattcatgaggctgacggtgtctgacatgctggtaacgtacatcaccatcctgctgggggacttcctacgggcttgttttgtgcggttcatgaactactgctggtgctgggacttggaggctggatttccttcatatgctgagtttgatattagtggaaatgtgctgggtttgatcttcaaccaaggaatgatctggatgggctccttctatgctccaggcctggtgggcattaatgtgctgcgcctgctgacctccatgtacttccagtgctgggcggtgatgagcagcaacgtaccccatgaacgcgtgttcaaagcctcccgatccaacaacttctacatgggcctcctgctgctggtgctcttcctcagcctcctgccggtggcctacaccatcatgtccctcccaccctcctttgactgcgggccgttcagtgggaaaaacagaatgtacgatgtcctccaagagaccattgaaaacgatttcccaaccttcctgggcaagatctttgctttcctcgccaatccaggcctgatcatcccagccatcctgctgatgttcttggccatttactacctgaactcagtttccaaaagcctttcccgagctaatgcccagctgaggaagaaaatccaagtgctccgtgaagttgagaagagtcacaaatctgtaaaaggcaaagccacagccagagattcagaggacacacctaaaagcagctccaaaaatgccacccagctccaactcaccaaggaagagaccactcctccctctgccagccaaagccaggccatggacaagaaggcgcagggccctgggacctccaattctgccagcaggaccacactgcctgcctctggacaccttcctatatctcggccccctggaatcggaccagattctggccacgccccatctcagactcatccgtggaggtcagcctctggaaagagtgctcagagacctccccactgatggctaggactccagggagcctcgaccctagggctgatcctcaagtaccccagtttcacacataccaaaccaaggttctctcccctctttcctctcacatacatgctctgtctcctctcttggaatgcatgaactttgattccttcaggcccttgtcagctaccgaaggaggaagacagtggcttcacctgtcctttagggaagctggagccatctctgcactaactgccctcccaaatatcttggttcagacagctctgaaccccacgctcacagtggtcgaccttgcctcccgattttcggagttggggaagggccatgaccaccctcgtagactttttccatgggatacagtttaggacacgggtttctgccagcttccctaaccaggagggggatggagaagggcctacatttctcaatccagaggaag

SEQ ID NO: 193248 - DNA, 4641 bp, Homo sapiens
  Payload ID: 18149
  Gene Name: transmembrane channel-like 3
  Uniprot ID: Q7Z5M5
  ENST ID: ENST00000359440
  CDS Start-End: 137-3439
acacagtcttcttcctgagaactagcgggcagagcaaactccgctgcttccattcagaaacctcggaacagacctttgcctgccaacttcctagctctctggccagcttctgattgttagcagtgggttagctcccatgaaaacctcgaaggcatcccagcgctatagaggcatccggagaaatgccagccagtgctacctctaccaggaatctctgctgctcagcaacttggatgacagctttagtgctgatgaaacaggggacagcaatgatccggaacaaatcttccagaatatacagttccagaaagatctcatggcaaacattcgctgcagaccctggactatgggacagaagctgagggcattgagacaagcgaagaacattgtgctgaagtttgaagggaggctgaccaggacccgaggctaccaagcagcaggtgcagagctctggcggaaatttgctcgtctcgcctgtaactttgtggtcatcttcattccctgggaaatgaggataaagaaaatcgagagtcattttggatctggcgttgcctcctatttcatattcttgagatggttatttggaattaatattgtgctcaccattatgacaggtgcttttattgtcattccagagctgattgcaggccagccctttggaagcacagccaggaagaccatccccaaggagcaggtttcgtctgcccaagacctggacaccgtctggtctctggggggctacctccagtactctgtcctcttctacggatattacggcagggagaggaagatcgggagagctggctaccggctgcccttggcgtatttcctagtggggatggcagtgtttgcttacagcttcatcattcttttaaaaaagatggctaagaactcccgcacgagtcttgccagtgcttccaatgaaaactataccttctgctggcgggtgttctgtgcctgggattacctcattggaaacccagaggctgcagagagcaaaacagctgccatagtgaacagcatcagggaagctatattggaagaacaggagaaaaagaaaagcaaaaacctggcagtgaccatctgcctgaggattattgccaacatcctggtgcttctctcactggctgggagcatttatctcatctactttgtggtggaccggtcccagaagctggagcagtcgaagaaggagctgacactttgggaaaagaatgaggtcagtgtggtggtctccctcgtcaccatgatagcaccatcagcctttgacctcattgctgccttagagatgtaccaccccaggaccacgctgcgcttccagcttgcaagggtccttgtgctgtatttgggaaatctctacagcctgatcattgctctcctggacaaagttaacagcatgagcattgaggaaatggctaccaaaaataacacaagtcattggatagattccaccaccttctttgcaaccaggacagcccctgaagaagagaaatggtccacatctcggcctggaatggggctcaggagaaacaacacatgggccttggaagagaccagcatttcagcttataccatgcctcttataaaggccaacaagactagcctccacactcagagtccacaagaccagtgctgggagacatacgttggtcaggagatgctgaagctctccatcattgacatgctcttcaccgtggcgagcattctgctcatagacttcttccgaggacttttcgtgcggtacttaagtgactactggtgttgggatctggagagcaagtttcctgaatatggagaattcaaaatagctgagaatgtgctacatttagtctacaaccaaggaatgatttggatgggggccttcttctccccatgtctcccagcgttcaacgttctcaaactcattgggctcatgtacctgagaagctgggctgtgctgacctgcaatgtgccccaccagcaagtatttcgagcctcaagatccaacaacttctacttggcaatgctcctgtttatgctgtttctgtgcatgctgccaaccatttttgctattgtccgatacaagccatctctaaactgtgggccattcagtggacaagagaaaatttatgacattgtgtcagaaacgattgagaaagactttcctgtgtggtttggctccgtggttggacacatcagtagccccgtggtcatcctgcccgcagtactcctgcttttcatgctcatctattatctccagagcatcgcacggtctctaaagctcagcaaccaccagctcaaaatgcagatccaaaacgcaagatcagaggataagaaaaaggttgcccagatggtagaagcccgaatccagacccaggaagaaagcaccaagaagcttccaaacgacagtgatcttaccagccagctgtcctcagcgcactcgggcacaccccaaaacaacggcaacgtggcccattttgactcagggagcagcaagagtggcaggatagagacagtcgcacagtccatgccccagagcccgaggccaggggacagggctcctagctcacctctccctggggtccccaaatccaggctagagcatgaaactaacaggtatctgcacggtctgtgtgcaagcaccagtgaccttcacaggaacagatcgcgcacacctatgacatttacaacgcacatcgaagatgtacactcagaacctcttttccgaaaagactttcagcaaatcaaccctcctcaccgtggaccacaggcctcgactttgctggcacagggtcccaggccccacgcccccagatactatgtcattaatgaatgtgactcttacaagaaaaaacatctaaatgtctggccagaaagacatttcaagatagatgcttcaggtgacattgtggagctgtaccccaggaacgtgcgacaatatgcatcccgggtcccccgccagcctccctccccacagctgagtgaagaagaggaggagacgccaagcagagattggatcaaacggtctcttcccccacgctccctgatagacctccgtcgggctcctcatttttatattggggagaggtccgaaagtcagacccgggatcccgagcaccaggggagggtgcactacaagtcgtggaatgaagattttgagggtcaccttgagaggccagcctatgtgcccagaaagccacgatcccggaatttccaatacccacagccccctctgaagcccagagggaagcccaggttcgagccatccctcacggaatctgactccgtgtcggcagcatccagcagtgaccagcagaacagcagcgctgaccagtacctgcaggtcacccacagccagggcaggttcccgaggtccgtgggccagcccagcaggaggaaggccaagtcggggcaggagctgaccgtggatctggatgacttgatttgttcagatgtctaggcttcctccagtgtcccgttcctagaggtcaggcccctgttggagtgctgggccagcacatggcatctccctttctggaaaaagaggtgaacaagtgtgttagagacctgaggggcatggtcagcggctgctagctgaggccctgaggctgacagggctacagatacctattctacagctactgttagccaaatttatccgagttaggtggcaccaaagtatgtcaccagcagtgaatcatcacgggtctgcagcaatctcaatacttgcctcctcggaagaaagaatttggcagaggggctcaagacagaaggagagactgaggcaagttttagagcaggcatgaaagtttactgaaaagctttaaagcaggaatgaaagaacgtaaaacatacttagtagagggccaagcaggcgacttgagagatccagtgcactgtttgacctttgacttggggttttacacgttggcatgcttccggggtcttgcgttgcttctccccacgattcttccctttcttcccttggggtgggctgtccgcatgcgcagtagtggcctgctagcgctggggaggggagcatgcgcagtgtgtttactggagttgtgcacgcgctcactcgaggttcttcccttaccaggggaatgctccattttgtctcttagtgcgcatgtttgagcccactcgcccaactcctgacattttatggggaagctgccgatcaccagtttcaggttttttctatctattgggagactgtcgttccctggtgccagctgtgaccaattattattttagagagacaatcagcagccacctgaccatcacctgatggtcgcctgacattcctgggggttgtgttgaagaaggaattcatgaattttacaagtataatcaaagacaaccaaaaatttttactttttccttcaaaagctaagtgtagtgtagctcccccatagtctaagttaaagaagaacactaactgcctgtttttccttctgtgctcagcaagccttatctgtacttgctagtttcacattccttgaggctcagcgagttcctgcttcaccaccctagcgcagctgcaaagttacaaggttgatgcagaaacatggtttcccagggatgtggaacatgtagtatagataaatgtaaaagactgaacaactgcctttgctctcgcttctgtaagtacgcttcctg

SEQ ID NO: 193249 - DNA, 4644 bp, Homo sapiens
  Payload ID: 18149
  Gene Name: transmembrane channel-like 3
  ENST ID: ENST00000558726
  CDS Start-End: 137-3442
acacagtcttcttcctgagaactagcgggcagagcaaactccgctgcttccattcagaaacctcggaacagacctttgcctgccaacttcctagctctctggccagcttctgattgttagcagtgggttagctcccatgaaaacctcgaaggcatcccagcgctatagaggcatccggagaaatgccagccagtgctacctctaccaggaatctctgctgctcagcaacttggatgacagctttagtgctgatgaaacaggggacagcaatgatccggaacaaatcttccagaatatacagttccagaaagatctcatggcaaacattcgctgcagaccctggactatgggacagaagctgagggcattgagacaagcgaagaacattgtgctgaagtttgaagggaggctgaccaggacccgaggctaccaagcagcaggtgcagagctctggcggaaatttgctcgtctcgcctgtaactttgtggtcatcttcattccctgggaaatgaggataaagaaaatcgagagtcattttggatctggcgttgcctcctatttcatattcttgagatggttatttggaattaatattgtgctcaccattatgacaggtgcttttattgtcattccagagctgattgcaggccagccctttggaagcacagccaggaagaccatccccaaggagcaggtttcgtctgcccaagacctggacaccgtctggtctctggggggctacctccagtactctgtcctcttctacggatattacggcagggagaggaagatcgggagagctggctaccggctgcccttggcgtatttcctagtggggatggcagtgtttgcttacagcttcatcattcttttaaaaaagatggctaagaactcccgcacgagtcttgccagtgcttccaatgaaaactataccttctgctggcgggtgttctgtgcctgggattacctcattggaaacccagaggctgcagagagcaaaacagctgccatagtgaacagcatcagggaagctatattggaagaacaggagaaaaagaaaagcaaaaacctggcagtgaccatctgcctgaggattattgccaacatcctggtgcttctctcactggctgggagcatttatctcatctactttgtggtggaccggtcccagaagctggagcagtcgaagaaggagctgacactttgggaaaagaatgagcaggtcagtgtggtggtctccctcgtcaccatgatagcaccatcagcctttgacctcattgctgccttagagatgtaccaccccaggaccacgctgcgcttccagcttgcaagggtccttgtgctgtatttgggaaatctctacagcctgatcattgctctcctggacaaagttaacagcatgagcattgaggaaatggctaccaaaaataacacaagtcattggatagattccaccaccttctttgcaaccaggacagcccctgaagaagagaaatggtccacatctcggcctggaatggggctcaggagaaacaacacatgggccttggaagagaccagcatttcagcttataccatgcctcttataaaggccaacaagactagcctccacactcagagtccacaagaccagtgctgggagacatacgttggtcaggagatgctgaagctctccatcattgacatgctcttcaccgtggcgagcattctgctcatagacttcttccgaggacttttcgtgcggtacttaagtgactactggtgttgggatctggagagcaagtttcctgaatatggagaattcaaaatagctgagaatgtgctacatttagtctacaaccaaggaatgatttggatgggggccttcttctccccatgtctcccagcgttcaacgttctcaaactcattgggctcatgtacctgagaagctgggctgtgctgacctgcaatgtgccccaccagcaagtatttcgagcctcaagatccaacaacttctacttggcaatgctcctgtttatgctgtttctgtgcatgctgccaaccatttttgctattgtccgatacaagccatctctaaactgtgggccattcagtggacaagagaaaatttatgacattgtgtcagaaacgattgagaaagactttcctgtgtggtttggctccgtggttggacacatcagtagccccgtggtcatcctgcccgcagtactcctgcttttcatgctcatctattatctccagagcatcgcacggtctctaaagctcagcaaccaccagctcaaaatgcagatccaaaacgcaagatcagaggataagaaaaaggttgcccagatggtagaagcccgaatccagacccaggaagaaagcaccaagaagcttccaaacgacagtgatcttaccagccagctgtcctcagcgcactcgggcacaccccaaaacaacggcaacgtggcccattttgactcagggagcagcaagagtggcaggatagagacagtcgcacagtccatgccccagagcccgaggccaggggacagggctcctagctcacctctccctggggtccccaaatccaggctagagcatgaaactaacaggtatctgcacggtctgtgtgcaagcaccagtgaccttcacaggaacagatcgcgcacacctatgacatttacaacgcacatcgaagatgtacactcagaacctcttttccgaaaagactttcagcaaatcaaccctcctcaccgtggaccacaggcctcgactttgctggcacagggtcccaggccccacgcccccagatactatgtcattaatgaatgtgactcttacaagaaaaaacatctaaatgtctggccagaaagacatttcaagatagatgcttcaggtgacattgtggagctgtaccccaggaacgtgcgacaatatgcatcccgggtcccccgccagcctccctccccacagctgagtgaagaagaggaggagacgccaagcagagattggatcaaacggtctcttcccccacgctccctgatagacctccgtcgggctcctcatttttatattggggagaggtccgaaagtcagacccgggatcccgagcaccaggggagggtgcactacaagtcgtggaatgaagattttgagggtcaccttgagaggccagcctatgtgcccagaaagccacgatcccggaatttccaatacccacagccccctctgaagcccagagggaagcccaggttcgagccatccctcacggaatctgactccgtgtcggcagcatccagcagtgaccagcagaacagcagcgctgaccagtacctgcaggtcacccacagccagggcaggttcccgaggtccgtgggccagcccagcaggaggaaggccaagtcggggcaggagctgaccgtggatctggatgacttgatttgttcagatgtctaggcttcctccagtgtcccgttcctagaggtcaggcccctgttggagtgctgggccagcacatggcatctccctttctggaaaaagaggtgaacaagtgtgttagagacctgaggggcatggtcagcggctgctagctgaggccctgaggctgacagggctacagatacctattctacagctactgttagccaaatttatccgagttaggtggcaccaaagtatgtcaccagcagtgaatcatcacgggtctgcagcaatctcaatacttgcctcctcggaagaaagaatttggcagaggggctcaagacagaaggagagactgaggcaagttttagagcaggcatgaaagtttactgaaaagctttaaagcaggaatgaaagaacgtaaaacatacttagtagagggccaagcaggcgacttgagagatccagtgcactgtttgacctttgacttggggttttacacgttggcatgcttccggggtcttgcgttgcttctccccacgattcttccctttcttcccttggggtgggctgtccgcatgcgcagtagtggcctgctagcgctggggaggggagcatgcgcagtgtgtttactggagttgtgcacgcgctcactcgaggttcttcccttaccaggggaatgctccattttgtctcttagtgcgcatgtttgagcccactcgcccaactcctgacattttatggggaagctgccgatcaccagtttcaggttttttctatctattgggagactgtcgttccctggtgccagctgtgaccaattattattttagagagacaatcagcagccacctgaccatcacctgatggtcgcctgacattcctgggggttgtgttgaagaaggaattcatgaattttacaagtataatcaaagacaaccaaaaatttttactttttccttcaaaagctaagtgtagtgtagctcccccatagtctaagttaaagaagaacactaactgcctgtttttccttctgtgctcagcaagccttatctgtacttgctagtttcacattccttgaggctcagcgagttcctgcttcaccaccctagcgcagctgcaaagttacaaggttgatgcagaaacatggtttcccagggatgtggaacatgtagtatagataaatgtaaaagactgaacaactgcctttgctctcgcttctgtaagtacgcttcctg

SEQ ID NO: 193250 - DNA, 757 bp, Homo sapiens
  Payload ID: 18150
  Gene Name: transmembrane channel-like 4
  ENST ID: ENST00000446291
  CDS Start-End: 231-757
gggaaaaggaagttaaagcctggactccactgccctggagcccatcgctgtcttctgtgctgaacgagctgcccagtgctgccacccttcggtaccgagaccctggggtgctgccttggggggcgctggaggaggaggaggaggatggaggaaggagcagaaaggccttcacagaagtcacccagacagagctgcaggaccctcacccttcccgggaactgccctggcccatgcaggccagacgggcacacaggcaaagaaatgccagcagggaccaggtggtctatggctctggaactaagacggaccgatgggcgcggctacttcggaggtccaaggagaaaacaaaggaaggcttgcgaagcctgcagccctgggcgtggacactgaagaggatcgggggccagtttggcgccggcacggagtcctacttctccctgctgcgcttcctgctccttcttaacgtgctggcctctgtgctcatggcctgcatgacgctgctgcccacctggttgggaggcgctcccccaggccctcccggccccgacatctcctcgccctgcggctcctataacccccactcccagggcctggtcacctttgccacccagctcttcaacttgctctcgggtgagggttacctggaatggtcccctctcttctatggcttctacccgccccgcccacgcctggcggtcacctacctgtgctgggcctttgccgttggcctcatctgcctcctgctcatcctgcatcg

SEQ ID NO: 193251 - DNA, 2413 bp, Homo sapiens
  Payload ID: 18150
  Gene Name: transmembrane channel-like 4
  ENST ID: ENST00000617472
  CDS Start-End: 134-2272
ctgagaaaccacaggaagtgtaccttactccctccgggccacctgctggccaggtacacacctgcccctggcccctcccttacctggggcagtgtctgcctggtggccactagagacagcccagcctggggccatggaagaaaacccgaccttggaatcagaagcctggggctcctctagggagtggctggccccccgggaggccagaggagccccctgctcctccccaggcccatcgctgtcttctgtgctgaacgagctgcccagtgctgccacccttcggtaccgagaccctggggtgctgccttggggggcgctggaggaggaggaggaggatggaggaaggagcagaaaggccttcacagaagtcacccagacagagctgcaggaccctcacccttcccgggaactgccctggcccatgcaggccagacgggcacacaggcaaagaaatgccagcagggaccaggtggtctatggctctggaactaagacggaccgatgggcgcggctacttcggaggtccaaggagaaaacaaaggaaggcttgcgaagcctgcagccctgggcgtggacactgaagaggatcgggggccagtttggcgccggcacggagtcctacttctccctgctgcgcttcctgctccttcttaacgtgctggcctctgtgctcatggcctgcatgacgctgctgcccacctggttgggaggcgctcccccaggccctcccggccccgacatctcctcgccctgcggctcctataacccccactcccagggcctggtcacctttgccacccagctcttcaacttgctctcgggtgagggttacctggaatggtcccctctcttctatggcttctacccgccccgcccacgcctggcggtcacctacctgtgctgggcctttgccgttggcctcatctgcctcctgctcatcctgcatcgctcggtgtctgggctgaagcagacactgctggcggagtccgaggctctgaccagctacagccaccgggtgttctcggcctgggacttcggtctctgcggggacgtccacgtgcggctgcgccagcgcatcatcttgtacgaattaaaggtggagctggaggagacagtggtgcggcgccaggctgcggtgcggacgctgggccagcaagccagggtttggttggtgcgggtgctgctcaacctgctggtggtcgcgctcctgggggcagccttctatggcgtctactgggctacggggtgcaccgtggagctgcaggagatgccccttgtccaggagttgccactgctgaagcttggggtgaattaccttccgtccatcttcatcgctggggtcaattttgtgctgccgcccgtgttcaagctcattgctccactggagggctacactcggagtcgccagatcgtttttatcctgctcaggaccgtgtttcttcgcctcgcctccctggtggtcctgctcttctctctctggaatcagatcacttgtgggggcgactccgaggctgaggactgcaaaacctgtggctacaattacaaacaacttccgtgctgggagactgtcctgggccaggaaatgtacaaacttctgctctttgatctgctgactgtcttggcagtcgcgctgctcatccagtttcctagaaagctcctctgtggcctctgtcctggggcgctgggtcgtctggcggggacccaagagttccaggtgcccgacgaggtgctggggctcatctacgcgcagacggtggtctgggtggggagttttttctgccctttactgcccctgcttaacacggtcaagttcctgctgcttttctacctgaagaagcttaccctcttctccacctgctccccggctgcccgcaccttccgggcctccgcggcgaatttctttttccccttggtccttctcctgggtctggccatctccagcgttcccctgctttacagcatcttcctgatcccgccttctaagctgtgtggtccattccgggggcagtcgtccatctgggcccagatccctgagtctatttccagcctccctgagaccacccagaatttcctcttcttcctggggacccaggcttttgctgtgccccttctgctgatctccagcatcctgatggcgtacactgtggctctggctaactcctacggacgcctcatctctgagctcaaacgtcagagagagacggaggcgcagaataaagtcttcctggcacggcgcgctgtggcgctgacctccaccaaaccggctctttgacccccgcagcccacgtcccgctttcagaccccaggcccattgtaagcctaggtcacaacatctgtaaactaggagaactggagaagactccacgcccttccagctttggtatctggagatttccagggcccctcgccgcca

SEQ ID NO: 193252 - DNA, 2412 bp, Homo sapiens
  Payload ID: 18150
  Gene Name: transmembrane channel-like 4
  ENST ID: ENST00000620520
  CDS Start-End: 133-2271
ctgagaaaccacaggaagtgtaccttactccctccgggccacctgctggccaggtacacacctgcccctggcccctcccttacctggggcagtgtctgcctggtggccactagagacagcccagcctgggccatggaagaaaacccgaccttggaatcagaagcctggggctcctctagggggtggctggccccccgggaggccagaggagccccctgctcctccccaggcccatcgctgtcttctgtgctgaacgagctgcccagtgctgccacccttcggtaccgagaccctggggtgctgccttggggggcgctggaggaggaggaggaggatggaggaaggagcagaaaggccttcacagaagtcacccagacagagctgcaggaccctcacccttcccgggaactgccctggcccatgcaggccagacgggcacacaggcaaagaaatgccagcagggaccaggtggtctatggctctggaactaagacggaccgatgggcgcggctacttcggaggtccaaggagaaaacaaaggaaggcttgcgaagcctgcagccctgggcgtggacactgaagaggatcgggggccagtttggcgccggcacggagtcctacttctccctgctgcgcttcctgctccttcttaacgtgctggcctctgtgctcatggcctgcatgacgctgctgcccacctggttgggaggcgctcccccaggccctcccggccccgacatctcctcgccctgcggctcctataacccccactcccagggcctggtcacctttgccacccagctcttcaacttgctctcgggtgagggttacctggaatggtcccctctcttctatggcttctacccgccccgcccacgcctggcggtcacctacctgtgctgggcctttgccgttggcctcatctgcctcctgctcatcctgcatcgctcggtgtctgggctgaagcagacactgctggcggagtccgaggctctgaccagctacagccaccgggtgttctcggcctgggacttcggtctctgcggggacgtccacgtgcggctgcgccagcgcatcatcttgtacgaattaaaggtggagctggaggagacagtggtgcggcgccaggctgcggtgcggacgctgggccagcaagccagggtttggttggtgcgggtgctgctcaacctgctggtggtcgcgctcctgggggcagccttctatggcgtctactgggctacggggtgcaccgtggagctgcaggagatgccccttgtccaggagttgccactgctgaagcttggggtgaattaccttccgtccatcttcatcgctggggtcaattttgtgctgccgcccgtgttcaagctcattgctccactggagggctacactcggagtcgccagatcgtttttatcctgctcaggaccgtgtttcttcgcctcgcctccctggtggtcctgctcttctctctctggaatcagatcacttgtgggggcgactccgaggctgaggactgcaaaacctgtggctacaattacaaacaacttccgtgctgggagactgtcctgggccaggaaatgtacaaacttctgctctttgatctgctgactgtcttggcagtcgcgctgctcatccagtttcctagaaagctcctctgtggcctctgtcctggggcgctgggtcgtctggcggggacccaggagttccaggtgcccgacgaggtgctggggctcatctacgcgcagacggtggtctgggtggggagttttttctgccctttactgcccctgcttaacacggtcaagttcctgctgcttttctacctgaagaagcttaccctcttctccacctgctccccggctgcccgcaccttccgggcctccgcggcgaatttctttttccccttggtccttctcctgggtctggccatctccagcgttcccctgctttacagcatcttcctgatcccgccttctaagctttgtggtccattccgggggcagtcgtccatctgggcccagatccctgagtctatttccagcctccctgagaccacccagaatttcctcttcttcctggggacccaggcttttgctgtgccccttctgctgatctccagcatcctgatggcgtacactgtggctctggctaactcctacggacgcctcatctctgagctcaaacgtcagagacagacggaggcgcagaataaagtcttcctggcacggcgcgctgtggcgctgacctccaccaaaccggctctttgacccccgcagcccacgtcccgctttcagaccccaggcccattgtaagcctaggtcacaacatctgtaaactaggagaactggagaagactccacgcccttccagctttggtatctggagatttccagggcccctcgccgcca

SEQ ID NO: 193253 - DNA, 2412 bp, Homo sapiens; identical to SEQ ID NO: 193252
  Payload ID: 18150
  Gene Name: transmembrane channel-like 4
  ENST ID: ENST00000619470
  CDS Start-End: 133-2271

SEQ ID NO: 193254 - DNA, 2412 bp, Homo sapiens; identical to SEQ ID NO: 193252
  Payload ID: 18150
  Gene Name: transmembrane channel-like 4
  Uniprot ID: Q7Z404
  ENST ID: ENST00000618950
  CDS Start-End: 133-2271

SEQ ID NO: 193255 - DNA, 2373 bp, Homo sapiens
  Payload ID: 18150
  Gene Name: transmembrane channel-like 4
  ENST ID: ENST00000619895
  CDS Start-End: 55-2175
ttacctggggcagtgtctgcctggtggccactagagacagcccagcctggggccatggaagaaaacccgaccttggaatcagaagcctggggctcctctagggagtggctggccccccgggaggccagaggaggcccatcgctgtcttctgtgctgaacgagctgcccagtgctgccacccttcggtaccgagaccctggggtgctgccttggggggcgctggaggaggaggaggaggatggaggaaggagcagaaaggccttcacagaagtcacccagacagagctgcaggaccctcacccttcccgggaactgccctggcccatgcaggccagacgggcacacaggcaaagaaatgccagcagggaccaggtggtctatggctctggaactaagacggaccgatgggcgcggctacttcggaggtccaaggagaaaacaaaggaaggcttgcgaagcctgcagccctgggcgtggacactgaagaggatcgggggccagtttggcgccggcacggagtcctacttctccctgctgcgcttcctgctccttcttaacgtgctggcctctgtgctcatggcctgcatgacgctgctgcccacctggttgggaggcgctcccccaggccctcccggccccgacatctcctcgccctgcggctcctataacccccactcccagggcctggtcacctttgccacccagctcttcaacttgctctcgggtgagggttacctggaatggtcccctctcttctatggcttctacccgccccgcccacgcctggcggtcacctacctgtgctgggcctttgccgttggcctcatctgcctcctgctcatcctgcatcgctcggtgtctgggctgaagcagacactgctggcggagtccgaggctctgaccagctacagccaccgggtgttctcggcctgggacttcggtctctgcggggacgtccacgtgcggctgcgccagcgcatcatcttgtacgaattaaaggtggagctggaggagacagtggtgcggcgccaggctgcggtgcggacgctgggccagcaagccagggtttggttggtgcgggtgctgctcaacctgctggtggtcgcgctcctgggggcagccttctatggcgtctactgggctacggggtgcaccgtggagctgcaggagatgccccttgtccaggagttgccactgctgaagcttggggtgaattaccttccgtccatcttcatcgctggggtcaattttgtgctgccgcccgtgttcaagctcattgctccactggagggctacactcggagtcgccagatcgtttttatcctgctcaggaccgtgtttcttcgcctcgcctccctggtggtcctgctcttctctctctggaatcagatcacttgtgggggcgactccgaggctgaggactgcaaaacctgtggctacaattacaaacaacttccgtgctgggagactgtcctgggccaggaaatgtacaaacttctgctctttgatctgctgactgtcttggcagtcgcgctgctcatccagtttcctagaaagctcctctgtggcctctgtcctggggcgctgggtcgtctggcggggacccaagagttccaggtgcccgacgaggtgctggggctcatctacgcgcagacggtggtctgggtggggagttttttctgccctttactgcccctgcttaacacggtcaagttcctgctgcttttctacctgaagaagcttaccctcttctccacctgctccccggctgcccgcaccttccgggcctccgcggcgaatttctttttccccttggtccttctcctgggtctggccatctccagcgttcccctgctttacagcatcttcctgatcccgccttctaagctgtgtggtccattccgggggcagtcgtccatctgggcccagatccctgagtctatttccagcctccctgagaccacccagaatttcctcttcttcctggggacccaggcttttgctgtgccccttctgctgatctccagcatcctgatggcgtacactgtggctctggctaactcctacggacgcctcatctctgagctcaaacgtcagagagagacggaggcgcagaataaagtcttcctggcacggcgcgctgtggcgctgacctccaccaaaccggctctttgacccccgcagcccacgtcccgctttcagaccccaggcccattgtaagcctaggtcacaacatctgtaaactaggagaactggagaagactccacgcccttccagctttggtatctggagatttccagggcccctcgccgccacgtccctgactctcgggtgatcttccttgtatcaataaatacagccgaggttgctga

SEQ ID NO: 193256 - DNA, 2374 bp, Homo sapiens
  Payload ID: 18150
  Gene Name: transmembrane channel-like 4
  ENST ID: ENST00000616977
  CDS Start-End: 56-2176
cttacctggggcagtgtctgcctggtggccactagagacagcccagcctggggccatggaagaaaacccgaccttggaatcagaagcctggggctcctctagggagtggctggccccccgggaggccagaggaggcccatcgctgtcttctgtgctgaacgagctgcccagtgctgccacccttcggtaccgagaccctggggtgctgccttggggggcgctggaggaggaggaggaggatggaggaaggagcagaaaggccttcacagaagtcacccagacagagctgcaggaccctcacccttcccgggaactgccctggcccatgcaggccagacgggcatacaggcaaagaaatgccagcagggaccaggtggtctatggctctggaactaagacggaccgatgggcgcggctacttcggaggtccaaggagaaaacaaaggaaggcttgcgaagcctgcagccctgggcgtggacactgaagaggatcgggggccagtttggcgccggcacggagtcctacttctccctgctgcgcttcctgctccttcttaacgtgctggcctctgtgctcatggcctgcatgacgctgctgcccacctggttgggaggcgctcccccaggccctcccggccccgacatctcctcgccctgcggctcctataacccccactcccagggcctggtcacctttgccacccagctcttcaacttgctctcgggtgagggttacctggaatggtcccctctcttctatggcttctacccgccccgcccacgcctggcggtcacctacctgtgctgggcctttgccgttggcctcatctgcctcctgctcatcctgcatcgctcggtgtctgggctgaagcagacactgctggcggagtccgaggctctgaccagctacagccaccgggtgttctcggcctgggacttcggtctctgcggggacgtccacgtgcggctgcgccagcgcatcatcttgtacgaattaaaggtggagctggaggagacagtggtgcggcgccaggctgcggtgcggacgctgggccagcaagccagggtttggttggtgcgggtgctgctcaacctgctggtggtcgcgctcctgggggcagccttctatggcgtctactgggctacggggtgcaccgtggagctgcaggagatgccccttgtccaggagttgccactgctgaagcttggggtgaattaccttccgtccatcttcatcgctggggtcaattttgtgctgccgcccgtgttcaagctcattgctccactggagggctacactcggagtcgccagatcgtttttatcctgctcaggaccgtgtttcttcgcctcgcctccctggtggtcctgctcttctctctctggaatcagatcacttgtgggggcgactccgaggctgaggactgcaaaacctgtggctacaattacaaacaacttccgtgctgggagactgtcctgggccaggaaatgtacaaacttctgctctttgatctgctgactgtcttggcagtcgcgctgctcatccagtttcctagaaagctcctctgtggcctctgtcctggggcgctgggtcgtctggcggggacccaggagttccaggtgcccgacgaggtgctggggctcatctacgcgcagacggtggtctgggtggggagttttttctgccctttactgcccctgcttaacacggtcaagttcctgctgcttttctacctgaagaagcttaccctcttctccacctgctccccggctgcccgcaccttccgggcctccgcggcgaatttctttttccccttggtccttctcctgggtctggccatctccagcgttcccctgctttacagcatcttcctgatcccgccttctaagctgtgtggtccattccgggggcagtcgtccatctgggcccagatccctgagtctatttccagcctccctgagaccacccagaatttcctcttcttcctggggacccaggcttttgctgtgccccttctgctgatctccagcatcctgatggcgtacactgtggctctggctaactcctacggacgcctcatctctgagctcaaacgtcagagagagacggaggcgcagaataaagtcttcctggcacggcgcgctgtggcgctgacctccaccaaaccggctctttgacccccgcagcccacgtcccgctttcagaccccaggcccattgtaagcctaggtcacaacatctgtaaactaggagaactggagaagactccacgcccttccagctttggtatctggagatttccagggcccctcgccgccacgtccctgactctcgggtgatcttccttgtatcaataaatacagccgaggttgctga

SEQ ID NO: 193257 - DNA, 2374 bp, Homo sapiens
  Payload ID: 18150
  Gene Name: transmembrane channel-like 4
  ENST ID: ENST00000612564
  CDS Start-End: 56-2176
cttacctggggcagtgtctgcctggtggccactagagacagcccagcctggggccatggaagaaaacccgaccttggaatcagaagcctggggctcctctagggagtggctggccccccgggaggccagaggaggcccatcgctgtcttctgtgctgaacgagctgcccagtgctgccacccttcggtaccgagaccctggggtgctgccttggggggcgctggaggaggaggaggaggatggaggaaggagcagaaaggccttcacagaagtcacccagacagagctgcaggaccctcacccttcccgggaactgccctggcccatgcaggccagacgggcatacaggcaaagaaatgccagcagggaccaggtggtctatggctctggaactaagacggaccgatgggcgcggctacttcggaggtccaaggagaaaacaaaggaaggcttgcgaagcctgcagccctgggcgtggacactgaagaggatcgggggccagtttggcgccggcacggagtcctacttctccctgctgcgcttcctgctccttcttaacgtgctggcctctgtgctcatggcctgcatgacgctgctgcccacctggttgggaggcgctcccccaggccctcccggccccgacatctcctcgccctgcggctcctataacccccactcccagggcctggtcacctttgccacccagctcttcaacttgctctcgggtgagggttacctggaatggtcccctctcttctatggcttctacccgccccgcccacgcctggcggtcacctacctgtgctgggcctttgccgttggcctcatctgcctcctgctcatcctgcatcgctcggtgtctgggctgaagcagacactgctggcggagtccgaggctctgaccagctacagccaccgggtgttctcggcctgggacttcggtctctgcggggacgtccacgtgcggctgcgccagcgcatcatcttgtacgaattaaaggtggagctggaggagacagtggtgcggcgccaggctgcggtgcggacgctgggccagcaagccagggtttggttggtgcgggtgctgctcaacctgctggtggtcgcgctcctgggggcagccttctatggcgtctactgggctacggggtgcaccgtggagctgcaggagatgccccttgtccaggagttgccactgctgaagcttggggtgaattaccttccgtccatcttcatcgctggggtcaattttgtgctgccgcccgtgttcaagctcattgctccactggagggctacactcggagtcgccagatcgtttttatcctgctcaggaccgtgtttcttcgcctcgcctccctggtggtcctgctcttctctctctggaatcagatcacttgtgggggcgactccgaggctgaggactgcaaaacctgtggctacaattacaaacaacttccgtgctgggagactgtcctgggccaggaaatgtacaaacttctgctctttgatctgctgactgtcttggcagtcgcgctgctcatccagtttcctagaaagctcctctgtggcctctgtcctggggcgctgggtcgtctggcggggacccaggagttccaggtgcccgacgaggtgctggggctcatctacgcgcagacggtggtctgggtggggagttttttctgccctttactgcccctgcttaacacggtcaagttcctgctgcttttctacctgaagaagcttaccctcttctccacctgctccccggctgcccgcaccttccgggcctccgcggcgaatttctttttccccttggtccttctcctgggtctggccatctccagcgttcccctgctttacagcatcttcctgatcccgccttctaagctttgtggtccattccgggggcagtcgtccatctgggcccagatccctgagtctatttccagcctccctgagaccacccagaatttcctcttcttcctggggacccaggcttttgctgtgccccttctgctgatctccagcatcctgatggcgtacactgtggctctggctaactcctacggacgcctcatctctgagctcaaacgtcagagacagacggaggcgcagaataaagtcttcctggcacggcgcgctgtggcgctgacctccaccaaaccggctctttgacccccgcagcccacgtcccgctttcagaccccaggcccattgtaagcctaggtcacaacatctgtaaactaggagaactggagaagactccacgcccttccagctttggtatctggagatttccagggcccctcgccgccacgtccctgactctcgggtgatcttccttgtatcaataaatacagccgaggttgctga

SEQ ID NO: 193258 - DNA, 718 bp, Homo sapiens
  Payload ID: 18150
  Gene Name: transmembrane channel-like 4
  ENST ID: ENST00000610383
  CDS Start-End: 1-718
gcccatcgctgtcttctgtgctgaacgagctgcccagtgctgccacccttcggtaccgagaccctggggtgctgccttggggggcgctggaggaggaggaggaggatggaggaaggagcagaaaggccttcacagaagtcacccagacagagctgcaggaccctcacccttcccgggaactgccctggcccatgcaggccagacgggcacacaggcaaagaaatgccagcagggaccaggtggtctatggctctggaactaagacggaccgatgggcgcggctacttcggaggtccaaggagaaaacaaaggaaggcttgcgaagcctgcagccctgggcgtggacactgaagaggatcgggggccagtttggcgccggcacggagtcctacttctccctgctgcgcttcctgctccttcttaacgtgctggcctctgtgctcatggcctgcatgacgctgctgcccacctggttgggaggcgctcccccaggccctcccggccccgacatctcctcgccctgcggctcctataacccccactcccagggcctggtcacctttgccacccagctcttcaacttgctctcgggtgagggttacctggaatggtcccctctcttctatggcttctacccgccccgcccacgcctggcggtcacctacctgtgctgggcctttgccgttggcctcatctgcctcctgctcatcctgcatcg

SEQ ID NO: 193259 - DNA, 2412 bp, Homo sapiens; identical to SEQ ID NO: 193252
  Payload ID: 18150
  Gene Name: transmembrane channel-like 4
  ENST ID: ENST00000613354
  CDS Start-End: 133-2271

SEQ ID NO: 193260 - DNA, 506 bp, Homo sapiens
  Payload ID: 18150
  Gene Name: transmembrane channel-like 4
  ENST ID: ENST00000615945
  CDS Start-End: 1-168
cctgagtctatttccagcctccctgagaccacccagaatttcctcttcttcctggggacccaggcttttgctgtgccccttctgctgatctccaggagccagacgtttggatataatggaagagcgtgtcaggagtggcttccgttcctgtctccttcagcatcctgatggcgtacactgtggctctggctaactcctacggacgcctcatctctgagctcaaacgtcagagagagacggaggcgcagaataaagtcttcctggcacggcgcgctgtggcgctgacctccaccaaaccggctctttgacccccgcagcccacgtcccgctttcagaccccaggcccattgtaagcctaggtcacaacatctgtaaactaggagaactggagaagactccacgcccttccagctttggtatctggagatttccagggcccctcgccgccacgtccctgactctcgggtgatcttccttgtatcaataaatacagccgaggttgctga

SEQ ID NO: 193261 - DNA, 2372 bp, Homo sapiens
  Payload ID: 18150
  Gene Name: transmembrane channel-like 4
  Uniprot ID: Q7Z404
  ENST ID: ENST00000621671
  CDS Start-End: 54-2174
ttacctggggcagtgtctgcctggtggccactagagacagcccagcctgggccatggaagaaaacccgaccttggaatcagaagcctggggctcctctagggggtggctggccccccgggaggccagaggaggcccatcgctgtcttctgtgctgaacgagctgcccagtgctgccacccttcggtaccgagaccctggggtgctgccttggggggcgctggaggaggaggaggaggatggaggaaggagcagaaaggccttcacagaagtcacccagacagagctgcaggaccctcacccttcccgggaactgccctggcccatgcaggccagacgggcacacaggcaaagaaatgccagcagggaccaggtggtctatggctctggaactaagacggaccgatgggcgcggctacttcggaggtccaaggagaaaacaaaggaaggcttgcgaagcctgcagccctgggcgtggacactgaagaggatcgggggccagtttggcgccggcacggagtcctacttctccctgctgcgcttcctgctccttcttaacgtgctggcctctgtgctcatggcctgcatgacgctgctgcccacctggttgggaggcgctcccccaggccctcccggccccgacatctcctcgccctgcggctcctataacccccactcccagggcctggtcacctttgccacccagctcttcaacttgctctcgggtgagggttacctggaatggtcccctctcttctatggcttctacccgccccgcccacgcctggcggtcacctacctgtgctgggcctttgccgttggcctcatctgcctcctgctcatcctgcatcgctcggtgtctgggctgaagcagacactgctggcggagtccgaggctctgaccagctacagccaccgggtgttctcggcctgggacttcggtctctgcggggacgtccacgtgcggctgcgccagcgcatcatcttgtacgaattaaaggtggagctggaggagacagtggtgcggcgccaggctgcggtgcggacgctgggccagcaagccagggtttggttggtgcgggtgctgctcaacctgctggtggtcgcgctcctgggggcagccttctatggcgtctactgggctacggggtgcaccgtggagctgcaggagatgccccttgtccaggagttgccactgctgaagcttggggtgaattaccttccgtccatcttcatcgctggggtcaattttgtgctgccgcccgtgttcaagctcattgctccactggagggctacactcggagtcgccagatcgtttttatcctgctcaggaccgtgtttcttcgcctcgcctccctggtggtcctgctcttctctctctggaatcagatcacttgtgggggcgactccgaggctgaggactgcaaaacctgtggctacaattacaaacaacttccgtgctgggagactgtcctgggccaggaaatgtacaaacttctgctctttgatctgctgactgtcttggcagtcgcgctgctcatccagtttcctagaaagctcctctgtggcctctgtcctggggcgctgggtcgtctggcggggacccaggagttccaggtgcccgacgaggtgctggggctcatctacgcgcagacggtggtctgggtggggagttttttctgccctttactgcccctgcttaacacggtcaagttcctgctgcttttctacctgaagaagcttaccctcttctccacctgctccccggctgcccgcaccttccgggcctccgcggcgaatttctttttccccttggtccttctcctgggtctggccatctccagcgttcccctgctttacagcatcttcctgatcccgccttctaagctttgtggtccattccgggggcagtcgtccatctgggcccagatccctgagtctatttccagcctccctgagaccacccagaatttcctcttcttcctggggacccaggcttttgctgtgccccttctgctgatctccagcatcctgatggcgtacactgtggctctggctaactcctacggacgcctcatctctgagctcaaacgtcagagacagacggaggcgcagaataaagtcttcctggcacggcgcgctgtggcgctgacctccaccaaaccggctctttgacccccgcagcccacgtcccgctttcagaccccaggcccattgtaagcctaggtcacaacatctgtaaactaggagaactggagaagactccacgcccttccagctttggtatctggagatttccagggcccctcgccgccacgtccctgactctcgggtgatcttccttgtatcaataaatacagccgaggttgctga

SEQ ID NO: 193262 - DNA, 2412 bp, Homo sapiens; identical to SEQ ID NO: 193252
  Payload ID: 18150
  Gene Name: transmembrane channel-like 4
  Uniprot ID: Q7Z404
  ENST ID: ENST00000622368
  CDS Start-End: 133-2271

SEQ ID NO: 193263 - DNA, 2412 bp, Homo sapiens; identical to SEQ ID NO: 193252
  Payload ID: 18150
  Gene Name: transmembrane channel-like 4
  Uniprot ID: Q7Z404
  ENST ID: ENST00000612712
  CDS Start-End: 133-2271

SEQ ID NO: 193264 - DNA, 2413 bp, Homo sapiens
  Payload ID: 18150
  Gene Name: transmembrane channel-like 4
  ENST ID: ENST00000621539
  CDS Start-End: 134-2272
ctgagaaaccacaggaagtgtaccttactccctccgggccacctgctggccaggtacacacctgcccctggcccctcccttacctggggcagtgtctgcctggtggccactagagacagcccagcctggggccatggaagaaaacccgaccttggaatcagaagcctggggctcctctagggagtggctggccccccgggaggccagaggagccccctgctcctccccaggcccatcgctgtcttctgtgctgaacgagctgcccagtgctgccacccttcggtaccgagaccctggggtgctgccttggggggcgctggaggaggaggaggaggatggaggaaggagcagaaaggccttcacagaagtcacccagacagagctgcaggaccctcacccttcccgggaactgccctggcccatgcaggccagacgggcatacaggcaaagaaatgccagcagggaccaggtggtctatggctctggaactaagacggaccgatgggcgcggctacttcggaggtccaaggagaaaacaaaggaaggcttgcgaagcctgcagccctgggcgtggacactgaagaggatcgggggccagtttggcgccggcacggagtcctacttctccctgctgcgcttcctgctccttcttaacgtgctggcctctgtgctcatggcctgcatgacgctgctgcccacctggttgggaggcgctcccccaggccctcccggccccgacatctcctcgccctgcggctcctataacccccactcccagggcctggtcacctttgccacccagctcttcaacttgctctcgggtgagggttacctggaatggtcccctctcttctatggcttctacccgccccgcccacgcctggcggtcacctacctgtgctgggcctttgccgttggcctcatctgcctcctgctcatcctgcatcgctcggtgtctgggctgaagcagacactgctggcggagtccgaggctctgaccagctacagccaccgggtgttctcggcctgggacttcggtctctgcggggacgtccacgtgcggctgcgccagcgcatcatcttgtacgaattaaaggtggagctggaggagacagtggtgcggcgccaggctgcggtgcggacgctgggccagcaagccagggtttggttggtgcgggtgctgctcaacctgctggtggtcgcgctcctgggggcagccttctatggcgtctactgggctacggggtgcaccgtggagctgcaggagatgccccttgtccaggagttgccactgctgaagcttggggtgaattaccttccgtccatcttcatcgctggggtcaattttgtgctgccgcccgtgttcaagctcattgctccactggagggctacactcggagtcgccagatcgtttttatcctgctcaggaccgtgtttcttcgcctcgcctccctggtggtcctgctcttctctctctggaatcagatcacttgtgggggcgactccgaggctgaggactgcaaaacctgtggctacaattacaaacaacttccgtgctgggagactgtcctgggccaggaaatgtacaaacttctgctctttgatctgctgactgtcttggcagtcgcgctgctcatccagtttcctagaaagctcctctgtggcctctgtcctggggcgctgggtcgtctggcggggacccaggagttccaggtgcccgacgaggtgctggggctcatctacgcgcagacggtggtctgggtggggagttttttctgccctttactgcccctgcttaacacggtcaagttcctgctgcttttctacctgaagaagcttaccctcttctccacctgctccccggctgcccgcaccttccgggcctccgcggcgaatttctttttccccttggtccttctcctgggtctggccatctccagcgttcccctgctttacagcatcttcctgatcccgccttctaagctttgtggtccattccgggggcagtcgtccatctgggcccagatccctgagtctatttccagcctccctgagaccacccagaatttcctcttcttcctggggacccaggcttttgctgtgccccttctgctgatctccagcatcctgatggcgtacactgtggctctggctaactcctacggacgcctcatctctgagctcaaacgtcagagacagacggaggcgcagaataaagtcttcctggcacggcgcgctgtggcgctgacctccaccaaaccggctctttgacccccgcagcccacgtcccgctttcagaccccaggcccattgtaagcctaggtcacaacatctgtaaactaggagaactggagaagactccacgcccttccagctttggtatctggagatttccagggcccctcgccgcca

SEQ ID NO: 193265 - DNA, 506 bp, Homo sapiens
  Payload ID: 18150
  Gene Name: transmembrane channel-like 4
  ENST ID: ENST00000619510
  CDS Start-End: 1-168
cctgagtctatttccagcctccctgagaccacccagaatttcctcttcttcctggggacccaggcttttgctgtgccccttctgctgatctccaggagccagacgtttggatataatggaagagcgtgtcaggagtggcttccgttcctgtctccttcagcatcctgatggcgtacactgtggctctggctaactcctacggacgcctcatctctgagctcaaacgtcagagacagacggaggcgcagaataaagtcttcctggcacggcgcgctgtggcgctgacctccaccaaaccggctctttgacccccgcagcccacgtcccgctttcagaccccaggcccattgtaagcctaggtcacaacatctgtaaactaggagaactggagaagactccacgcccttccagctttggtatctggagatttccagggcccctcgccgccacgtccctgactctcgggtgatcttccttgtatcaataaatacagccgaggttgctga

SEQ ID NO: 193266 - DNA, 2413 bp, Homo sapiens
  Payload ID: 18150
  Gene Name: transmembrane channel-like 4
  ENST ID: ENST00000621826
  CDS Start-End: 134-2272
ctgagaaaccacaggaagtgtaccttactccctccgggccacctgctggccaggtacacacctgcccctggcccctcccttacctggggcagtgtctgcctggtggccactagagacagcccagcctggggccatggaagaaaacccgaccttggaatcagaagcctggggctcctctagggagtggctggccccccgggaggccagaggagccccctgctcctccccaggcccatcgctgtcttctgtgctgaacgagctgcccagtgctgccacccttcggtaccgagaccctggggtgctgccttggggggcgctggaggaggaggaggaggatggaggaaggagcagaaaggccttcacagaagtcacccagacagagctgcaggaccctcacccttcccgggaactgccctggcccatgcaggccagacgggcatacaggcaaagaaatgccagcagggaccaggtggtctatggctctggaactaagacggaccgatgggcgcggctacttcggaggtccaaggagaaaacaaaggaaggcttgcgaagcctgcagccctgggcgtggacactgaagaggatcgggggccagtttggcgccggcacggagtcctacttctccctgctgcgcttcctgctccttcttaacgtgctggcctctgtgctcatggcctgcatgacgctgctgcccacctggttgggaggcgctcccccaggccctcccggccccgacatctcctcgccctgcggctcctataacccccactcccagggcctggtcacctttgccacccagctcttcaacttgctctcgggtgagggttacctggaatggtcccctctcttctatggcttctacccgccccgcccacgcctggcggtcacctacctgtgctgggcctttgccgttggcctcatctgcctcctgctcatcctgcatcgctcggtgtctgggctgaagcagacactgctggcggagtccgaggctctgaccagctacagccaccgggtgttctcggcctgggacttcggtctctgcggggacgtccacgtgcggctgcgccagcgcatcatcttgtacgaattaaaggtggagctggaggagacagtggtgcggcgccaggctgcggtgcggacgctgggccagcaagccagggtttggttggtgcgggtgctgctcaacctgctggtggtcgcgctcctgggggcagccttctatggcgtctactgggctacggggtgcaccgtggagctgcaggagatgccccttgtccaggagttgccactgctgaagcttggggtgaattaccttccgtccatcttcatcgctggggtcaattttgtgctgccgcccgtgttcaagctcattgctccactggagggctacactcggagtcgccagatcgtttttatcctgctcaggaccgtgtttcttcgcctcgcctccctggtggtcctgctcttctctctctggaatcagatcacttgtgggggcgactccgaggctgaggactgcaaaacctgtggctacaattacaaacaacttccgtgctgggagactgtcctgggccaggaaatgtacaaacttctgctctttgatctgctgactgtcttggcagtcgcgctgctcatccagtttcctagaaagctcctctgtggcctctgtcctggggcgctgggtcgtctggcggggacccaggagttccaggtgcccgacgaggtgctggggctcatctacgcgcagacggtggtctgggtggggagttttttctgccctttactgcccctgcttaacacggtcaagttcctgctgcttttctacctgaagaagcttaccctcttctccacctgctccccggctgcccgcaccttccgggcctccgcggcgaatttctttttccccttggtccttctcctgggtctggccatctccagcgttcccctgctttacagcatcttcctgatcccgccttctaagctgtgtggtccattccgggggcagtcgtccatctgggcccagatccctgagtctatttccagcctccctgagaccacccagaatttcctcttcttcctggggacccaggcttttgctgtgccccttctgctgatctccagcatcctgatggcgtacactgtggctctggctaactcctacggacgcctcatctctgagctcaaacgtcagagagagacggaggcgcagaataaagtcttcctggcacggcgcgctgtggcgctgacctccaccaaaccggctctttgacccccgcagcccacgtcccgctttcagaccccaggcccattgtaagcctaggtcacaacatctgtaaactaggagaactggagaagactccacgcccttccagctttggtatctggagatttccagggcccctcgccgcca

SEQ ID NO: 193267 - DNA, 2412 bp, Homo sapiens; identical to SEQ ID NO: 193252
  Payload ID: 18150
  Gene Name: transmembrane channel-like 4
  Uniprot ID: Q7Z404
  ENST ID: ENST00000616323
  CDS Start-End: 133-2271

SEQ ID NO: 193268 - DNA, 3687 bp, Homo sapiens
  Payload ID: 18151
  Gene Name: transmembrane channel-like 5
  Uniprot ID: Q6UXY8
  ENST ID: ENST00000219821
  CDS Start-End: 258-2540
acagaattctctgcaggaaaacactccttctcctgagaaaactcctcaggggttagatgcagggagttatgttgtgatttgtgtaggggtggctttggtgagctcatcctggcattttaaaaataatgtgaatggtgtatccctttgtgatcatcatcactttttccctgcgagtcccaatcaatgcgggtgtgactgctgtatgaagtctcaggaagcccaccccagtggagaagaaggcttgcaggaggcaggagatgctgtccgatgaccacgtgaatgaaatcatcatacaggttgagaatgtttcctctggggtccaaagccacccatcctcaaatcagatttttcaagaaaaggtgctgctagactcaagcatcaacatggttttgtcaatatctgacattgatgtgatagactctcagacagtcagcaaaaggaatgaccaaaagggtaaccaggtgctgcggttttcaacatctttgaatgagtcgatgtctcagacccttcatagcctagaatgcatgggcatagacactcctggttcttcacatgaaactgttcaaggacagaagttaatcgcatcccttatacccatgacatccagagacagaattaaagccatcaggaaccagccaaggaccatggaagagaaaaggaaccttaggaaaatagttgacaaagaaaaaagcaaacagacccatcgtatccttcagctcaattgctgtattcagtgtctgaactccatttcccgggcttatcggagatccaagaacagcctgtcggaaattctgaattccatcagcctgtggcagaagacgctgaagatcattggaggcaagtttggaaccagcgtcctctcctatttcaactttctgagatggcttttgaagttcaacattttctcattcatcctgaacttcagcttcatcataatccctcagtttaccgtggccaaaaagaacaccctccagttcactgggctggagtttttcactggggtgggttattttagggacacagtgatgtactatggcttttacaccaattccaccatccagcacgggaacagcggggcatcctacaacatgcagctggcctacatcttcacaatcggagcatgcttgaccacctgcttcttcagtttgctgttcagcatggccaagtatttccggaacaacttcattaatccccacatttactccggagggatcaccaagctgatcttttgctgggacttcactgtcactcatgaaaaagctgtgaagctaaaacagaagaatcttagcactgagataagggagaacctgtcagagctccgtcaggagaattccaagttgacgttcaatcagctgctgacccgcttctctgcctacatggtagcctgggttgtctctacaggagtggccatagcctgctgtgcagccgtttattacctggctgagtacaacttagagttcctgaagacacacagtaaccctggggcggtgctgttactgcctttcgttgtgtcctgcattaatctggccgtgccatgcatctactccatgttcaggcttgtggagaggtacgagatgccacggcacgaagtctacgttctcctgatccgaaacatctttttgaaaatatcaatcattggcattctttgttactattggctcaacaccgtggccctgtctggtgaagagtgttgggaaaccctcattggccaggacatctaccggctccttctgatggattttgtgttctctttagtcaattccttcctgggggagtttctgaggagaatcattgggatgcaactgatcacaagtcttggccttcaggagtttgacattgccaggaacgttctagaactgatctatgcacaaactctggtgtggattggcatcttcttctgccccctgctgccctttatccaaatgattatgcttttcatcatgttctactccaaaaatatcagcctgatgatgaatttccagcctccgagcaaagcctggcgggcctcacagatgatgactttcttcatcttcttgctctttttcccatccttcaccggggtcttgtgcaccctggccatcaccatctggagattgaagccttcagctgactgtggcccttttcgaggtctgcctctcttcattcactccatctacagctggatcgacaccctaagtacacggcctggctacctgtgggttgtttggatctatcggaacctcattggaagtgtgcacttctttttcatcctcaccctcattgtgctaatcatcacctatctttactggcagatcacagagggaaggaagattatgataaggctgctccatgagcagatcattaatgagggcaaagataaaatgttcctgatagaaaaattgatcaagctgcaggatatggagaagaaagcaaaccccagctcacttgttctggaaaggagagaggtggagcaacaaggctttttgcatttgggggaacatgatggcagtcttgacttgcgatctagaagatcagttcaagaaggtaatccaagggcctgatgactcttttggtaaccagacaccaatcaaataaggggaggagacgaaaatggaatgatttcttccatgccacctgtgcctttaggaactgcccagaagaaaatccaaggctttagccaggagcggaaactgactaccatgtaattatcaaagtaaaattgggcattccatgctatttttaatacctggattgctgatttttcaagacaaaatacttggggttttccaataaagattgttgtaatattgaaatgagcctacaaaaacctaggaagagataactagggaataatgtatattatcttcaagaagtgtgtgcaggaatgattggttcttagaaatctctcctgccagacttcccagacctggcaaaggtttagaaactgttgctaagaaaagtggtccatcctgaataaacatgtaatactccagcagggatatgaagcctctgaattgtagaacctgcatttatttgtgactttgaactaaagacatcccccatgtcccaaaggtggaatacaaccagaggtctcatctctgaactttcttgcgtactgattacatgagtctttggagtcggggatggaggaggttctgcccctgtgaggtgttatacatgaccatcaaagtcctacgtcaagctagctttgcagtggcagtaccgtagccaatgagatttatccgagacgcgattattgctaattggaaattttcccaataccccaccgtgatgacttgaaatataatcagcgctggcaatttttgacagtctctacggagactgaataagaaaaaagaaaagaaaagaaattagctgggtgcgatggcttatgcctgtaatcccggcactttgggaggctgaggcaagcggatcacttaatgtcaggagttcaagaccagcctggccaacatggtgaaaccccgtctctactaaaaataaaaaaactagctgggcgtggtggtacatgcctataatcccagctactcgggaggctgaggcaggagaattgcttgaacctgggaggcagaggttgcagtgaggcgagattgtaccactgcattccagcctgggcaacagtgagactctgcctcaaaaaaataaataaataaataaataaagtaaattaaaagtcttattcaaaccaaa

SEQ ID NO: 193269 - DNA, 4755 bp, Homo sapiens
  Payload ID: 18151
  Gene Name: transmembrane channel-like 5
  Uniprot ID: Q6UXY8
  ENST ID: ENST00000381414
  CDS Start-End: 762-3608
cagggtcgacccgagggccagcgcaagcagcggcaacaggagcgccaggaggtgaggcgggttcgccaggagtggggccagcgcccgggctgccagcctagcaggggcgtcttggcggagccccctcgccggctcccagagaggctgggaagaactgggaggggtgtccccaatgcggggcgcccaagcgtggcagcacgggctgggagcggggagccagcggggtgcggcgccggagtgcggggagaaccaccaggcgccggaattggggagcacgtggagggggcagcggctccagccccagaccgccgcgctctgtcactttgcattaagaaagcttccggggaatgcacacggcctggccgccgccttcgtgcagcccgccctgcaggtgcaggaagaaaagaataatcgcacccgtttctcaggtgcttacttcaccatgtccgatccggacatgaggctctgcctgcagtcagcaacttggaatattcagacttcagaccagcatcacagattataaccctccgtaaatcatctgcatcccagctcccatcaaaagccagcctgaaggacccatggacacgtgactccagtgttctcaacaacatcttaagatcaagttggtttgcacaacatttgcatctacttgggacaaagcaagaacaataagggcaaaaaagtgaaaaaaaaaaaagatccctgagtaattgcaaatgctgggacagtttaccactccagggtgaagagtccataccaacatgtctgcctactacaggaataactggtctgaggaagacccagattaccctgactattcagggtctcagaaccgtacgcaggggtatttgaaaactcaaggttatccagatgttccaggtcctctgaacaatccagactaccccggcaccaggagcaatccatactctgtagcctccagaacacgtccagactatcctgggtctctggcagaaccaaattatcctagatctctgagtaatccagactattctggcaccagaagcaatgcatactctgcagcctctagaacaagcccagaccatcctacctctctaccagagccagattatagtgaatttcagagtcatccctaccaccgagcatcatccagacaaccagactaccctggatctcaacgaaatcctgattttgcaggctccagcagcagtggaaactatgcaggctccagaacacatccagatcattttggctccttagaaccggactaccctggagctcagagcaactctgatcatcctggacccagagccaatttgaaccatccaggatccagaaagaatctggaacatacaagttttagaatcaatccatacgcagactctctgggaaagcctgattatccaggcgctgacattcaacctaactctccacccttttttggggagccagactatcccagtgctgaggacaatcagaacttgccaagcacttggagagaacctgattattcagatgctgagaatggtcatgattatggctcttctgagaccccaaagatgaccaggggggtgctcagcagaacatcttcaatccagccctcatttcgtcacaggagtgatgaccccgtgggcagtctttggggagagaatgattaccctgaaggcattgaaatggcatccatggagatggcaaactcatatggccactctctgccaggtgctcctggaagtggctatgtgaaccctgcttatgtaggtgaaagtggtcctgtccatgcttatggaaacccaccattgtctgaatgtgattggcacaagtcaccccaaggacagaagttaatcgcatcccttatacccatgacatccagagacagaattaaagccatcaggaaccagccaaggaccatggaagagaaaaggaaccttaggaaaatagttgacaaagaaaaaagcaaacagacccatcgtatccttcagctcaattgctgtattcagtgtctgaactccatttcccgggcttatcggagatccaagaacagcctgtcggaaattctgaattccatcagcctgtggcagaagacgctgaagatcattggaggcaagtttggaaccagcgtcctctcctatttcaactttctgagatggcttttgaagttcaacattttctcattcatcctgaacttcagcttcatcataatccctcagtttaccgtggccaaaaagaacaccctccagttcactgggctggagtttttcactggggtgggttattttagggacacagtgatgtactatggcttttacaccaattccaccatccagcacgggaacagcggggcatcctacaacatgcagctggcctacatcttcacaatcggagcatgcttgaccacctgcttcttcagtttgctgttcagcatggccaagtatttccggaacaacttcattaatccccacatttactccggagggatcaccaagctgatcttttgctgggacttcactgtcactcatgaaaaagctgtgaagctaaaacagaagaatcttagcactgagataagggagaacctgtcagagctccgtcaggagaattccaagttgacgttcaatcagctgctgacccgcttctctgcctacatggtagcctgggttgtctctacaggagtggccatagcctgctgtgcagccgtttattacctggctgagtacaacttagagttcctgaagacacacagtaaccctggggcggtgctgttactgcctttcgttgtgtcctgcattaatctggccgtgccatgcatctactccatgttcaggcttgtggagaggtacgagatgccacggcacgaagtctacgttctcctgatccgaaacatctttttgaaaatatcaatcattggcattctttgttactattggctcaacaccgtggccctgtctggtgaagagtgttgggaaaccctcattggccaggacatctaccggctccttctgatggattttgtgttctctttagtcaattccttcctgggggagtttctgaggagaatcattgggatgcaactgatcacaagtcttggccttcaggagtttgacattgccaggaacgttctagaactgatctatgcacaaactctggtgtggattggcatcttcttctgccccctgctgccctttatccaaatgattatgcttttcatcatgttctactccaaaaatatcagcctgatgatgaatttccagcctccgagcaaagcctggcgggcctcacagatgatgactttcttcatcttcttgctctttttcccatccttcaccggggtcttgtgcaccctggccatcaccatctggagaatcatcacctatctttactggcagatcacagagggaaggaagattatgataaggctgctccatgagcagatcattaatgagggcaaagataaaatgttcctgatagaaaaattgatcaagctgcaggatatggagaagaaagcaaaccccagctcacttgttctggaaaggagagaggtggagcaacaaggctttttgcatttgggggaacatgatggcagtcttgacttgcgatctagaagatcagttcaagaaggtaatccaagggcctgatgactcttttggtaaccagacaccaatcaaataaggggaggagacgaaaatggaatgatttcttccatgccacctgtgcctttaggaactgcccagaagaaaatccaaggctttagccaggagcggaaactgactaccatgtaattatcaaagtaaaattgggcattccatgctatttttaatacctggattgctgatttttcaagacaaaatacttggggttttccaataaagattgttgtaatattgaaatgagcctacaaaaacctaggaagagataactagggaataatgtatattatcttcaagaagtgtgtgcaggaatgattggttcttagaaatctctcctgccagacttcccagacctggcaaaggtttagaaactgttgctaagaaaagtggtccatcctgaataaacatgtaatactccagcagggatatgaagcctctgaattgtagaacctgcatttatttgtgactttgaactaaagacatcccccatgtcccaaaggtggaatacaaccagaggtctcatctctgaactttcttgcgtactgattacatgagtctttggagtcggggatggaggaggttctgcccctgtgaggtgttatacatgaccatcaaagtcctacgtcaagctagctttgcagtggcagtaccgtagccaatgagatttatccgagacgcgattattgctaattggaaattttcccaataccccaccgtgatgacttgaaatataatcagcgctggcaatttttgacagtctctacggagactgaataagaaaaaagaaaagaaaagaaattagctgggtgcgatggcttatgcctgtaatcccggcactttgggaggctgaggcaagcggatcacttaatgtcaggagttcaagaccagcctggccaacatggtgaaaccccgtctctactaaaaataaaaaaactagctgggcgtggtggtacatgcctataatcccagctactcgggaggctgaggcaggagaattgcttgaacctgggaggcagaggttgcagtgaggcgagattgtaccactgcattccagcctgggcaacagtgagactctgcctcaaaaaaataaataaataaataaataaagtaaattaaaagtcttattcaaaccaaa

SEQ ID NO: 193270 - DNA, 4917 bp, Homo sapiens
  Payload ID: 18151
  Gene Name: transmembrane channel-like 5
  Uniprot ID: Q6UXY8
  ENST ID: ENST00000396229
  CDS Start-End: 750-3770
gagggccagcgcaagcagcggcaacaggagcgccaggaggtgaggcgggttcgccaggagtggggccagcgcccgggctgccagcctagcaggggcgtcttggcggagccccctcgccggctcccagagaggctgggaagaactgggaggggtgtccccaatgcggggcgcccaagcgtggcagcacgggctgggagcggggagccagcggggtgcggcgccggagtgcggggagaaccaccaggcgccggaattggggagcacgtggagggggcagcggctccagccccagaccgccgcgctctgtcactttgcattaagaaagcttccggggaatgcacacggcctggccgccgccttcgtgcagcccgccctgcaggtgcaggaagaaaagaataatcgcacccgtttctcaggtgcttacttcaccatgtccgatccggacatgaggctctgcctgcagtcagcaacttggaatattcagacttcagaccagcatcacagattataaccctccgtaaatcatctgcatcccagctcccatcaaaagccagcctgaaggacccatggacacgtgactccagtgttctcaacaacatcttaagatcaagttggtttgcacaacatttgcatctacttgggacaaagcaagaacaataagggcaaaaaagtgaaaaaaaaaaaagatccctgagtaattgcaaatgctgggacagtttaccactccagggtgaagagtccataccaacatgtctgcctactacaggaataactggtctgaggaagacccagattaccctgactattcagggtctcagaaccgtacgcaggggtatttgaaaactcaaggttatccagatgttccaggtcctctgaacaatccagactaccccggcaccaggagcaatccatactctgtagcctccagaacacgtccagactatcctgggtctctggcagaaccaaattatcctagatctctgagtaatccagactattctggcaccagaagcaatgcatactctgcagcctctagaacaagcccagaccatcctacctctctaccagagccagattatagtgaatttcagagtcatccctaccaccgagcatcatccagacaaccagactaccctggatctcaacgaaatcctgattttgcaggctccagcagcagtggaaactatgcaggctccagaacacatccagatcattttggctccttagaaccggactaccctggagctcagagcaactctgatcatcctggacccagagccaatttgaaccatccaggatccagaaagaatctggaacatacaagttttagaatcaatccatacgcagactctctgggaaagcctgattatccaggcgctgacattcaacctaactctccacccttttttggggagccagactatcccagtgctgaggacaatcagaacttgccaagcacttggagagaacctgattattcagatgctgagaatggtcatgattatggctcttctgagaccccaaagatgaccaggggggtgctcagcagaacatcttcaatccagccctcatttcgtcacaggagtgatgaccccgtgggcagtctttggggagagaatgattaccctgaaggcattgaaatggcatccatggagatggcaaactcatatggccactctctgccaggtgctcctggaagtggctatgtgaaccctgcttatgtaggtgaaagtggtcctgtccatgcttatggaaacccaccattgtctgaatgtgattggcacaagtcaccccaaggacagaagttaatcgcatcccttatacccatgacatccagagacagaattaaagccatcaggaaccagccaaggaccatggaagagaaaaggaaccttaggaaaatagttgacaaagaaaaaagcaaacagacccatcgtatccttcagctcaattgctgtattcagtgtctgaactccatttcccgggcttatcggagatccaagaacagcctgtcggaaattctgaattccatcagcctgtggcagaagacgctgaagatcattggaggcaagtttggaaccagcgtcctctcctatttcaactttctgagatggcttttgaagttcaacattttctcattcatcctgaacttcagcttcatcataatccctcagtttaccgtggccaaaaagaacaccctccagttcactgggctggagtttttcactggggtgggttattttagggacacagtgatgtactatggcttttacaccaattccaccatccagcacgggaacagcggggcatcctacaacatgcagctggcctacatcttcacaatcggagcatgcttgaccacctgcttcttcagtttgctgttcagcatggccaagtatttccggaacaacttcattaatccccacatttactccggagggatcaccaagctgatcttttgctgggacttcactgtcactcatgaaaaagctgtgaagctaaaacagaagaatcttagcactgagataagggagaacctgtcagagctccgtcaggagaattccaagttgacgttcaatcagctgctgacccgcttctctgcctacatggtagcctgggttgtctctacaggagtggccatagcctgctgtgcagccgtttattacctggctgagtacaacttagagttcctgaagacacacagtaaccctggggcggtgctgttactgcctttcgttgtgtcctgcattaatctggccgtgccatgcatctactccatgttcaggcttgtggagaggtacgagatgccacggcacgaagtctacgttctcctgatccgaaacatctttttgaaaatatcaatcattggcattctttgttactattggctcaacaccgtggccctgtctggtgaagagtgttgggaaaccctcattggccaggacatctaccggctccttctgatggattttgtgttctctttagtcaattccttcctgggggagtttctgaggagaatcattgggatgcaactgatcacaagtcttggccttcaggagtttgacattgccaggaacgttctagaactgatctatgcacaaactctggtgtggattggcatcttcttctgccccctgctgccctttatccaaatgattatgcttttcatcatgttctactccaaaaatatcagcctgatgatgaatttccagcctccgagcaaagcctggcgggcctcacagatgatgactttcttcatcttcttgctctttttcccatccttcaccggggtcttgtgcaccctggccatcaccatctggagattgaagccttcagctgactgtggcccttttcgaggtctgcctctcttcattcactccatctacagctggatcgacaccctaagtacacggcctggctacctgtgggttgtttggatctatcggaacctcattggaagtgtgcacttctttttcatcctcaccctcattgtgctaatcatcacctatctttactggcagatcacagagggaaggaagattatgataaggctgctccatgagcagatcattaatgagggcaaagataaaatgttcctgatagaaaaattgatcaagctgcaggatatggagaagaaagcaaaccccagctcacttgttctggaaaggagagaggtggagcaacaaggctttttgcatttgggggaacatgatggcagtcttgacttgcgatctagaagatcagttcaagaaggtaatccaagggcctgatgactcttttggtaaccagacaccaatcaaataaggggaggagacgaaaatggaatgatttcttccatgccacctgtgcctttaggaactgcccagaagaaaatccaaggctttagccaggagcggaaactgactaccatgtaattatcaaagtaaaattgggcattccatgctatttttaatacctggattgctgatttttcaagacaaaatacttggggttttccaataaagattgttgtaatattgaaatgagcctacaaaaacctaggaagagataactagggaataatgtatattatcttcaagaagtgtgtgcaggaatgattggttcttagaaatctctcctgccagacttcccagacctggcaaaggtttagaaactgttgctaagaaaagtggtccatcctgaataaacatgtaatactccagcagggatatgaagcctctgaattgtagaacctgcatttatttgtgactttgaactaaagacatcccccatgtcccaaaggtggaatacaaccagaggtctcatctctgaactttcttgcgtactgattacatgagtctttggagtcggggatggaggaggttctgcccctgtgaggtgttatacatgaccatcaaagtcctacgtcaagctagctttgcagtggcagtaccgtagccaatgagatttatccgagacgcgattattgctaattggaaattttcccaataccccaccgtgatgacttgaaatataatcagcgctggcaatttttgacagtctctacggagactgaataagaaaaaagaaaagaaaagaaattagctgggtgcgatggcttatgcctgtaatcccggcactttgggaggctgaggcaagcggatcacttaatgtcaggagttcaagaccagcctggccaacatggtgaaaccccgtctctactaaaaataaaaaaactagctgggcgtggtggtacatgcctataatcccagctactcgggaggctgaggcaggagaattgcttgaacctgggaggcagaggttgcagtgaggcgagattgtaccactgcattccagcctgggcaacagtgagactctgcctcaaaaaaataaataaataaataaataaagtaaattaaaagtcttattcaaaccaaa

SEQ ID NO: 193271 - DNA, 3581 bp, Homo sapiens
  Payload ID: 18151
  Gene Name: transmembrane channel-like 5
  ENST ID: ENST00000541464
  CDS Start-End: 543-3407
aggtaaggctgggtcatggaaagaaagaatgaatgcagactacgggcggtgaatagaggtctcggatgccagcaggcgtcccaacccagcaggaactggctcaattctcagaagaaagcgatcggccccgaggcaggaaggccggctccggtgcagggagcgccgcctgcgggctgcttcgggccagggtcgacccgagggccagcgcaagcagcggcaacaggagcgccaggaggacatgaggctctgcctgcagtcagcaacttggaatattcagacttcagaccagcatcacagattataaccctccgtaaatcatctgcatcccagctcccatcaaaagccagcctgaaggacccatggacacgtgactccagtgttctcaacaacatcttaagatcaagttggtttgcacaacatttgcatctacttgggacaaagcaagaacaataagggcaaaaaagtgaaaaaaaaaaaagatccctgagtaattgcaaatgctgggacagtttaccactccagggtgaagagtccataccaacatgtctgcctactacaggaataactggtctgaggaagacccagattaccctgactattcagggtctcagaaccgtacgcaggggtatttgaaaactcaaggttatccagatgttccaggtcctctgaacaatccagactaccccggcaccaggagcaatccatactctgtagcctccagaacacgtccagactatcctgggtctctggcagaaccaaattatcctagatctctgagtaatccagactattctggcaccagaagcaatgcatactctgcagcctctagaacaagcccagaccatcctacctctctaccagagccagattatagtgaatttcagagtcatccctaccaccgagcatcatccagacaaccagactaccctggatctcaacgaaatcctgattttgcaggctccagcagcagtggaaactatgcaggctccagaacacatccagatcattttggctccttagaaccggactaccctggagctcagagcaactctgatcatcctggacccagagccaatttgaaccatccaggatccagaaagaatctggaacatacaagttttagaatcaatccatacgcagactctctgggaaagcctgattatccaggcgctgacattcaacctaactctccacccttttttggggagccagactatcccagtgctgaggacaatcagaacttgccaagcacttggagagaacctgattattcagatgctgagaatggtcatgattatggctcttctgagaccccaaagatgaccaggggggtgctcagcagaacatcttcaatccagccctcatttcgtcacaggagtgatgaccccgtgggcagtctttggggagagaatgattaccctgaaggcattgaaatggcatccatggagatggcaaactcatatggccactctctgccaggtgctcctggaagtggctatgtgaaccctgcttatgtaggtgaaagtggtcctgtccatgcttatggaaacccaccattgtctgaatgtgattggcacaagtcaccccaaggacagaagttaatcgcatcccttatacccatgacatccagagacagaattaaagccatcaggaaccagccaaggaccatggaagagaaaaggaaccttaggaaaatagttgacaaagaaaaaagcaaacagacccatcgtatccttcagctcaattgctgtattcagtgtctgaactccatttcccgggcttatcggagatccaagaacagcctgtcggaaattctgaattccatcagcctgtggcagaagacgctgaagatcattggaggcaagtttggaaccagcgtcctctcctatttcaactttctgagatggcttttgaagttcaacattttctcattcatcctgaacttcagcttcatcataatccctcagtttaccgtggccaaaaagaacaccctccagttcactgggctggagtttttcactggggtgggttattttagggacacagtgatgtactatggcttttacaccaattccaccatccagcacgggaacagcggggcatcctacaacatgcagctggcctacatcttcacaatcggagcatgcttgaccacctgcttcttcagtttgctgttcagcatggccaagtatttccggaacaacttcattaatccccacatttactccggagggatcaccaagctgatcttttgctgggacttcactgtcactcatgaaaaagctgtgaagctaaaacagaagaatcttagcactgagataaggttcctgaagacacacagtaaccctggggcggtgctgttactgcctttcgttgtgtcctgcattaatctggccgtgccatgcatctactccatgttcaggcttgtggagaggtacgagatgccacggcacgaagtctacgttctcctgatccgaaacatctttttgaaaatatcaatcattggcattctttgttactattggctcaacaccgtggccctgtctggtgaagagtgttgggaaaccctcattggccaggacatctaccggctccttctgatggattttgtgttctctttagtcaattccttcctgggggagtttctgaggagaatcattgggatgcaactgatcacaagtcttggccttcaggagtttgacattgccaggaacgttctagaactgatctatgcacaaactctggtgtggattggcatcttcttctgccccctgctgccctttatccaaatgattatgcttttcatcatgttctactccaaaaatatcagcctgatgatgaatttccagcctccgagcaaagcctggcgggcctcacagatgatgactttcttcatcttcttgctctttttcccatccttcaccggggtcttgtgcaccctggccatcaccatctggagattgaagccttcagctgactgtggcccttttcgaggtctgcctctcttcattcactccatctacagctggatcgacaccctaagtacacggcctggctacctgtgggttgtttggatctatcggaacctcattggaagtgtgcacttctttttcatcctcaccctcattgtgctaatcatcacctatctttactggcagatcacagagggaaggaagattatgataaggctgctccatgagcagatcattaatgagggcaaagataaaatgttcctgatagaaaaattgatcaagctgcaggatatggagaagaaagcaaaccccagctcacttgttctggaaaggagagaggtggagcaacaaggctttttgcatttgggggaacatgatggcagtcttgacttgcgatctagaagatcagttcaagaaggtaatccaagggcctgatgactcttttggtaaccagacaccaatcaaataaggggaggagacgaaaatggaatgatttcttccatgccacctgtgcctttaggaactgcccagaagaaaatccaaggctttagccaggagcggaaactgactaccatgtaattatcaaagtaaaattgggcattccatgct

SEQ ID NO: 193272 - DNA, 4872 bp, Homo sapiens
  Payload ID: 18151
  Gene Name: transmembrane channel-like 5
  Uniprot ID: Q6UXY8
  ENST ID: ENST00000542583
  CDS Start-End: 705-3725
aacttgggacctgagttaggccttcatcgtcgcggactcagtagacagaggccataggtgcagctgtgatggtagaggtggaagactgatttgcattttcaccaggtgagacctggttactcattggttgatgaggaaagagatgatagccagggcggcataaaacggcaatgagctcagtaaacaacccccttcccgtgatcttcgtggcttcccgcccagacgtgtgaccaagatagcaaggagcagtctttaaggcgacacggcagagaggcagaaaaagatgggccttaccggttagttaagaaaaaaagaggacctgttgcctgtccctctagctttgaactacaaagtggaggggaagtttgtctggattttcctgtagaactgagggcaggacatgaggctctgcctgcagtcagcaacttggaatattcagacttcagaccagcatcacagattataaccctccgtaaatcatctgcatcccagctcccatcaaaagccagcctgaaggacccatggacacgtgactccagtgttctcaacaacatcttaagatcaagttggtttgcacaacatttgcatctacttgggacaaagcaagaacaataagggcaaaaaagtgaaaaaaaaaaaagatccctgagtaattgcaaatgctgggacagtttaccactccagggtgaagagtccataccaacatgtctgcctactacaggaataactggtctgaggaagacccagattaccctgactattcagggtctcagaaccgtacgcaggggtatttgaaaactcaaggttatccagatgttccaggtcctctgaacaatccagactaccccggcaccaggagcaatccatactctgtagcctccagaacacgtccagactatcctgggtctctggcagaaccaaattatcctagatctctgagtaatccagactattctggcaccagaagcaatgcatactctgcagcctctagaacaagcccagaccatcctacctctctaccagagccagattatagtgaatttcagagtcatccctaccaccgagcatcatccagacaaccagactaccctggatctcaacgaaatcctgattttgcaggctccagcagcagtggaaactatgcaggctccagaacacatccagatcattttggctccttagaaccggactaccctggagctcagagcaactctgatcatcctggacccagagccaatttgaaccatccaggatccagaaagaatctggaacatacaagttttagaatcaatccatacgcagactctctgggaaagcctgattatccaggcgctgacattcaacctaactctccacccttttttggggagccagactatcccagtgctgaggacaatcagaacttgccaagcacttggagagaacctgattattcagatgctgagaatggtcatgattatggctcttctgagaccccaaagatgaccaggggggtgctcagcagaacatcttcaatccagccctcatttcgtcacaggagtgatgaccccgtgggcagtctttggggagagaatgattaccctgaaggcattgaaatggcatccatggagatggcaaactcatatggccactctctgccaggtgctcctggaagtggctatgtgaaccctgcttatgtaggtgaaagtggtcctgtccatgcttatggaaacccaccattgtctgaatgtgattggcacaagtcaccccaaggacagaagttaatcgcatcccttatacccatgacatccagagacagaattaaagccatcaggaaccagccaaggaccatggaagagaaaaggaaccttaggaaaatagttgacaaagaaaaaagcaaacagacccatcgtatccttcagctcaattgctgtattcagtgtctgaactccatttcccgggcttatcggagatccaagaacagcctgtcggaaattctgaattccatcagcctgtggcagaagacgctgaagatcattggaggcaagtttggaaccagcgtcctctcctatttcaactttctgagatggcttttgaagttcaacattttctcattcatcctgaacttcagcttcatcataatccctcagtttaccgtggccaaaaagaacaccctccagttcactgggctggagtttttcactggggtgggttattttagggacacagtgatgtactatggcttttacaccaattccaccatccagcacgggaacagcggggcatcctacaacatgcagctggcctacatcttcacaatcggagcatgcttgaccacctgcttcttcagtttgctgttcagcatggccaagtatttccggaacaacttcattaatccccacatttactccggagggatcaccaagctgatcttttgctgggacttcactgtcactcatgaaaaagctgtgaagctaaaacagaagaatcttagcactgagataagggagaacctgtcagagctccgtcaggagaattccaagttgacgttcaatcagctgctgacccgcttctctgcctacatggtagcctgggttgtctctacaggagtggccatagcctgctgtgcagccgtttattacctggctgagtacaacttagagttcctgaagacacacagtaaccctggggcggtgctgttactgcctttcgttgtgtcctgcattaatctggccgtgccatgcatctactccatgttcaggcttgtggagaggtacgagatgccacggcacgaagtctacgttctcctgatccgaaacatctttttgaaaatatcaatcattggcattctttgttactattggctcaacaccgtggccctgtctggtgaagagtgttgggaaaccctcattggccaggacatctaccggctccttctgatggattttgtgttctctttagtcaattccttcctgggggagtttctgaggagaatcattgggatgcaactgatcacaagtcttggccttcaggagtttgacattgccaggaacgttctagaactgatctatgcacaaactctggtgtggattggcatcttcttctgccccctgctgccctttatccaaatgattatgcttttcatcatgttctactccaaaaatatcagcctgatgatgaatttccagcctccgagcaaagcctggcgggcctcacagatgatgactttcttcatcttcttgctctttttcccatccttcaccggggtcttgtgcaccctggccatcaccatctggagattgaagccttcagctgactgtggcccttttcgaggtctgcctctcttcattcactccatctacagctggatcgacaccctaagtacacggcctggctacctgtgggttgtttggatctatcggaacctcattggaagtgtgcacttctttttcatcctcaccctcattgtgctaatcatcacctatctttactggcagatcacagagggaaggaagattatgataaggctgctccatgagcagatcattaatgagggcaaagataaaatgttcctgatagaaaaattgatcaagctgcaggatatggagaagaaagcaaaccccagctcacttgttctggaaaggagagaggtggagcaacaaggctttttgcatttgggggaacatgatggcagtcttgacttgcgatctagaagatcagttcaagaaggtaatccaagggcctgatgactcttttggtaaccagacaccaatcaaataaggggaggagacgaaaatggaatgatttcttccatgccacctgtgcctttaggaactgcccagaagaaaatccaaggctttagccaggagcggaaactgactaccatgtaattatcaaagtaaaattgggcattccatgctatttttaatacctggattgctgatttttcaagacaaaatacttggggttttccaataaagattgttgtaatattgaaatgagcctacaaaaacctaggaagagataactagggaataatgtatattatcttcaagaagtgtgtgcaggaatgattggttcttagaaatctctcctgccagacttcccagacctggcaaaggtttagaaactgttgctaagaaaagtggtccatcctgaataaacatgtaatactccagcagggatatgaagcctctgaattgtagaacctgcatttatttgtgactttgaactaaagacatcccccatgtcccaaaggtggaatacaaccagaggtctcatctctgaactttcttgcgtactgattacatgagtctttggagtcggggatggaggaggttctgcccctgtgaggtgttatacatgaccatcaaagtcctacgtcaagctagctttgcagtggcagtaccgtagccaatgagatttatccgagacgcgattattgctaattggaaattttcccaataccccaccgtgatgacttgaaatataatcagcgctggcaatttttgacagtctctacggagactgaataagaaaaaagaaaagaaaagaaattagctgggtgcgatggcttatgcctgtaatcccggcactttgggaggctgaggcaagcggatcacttaatgtcaggagttcaagaccagcctggccaacatggtgaaaccccgtctctactaaaaataaaaaaactagctgggcgtggtggtacatgcctataatcccagctactcgggaggctgaggcaggagaattgcttgaacctgggaggcagaggttgcagtgaggcgagattgtaccactgcattccagcctgggcaacagtgagactctgcctcaaaaaaataaataaataaataaataaagtaaattaaaagtcttattcaaaccaaa

SEQ ID NO: 193273 - DNA, 2434 bp, Homo sapiens
  Payload ID: 18151
  Gene Name: transmembrane channel-like 5
  ENST ID: ENST00000564959
  CDS Start-End: 191-2260
tatgttgtgatttgtgtaggggtggctttggtgagctcatcctggcattttaaaaataatgtgaatggtgtatccctttgtgatcatcatcactttttccctgcgagtcccaatcaatgcgggtgtgactgctgtatgaagtctcaggaagcccaccccagtggagaagaaggcttgcaggaggcaggagatgctgtccgatgaccacgtgaatgaaatcatcatacagaagttaatcgcatcccttatacccatgacatccagagacagaattaaagccatcaggaaccagccaaggaccatggaagagaaaaggaaccttagcaggggaggcctcacaatcacgacagaggacgaaggaagagcaaaggcacatcttacgtggtggaaaatagttgacaaagaaaaaagcaaacagacccatcgtatccttcagctcaattgctgtattcagtgtctgaactccatttcccgggcttatcggagatccaagaacagcctgtcggaaattctgaattccatcagcctgtggcagaagacgctgaagatcattggaggcaagtttggaaccagcgtcctctcctatttcaactttctgagatggcttttgaagttcaacattttctcattcatcctgaacttcagcttcatcataatccctcagtttaccgtggccaaaaagaacaccctccagttcactgggctggagtttttcactggggtgggttattttagggacacagtgatgtactatggcttttacaccaattccaccatccagcacgggaacagcggggcatcctacaacatgcagctggcctacatcttcacaatcggagcatgcttgaccacctgcttcttcagtttgctgttcagcatggccaagtatttccggaacaacttcattaatccccacatttactccggagggatcaccaagctgatcttttgctgggacttcactgtcactcatgaaaaagctgtgaagctaaaacagaagaatcttagcactgagataagggagaacctgtcagagctccgtcaggagaattccaagttgacgttcaatcagctgctgacccgcttctctgcctacatggtagcctgggttgtctctacaggagtggccatagcctgctgtgcagccgtttattacctggctgagtacaacttagagttcctgaagacacacagtaaccctggggcggtgctgttactgcctttcgttgtgtcctgcattaatctggccgtgccatgcatctactccatgttcaggcttgtggagaggtacgagatgccacggcacgaagtctacgttctcctgatccgaaacatctttttgaaaatatcaatcattggcattctttgttactattggctcaacaccgtggccctgtctggtgaagagtgttgggaaaccctcattggccaggacatctaccggctccttctgatggattttgtgttctctttagtcaattccttcctgggggagtttctgaggagaatcattgggatgcaactgatcacaagtcttggccttcaggagtttgacattgccaggaacgttctagaactgatctatgcacaaactctggtgtggattggcatcttcttctgccccctgctgccctttatccaaatgattatgcttttcatcatgttctactccaaaaatatcagcctgatgatgaatttccagcctccgagcaaagcctggcgggcctcacagatgatgactttcttcatcttcttgctctttttcccatccttcaccggggtcttgtgcaccctggccatcaccatctggagattgaagccttcagctgactgtggcccttttcgaggtctgcctctcttcattcactccatctacagctggatcgacaccctaagtacacggcctggctacctgtgggttgtttggatctatcggaacctcattggaagtgtgcacttctttttcatcctcaccctcattgtgctaatcatcacctatctttactggcagatcacagagggaaggaagattatgataaggctgctccatgagcagatcattaatgagggcaaagataaaatgttcctgatagaaaaattgatcaagctgcaggatatggagaagaaagcaaaccccagctcacttgttctggaaaggagagaggtggagcaacaaggctttttgcatttgggggaacatgatggcagtcttgacttgcgatctagaagatcagttcaagaaggtaatccaagggcctgatgactcttttggtaaccagacaccaatcaaataaggggaggagacgaaaatggaatgatttcttccatgccacctgtgcctttaggaactgcccagaagaaaatccaaggctttagccaggagcggaaactgactaccatgtaattatcaaagtaaaattgggcattccatgct

SEQ ID NO: 193274 - DNA, 2487 bp, Homo sapiens
  Payload ID: 18151
  Gene Name: transmembrane channel-like 5
  Uniprot ID: Q6UXY8
  ENST ID: ENST00000561503
  CDS Start-End: 292-2235
gagaaaactcctcaggggttagatgcagggagttatgttgtgatttgtgtaggggtggctttggtgagctcatcctggcattttaaaaataatgtgaatggtgtatccctttgtgatcatcatcactttttccctgcgagtcccaatcaatgcgggtgtgactgctgtatgaagtctcaggaagcccaccccagtggagaagaaggcttgcaggaggcaggagatgctgtccgatgaccacgtgaatgaaatcatcatacaggacagaagttaatcgcatcccttatacccatgacatccagagacagaattaaagccatcaggaaccagccaaggaccatggaagagaaaaggaaccttaggaaaatagttgacaaagaaaaaagcaaacagacccatcgtatccttcagctcaattgctgtattcagtgtctgaactccatttcccgggcttatcggagatccaagaacagcctgtcggaaattctgaattccatcagcctgtggcagaagacgctgaagatcattggaggcaagtttggaaccagcgtcctctcctatttcaactttctgagatggcttttgaagttcaacattttctcattcatcctgaacttcagcttcatcataatccctcagtttaccgtggccaaaaagaacaccctccagttcactgggctggagtttttcactggggtgggttattttagggacacagtgatgtactatggcttttacaccaattccaccatccagcacgggaacagcggggcatcctacaacatgcagctggcctacatcttcacaatcggagcatgcttgaccacctgcttcttcagtttgctgttcagcatggccaagtatttccggaacaacttcattaatccccacatttactccggagggatcaccaagctgatcttttgctgggacttcactgtcactcatgaaaaagctgtgaagctaaaacagaagaatcttagcactgagataagggagaacctgtcagagctccgtcaggagaattccaagttgacgttcaatcagctgctgacccgcttctctgcctacatggtagcctgggttgtctctacaggagtggccatagcctgctgtgcagccgtttattacctggctgagtacaacttagagttcctgaagacacacagtaaccctggggcggtgctgttactgcctttcgttgtgtcctgcattaatctggccgtgccatgcatctactccatgttcaggcttgtggagaggtacgagatgccacggcacgaagtctacgttctcctgatccgaaacatctttttgaaaatatcaatcattggcattctttgttactattggctcaacaccgtggccctgtctggtgaagagtgttgggaaaccctcattggccaggacatctaccggctccttctgatggattttgtgttctctttagtcaattccttcctgggggagtttctgaggagaatcattgggatgcaactgatcacaagtcttggccttcaggagtttgacattgccaggaacgttctagaactgatctatgcacaaactctggtgtggattggcatcttcttctgccccctgctgccctttatccaaatgattatgcttttcatcatgttctactccaaaaatatcagcctgatgatgaatttccagcctccgagcaaagcctggcgggcctcacagatgatgactttcttcatcttcttgctctttttcccatccttcaccggggtcttgtgcaccctggccatcaccatctggagattgaagccttcagctgactgtggcccttttcgaggtctgcctctcttcattcactccatctacagctggatcgacaccctaagtacacggcctggctacctgtgggttgtttggatctatcggaacctcattggaagtgtgcacttctttttcatcctcaccctcattgtgctaatcatcacctatctttactggcagatcacagagggaaggaagattatgataaggctgctccatgagcagatcattaatgagggcaaagataaaatgttcctgatagaaaaattgatcaagctgcaggatatggagaagaaagcaaaccccagctcacttgttctggaaaggagagaggtggagcaacaaggctttttgcatttgggggaacatgatggcagtcttgacttgcgatctagaagatcagttcaagaaggtaatccaagggcctgatgactcttttggtaaccagacaccaatcaaataaggggaggagacgaaaatggaatgatttcttccatgccacctgtgcctttaggaactgcccagaagaaaatccaaggctttagccaggagcggaaactgactaccatgtaattatcaaagtaaaattgggcattccatgctatttttaatacctggattgctgatttttcaagacaaaatacttggggttttccaataaagattgttgtaatattgaaa

SEQ ID NO: 193275 - DNA, 839 bp, Homo sapiens
  Payload ID: 18151
  Gene Name: transmembrane channel-like 5
  ENST ID: ENST00000574033
  CDS Start-End: 1-98
acaggattggcatcttcttctgccccctgctgccctttatccaaatgattatgcttttcatcatgttctactccaaaaatattgaagccttcagctgactgtggcccttttcgaggtctgcctctcttcattcactccatctacagctggatcgacaccctaagtacacggcctggctacctgtgggttgtttggatctatcggaacctcattggaagtgtgcacttctttttcatcctcaccctcattgtgctaatcatcacctatctttactggcagatcacagagggaaggaagattatgataaggctgctccatgagcagatcattaatgagggcaaagataaaatgttcctgatagaaaaattgatcaagctgcaggatatggagaagaaagcaaaccccagctcacttgttctggaaaggagagaggtggagcaacaaggctttttgcatttgggggaacatgatggcagtcttgacttgcgatctagaagatcagttcaagaaggtaatccaagggcctgatgactcttttggtaaccagacaccaatcaaataaggggaggagacgaaaatggaatgatttcttccatgccacctgtgcctttaggaactgcccagaagaaaatccaaggctttagccaggagcggaaactgactaccatgtaattatcaaagtaaaattgggcattccatgctatttttaatacctggattgctgatttttcaagacaaaatacttggggttttccaataaagattgttgtaatattgaaatgagcctacaaaaacctaggaagagataactagggaataatgtatattatcttcaagaa

SEQ ID NO: 193276 - DNA, 463 bp, Homo sapiens
  Payload ID: 18151
  Gene Name: transmembrane channel-like 5
  ENST ID: ENST00000572147
  CDS Start-End: 1-128
tgcctttcgttgtgtcctgcattaatctggccgtgccatgcatctactccatgttcaggcttgtggagaggtacgagatgccacggcacgaagtctacgttctcctgatccgcaggggattgatgtagttctcaagtatgggatgtacagatgggcaggcagtgcacgcacaaaggctcctgggctgaggacgggactgaaatcatccagcgttccccttagtcaagctaaacatctttttgaaaatatcaatcattggcattctttgttactattggctcaacaccgtggccctgtctggtgaagagtgttgggaaaccctcattggccaggacatctaccggctccttctgatggattttgtgttctctttagtcaattccttcctgggggagtttctgaggagaatcattgggatgcaactgatcacaagtcttggccttcaggagtttgacattgccag

SEQ ID NO: 193277 - DNA, 1681 bp, Homo sapiens
  Payload ID: 18152
  Gene Name: transmembrane channel-like 6
  Uniprot ID: Q7Z403
  ENST ID: ENST00000306591
  CDS Start-End: 94-1458
cctccccggcgcctcccagatgggggctccggaggtggcgcccaggctctgagctaccctaggtctgcagactagcgggcattggccagagacatggcccagccactggccttcatcctcgatgtccctgagaccccaggggaccagggccagggccccagcccctatgatgaaagcgaagtgcacgactccttccagcagctcatccaggagcagagccagtgcacggcccaggaggggctggagctgcagcagagagagcgggaggtgacaggaagtagccagcagacactctggcggcccgagggcacccagagcacggccacactccgcatcctggccagcatgcccagccgcaccattggccgcagccgaggtgccatcatctcccagtactacaaccgcacggtgcagcttcggtgcaggagcagccggcccctgctcgggaactttgtccgctccgcctggcccagcctccgcctgtacgacctggagctggaccccacggccctggaggaggaggagaagcagagcctcctggtgaaggagctccagagcctggcagtggcacagcgggaccacatgcttcgcgggatgcccttaagcctggctgagaaacgcagcctgcgagagaagagcaggaccccgagggggaagtggaggggccagccgggcagcggcggggtctgctcctgctgtggccggctcagatatgcctgcgtgctggccttgcacagcctgggcctggcgctgctctccgccctgcaggccctgatgccgtggcgctacgccctgaagcgcatcgggggccagttcggctccagcgtgctctcctacttcctctttctcaagaccctgctggctttcaatgccctcctgctgctgctgctggtggccttcatcatgggccctcaggtcgccttcccacccgccctgccgggccctgcccccgtctgcacaggcctggagctcctcacaggcgcgggttgcttcacccacaccgtcatgtactacggccactacagtaacgccacgctgaaccagccgtgtggcagccccctggatggcagccagtgcacacccagggtgggtggcctgccctacaacatgcccctggcctacctctccactgtgggcgtgagcttctttatcacctgcatcaccctggtgtacagcatggctcactctttcggggagagctaccgggtgggcagcacctctggcatccacgccatcaccgtcttctgctcctgggactacaaggtgacgcagaagcgggcctcccgcctccagcaggacaatattcgcacccggctgaagggtgaggacaaaatcttcttaatcaacaagcttcactccatctacgagaggaaggagagggaggagaggagcagggttgggacaaccgaggaggctgcggcaccccctgccctgctcacagatgaacaggatgcctagggggacggcgatgggcctcacgggcccgcccagcaccctgagaccacactgttgcctcccagtgaccctgctgggacaccaggacaaggaagacagtttcgcctctcgaaagccgcagctgcgcctaggctggagctggaagggtgggtgaatccggcttgggcatccccaatgaactctgccctgcctgggactctatttattctgattaaaggggttttgc

SEQ ID NO: 193278 - DNA, 2786 bp, Homo sapiens
  Payload ID: 18152
  Gene Name: transmembrane channel-like 6
  Uniprot ID: Q7Z403
  ENST ID: ENST00000322914
  CDS Start-End: 142-2559
aggaagcggaggaaggtgaagtaggaccgaattcctgtgccgaagaggcctgcagtgggagagcaggatgggggctccggaggtggcgcccaggctctgagctaccctaggtctgcagactagcgggcattggccagagacatggcccagccactggccttcatcctcgatgtccctgagaccccaggggaccagggccagggccccagcccctatgatgaaagcgaagtgcacgactccttccagcagctcatccaggagcagagccagtgcacggcccaggaggggctggagctgcagcagagagagcgggaggtgacaggaagtagccagcagacactctggcggcccgagggcacccagagcacggccacactccgcatcctggccagcatgcccagccgcaccattggccgcagccgaggtgccatcatctcccagtactacaaccgcacggtgcagcttcggtgcaggagcagccggcccctgctcgggaactttgtccgctccgcctggcccagcctccgcctgtacgacctggagctggaccccacggccctggaggaggaggagaagcagagcctcctggtgaaggagctccagagcctggcagtggcacagcgggaccacatgcttcgcgggatgcccttaagcctggctgagaaacgcagcctgcgagagaagagcaggaccccgagggggaagtggaggggccagccgggcagcggcggggtctgctcctgctgtggccggctcagatatgcctgcgtgctggccttgcacagcctgggcctggcgctgctctccgccctgcaggccctgatgccgtggcgctacgccctgaagcgcatcgggggccagttcggctccagcgtgctctcctacttcctctttctcaagaccctgctggctttcaatgccctcctgctgctgctgctggtggccttcatcatgggccctcaggtcgccttcccacccgccctgccgggccctgcccccgtctgcacaggcctggagctcctcacaggcgcgggttgcttcacccacaccgtcatgtactacggccactacagtaacgccacgctgaaccagccgtgtggcagccccctggatggcagccagtgcacacccagggtgggtggcctgccctacaacatgcccctggcctacctctccactgtgggcgtgagcttctttatcacctgcatcaccctggtgtacagcatggctcactctttcggggagagctaccgggtgggcagcacctctggcatccacgccatcaccgtcttctgctcctgggactacaaggtgacgcagaagcgggcctcccgcctccagcaggacaatattcgcacccggctgaaggagctgctggccgagtggcagctgcggcacagccccaggagcgtgtgcgggaggctgcggcaggcggctgtgctggggcttgtgtggctgctgtgtctggggaccgcgctgggctgcgccgtggccgtccacgtcttctcggagttcatgatccagagtccagaggctgctggccaggaggctgtgctgctggtcctgcccctggtggttggcctcctcaacctgggggccccctacctgtgccgtgtcctggccgccctggagccgcatgactccccggtactggaggtgtacgtggccatctgcaggaacctcatcctcaagctggccatcctggggacactgtgctaccactggctgggccgcagggtgggcgtcctgcagggccagtgctgggaggattttgtgggccaggagctgtaccggttcctggtgatggacttcgtcctcatgttgctggacacgctttttggggaactggtgtggaggattatctccgagaagaagctgaagaggaggcggaagccggagtttgacattgcccggaatgtcctggagctgatttatgggcagactctgacctggctgggggtgctcttctcgcccctcctccccgccgtgcagatcatcaagctgctgctcgtcttctatgtcaagaagaccagccttctggccaactgccaggcgccgcgccggccctggctggcctcacacatgagcaccgtcttcctcacgctgctctgcttccccgccttcctgggcgccgctgtcttcctctgctacgccgtctggcaggtgaagccctcgagcacctgcggccccttccggaccctggacaccatgtacgaggccggcagggtgtgggtgcgccacctggaggcggcaggccccagggtctcctggctgccctgggtgcaccggtacctgatggaaaacaccttctttgtcttcctggtgtcagccctgctgctggccgtgatctacctcaacatccaggtggtgcggggccagcgcaaggtcatctgcctgctcaaggagcagatcagcaatgagggtgaggacaaaatcttcttaatcaacaagcttcactccatctacgagaggaaggagagggaggagaggagcagggttgggacaaccgaggaggctgcggcaccccctgccctgctcacagatgaacaggatgcctagggggacggcgatgggcctcacgggcccgcccagcaccctgagaccacactgttgcctcccagtgaccctgctgggacaccaggacaaggaagacagtttcgcctctcgaaagccgcagctgcgcctaggctggagctggaagggtgggtgaatccggcttgggcatccccaatgaactctgccctgcctgggactctatttattctgattaaaggggttttgcaaat

SEQ ID NO: 193279 - DNA, 2833 bp, Homo sapiens
  Payload ID: 18152
  Gene Name: transmembrane channel-like 6
  Uniprot ID: Q7Z403
  ENST ID: ENST00000392467
  CDS Start-End: 189-2606
gcgggactgtctgggctgtgagtggcacctcctgtggttcccccaggaatgggtggtgtggacagctgccaggcgttgaagaccacccctggctctgtgcccctgtctcatcagatgggggctccggaggtggcgcccaggctctgagctaccctaggtctgcagactagcgggcattggccagagacatggcccagccactggccttcatcctcgatgtccctgagaccccaggggaccagggccagggccccagcccctatgatgaaagcgaagtgcacgactccttccagcagctcatccaggagcagagccagtgcacggcccaggaggggctggagctgcagcagagagagcgggaggtgacaggaagtagccagcagacactctggcggcccgagggcacccagagcacggccacactccgcatcctggccagcatgcccagccgcaccattggccgcagccgaggtgccatcatctcccagtactacaaccgcacggtgcagcttcggtgcaggagcagccggcccctgctcgggaactttgtccgctccgcctggcccagcctccgcctgtacgacctggagctggaccccacggccctggaggaggaggagaagcagagcctcctggtgaaggagctccagagcctggcagtggcacagcgggaccacatgcttcgcgggatgcccttaagcctggctgagaaacgcagcctgcgagagaagagcaggaccccgagggggaagtggaggggccagccgggcagcggcggggtctgctcctgctgtggccggctcagatatgcctgcgtgctggccttgcacagcctgggcctggcgctgctctccgccctgcaggccctgatgccgtggcgctacgccctgaagcgcatcgggggccagttcggctccagcgtgctctcctacttcctctttctcaagaccctgctggctttcaatgccctcctgctgctgctgctggtggccttcatcatgggccctcaggtcgccttcccacccgccctgccgggccctgcccccgtctgcacaggcctggagctcctcacaggcgcgggttgcttcacccacaccgtcatgtactacggccactacagtaacgccacgctgaaccagccgtgtggcagccccctggatggcagccagtgcacacccagggtgggtggcctgccctacaacatgcccctggcctacctctccactgtgggcgtgagcttctttatcacctgcatcaccctggtgtacagcatggctcactctttcggggagagctaccgggtgggcagcacctctggcatccacgccatcaccgtcttctgctcctgggactacaaggtgacgcagaagcgggcctcccgcctccagcaggacaatattcgcacccggctgaaggagctgctggccgagtggcagctgcggcacagccccaggagcgtgtgcgggaggctgcggcaggcggctgtgctggggcttgtgtggctgctgtgtctggggaccgcgctgggctgcgccgtggccgtccacgtcttctcggagttcatgatccagagtccagaggctgctggccaggaggctgtgctgctggtcctgcccctggtggttggcctcctcaacctgggggccccctacctgtgccgtgtcctggccgccctggagccgcatgactccccggtactggaggtgtacgtggccatctgcaggaacctcatcctcaagctggccatcctggggacactgtgctaccactggctgggccgcagggtgggcgtcctgcagggccagtgctgggaggattttgtgggccaggagctgtaccggttcctggtgatggacttcgtcctcatgttgctggacacgctttttggggaactggtgtggaggattatctccgagaagaagctgaagaggaggcggaagccggagtttgacattgcccggaatgtcctggagctgatttatgggcagactctgacctggctgggggtgctcttctcgcccctcctccccgccgtgcagatcatcaagctgctgctcgtcttctatgtcaagaagaccagccttctggccaactgccaggcgccgcgccggccctggctggcctcacacatgagcaccgtcttcctcacgctgctctgcttccccgccttcctgggcgccgctgtcttcctctgctacgccgtctggcaggtgaagccctcgagcacctgcggccccttccggaccctggacaccatgtacgaggccggcagggtgtgggtgcgccacctggaggcggcaggccccagggtctcctggctgccctgggtgcaccggtacctgatggaaaacaccttctttgtcttcctggtgtcagccctgctgctggccgtgatctacctcaacatccaggtggtgcggggccagcgcaaggtcatctgcctgctcaaggagcagatcagcaatgagggtgaggacaaaatcttcttaatcaacaagcttcactccatctacgagaggaaggagagggaggagaggagcagggttgggacaaccgaggaggctgcggcaccccctgccctgctcacagatgaacaggatgcctagggggacggcgatgggcctcacgggcccgcccagcaccctgagaccacactgttgcctcccagtgaccctgctgggacaccaggacaaggaagacagtttcgcctctcgaaagccgcagctgcgcctaggctggagctggaagggtgggtgaatccggcttgggcatccccaatgaactctgccctgcctgggactctatttattctgattaaaggggttttgcaaat

SEQ ID NO: 193280 - DNA, 1155 bp, Homo sapiens
  Payload ID: 18152
  Gene Name: transmembrane channel-like 6
  Uniprot ID: Q7Z403
  ENST ID: ENST00000591436
  CDS Start-End: 1-1155
atggctcactctttcggggagagctaccgggtgggcagcacctctggcatccacgccatcaccgtcttctgctcctgggactacaaggtgacgcagaagcgggcctcccgcctccagcaggacaatattcgcacccggctgaaggagctgctggccgagtggcagctgcggcacagccccaggagcgtgtgcgggaggctgcggcaggcggctgtgctggggcttgtgtggctgctgtgtctggggaccgcgctgggctgcgccgtggccgtccacgtcttctcggagttcatgatccagagtccagaggctgctggccaggaggctgtgctgctggtcctgcccctggtggttggcctcctcaacctgggggccccctacctgtgccgtgtcctggccgccctggagccgcatgactccccggtactggaggtgtacgtggccatctgcaggattatctccgagaagaagctgaagaggaggcggaagccggagtttgacattgcccggaatgtcctggagctgatttatgggcagactctgacctggctgggggtgctcttctcgcccctcctccccgccgtgcagatcatcaagctgctgctcgtcttctatgtcaagaagaccagccttctggccaactgccaggcgccgcgccggccctggctggcctcacacatgagcaccgtcttcctcacgctgctctgcttccccgccttcctgggcgccgctgtcttcctctgctacgccgtctggcaggtgaagccctcgagcacctgcggccccttccggaccctggacaccatgtacgaggccggcagggtgtgggtgcgccacctggaggcggcaggccccagggtctcctggctgccctgggtgcaccggtacctgatggaaaacaccttctttgtcttcctggtgtcagccctgctgctggccgtgatctacctcaacatccaggtggtgcggggccagcgcaaggtcatctgcctgctcaaggagcagatcagcaatgagggtgaggacaaaatcttcttaatcaacaagcttcactccatctacgagaggaaggagagggaggagaggagcagggttgggacaaccgaggaggctgcggcaccccctgccctgctcacagatgaacaggatgcctag

SEQ ID NO: 193281 - DNA, 5268 bp, Homo sapiens
  Payload ID: 18152
  Gene Name: transmembrane channel-like 6
  Uniprot ID: Q7Z403
  ENST ID: ENST00000590602
  CDS Start-End: 161-2578
gccgagacctcagttcccggcggctcttgcggggcacaggtgagccctggctgcgcgcgcggcccctcctccccggcgcctcccagatgggggctccggaggtggcgcccaggctctgagctaccctaggtctgcagactagcgggcattggccagagacatggcccagccactggccttcatcctcgatgtccctgagaccccaggggaccagggccagggccccagcccctatgatgaaagcgaagtgcacgactccttccagcagctcatccaggagcagagccagtgcacggcccaggaggggctggagctgcagcagagagagcgggaggtgacaggaagtagccagcagacactctggcggcccgagggcacccagagcacggccacactccgcatcctggccagcatgcccagccgcaccattggccgcagccgaggtgccatcatctcccagtactacaaccgcacggtgcagcttcggtgcaggagcagccggcccctgctcgggaactttgtccgctccgcctggcccagcctccgcctgtacgacctggagctggaccccacggccctggaggaggaggagaagcagagcctcctggtgaaggagctccagagcctggcagtggcacagcgggaccacatgcttcgcgggatgcccttaagcctggctgagaaacgcagcctgcgagagaagagcaggaccccgagggggaagtggaggggccagccgggcagcggcggggtctgctcctgctgtggccggctcagatatgcctgcgtgctggccttgcacagcctgggcctggcgctgctctccgccctgcaggccctgatgccgtggcgctacgccctgaagcgcatcgggggccagttcggctccagcgtgctctcctacttcctctttctcaagaccctgctggctttcaatgccctcctgctgctgctgctggtggccttcatcatgggccctcaggtcgccttcccacccgccctgccgggccctgcccccgtctgcacaggcctggagctcctcacaggcgcgggttgcttcacccacaccgtcatgtactacggccactacagtaacgccacgctgaaccagccgtgtggcagccccctggatggcagccagtgcacacccagggtgggtggcctgccctacaacatgcccctggcctacctctccactgtgggcgtgagcttctttatcacctgcatcaccctggtgtacagcatggctcactctttcggggagagctaccgggtgggcagcacctctggcatccacgccatcaccgtcttctgctcctgggactacaaggtgacgcagaagcgggcctcccgcctccagcaggacaatattcgcacccggctgaaggagctgctggccgagtggcagctgcggcacagccccaggagcgtgtgcgggaggctgcggcaggcggctgtgctggggcttgtgtggctgctgtgtctggggaccgcgctgggctgcgccgtggccgtccacgtcttctcggagttcatgatccagagtccagaggctgctggccaggaggctgtgctgctggtcctgcccctggtggttggcctcctcaacctgggggccccctacctgtgccgtgtcctggccgccctggagccgcatgactccccggtactggaggtgtacgtggccatctgcaggaacctcatcctcaagctggccatcctggggacactgtgctaccactggctgggccgcagggtgggcgtcctgcagggccagtgctgggaggattttgtgggccaggagctgtaccggttcctggtgatggacttcgtcctcatgttgctggacacgctttttggggaactggtgtggaggattatctccgagaagaagctgaagaggaggcggaagccggagtttgacattgcccggaatgtcctggagctgatttatgggcagactctgacctggctgggggtgctcttctcgcccctcctccccgccgtgcagatcatcaagctgctgctcgtcttctatgtcaagaagaccagccttctggccaactgccaggcgccgcgccggccctggctggcctcacacatgagcaccgtcttcctcacgctgctctgcttccccgccttcctgggcgccgctgtcttcctctgctacgccgtctggcaggtgaagccctcgagcacctgcggccccttccggaccctggacaccatgtacgaggccggcagggtgtgggtgcgccacctggaggcggcaggccccagggtctcctggctgccctgggtgcaccggtacctgatggaaaacaccttctttgtcttcctggtgtcagccctgctgctggccgtgatctacctcaacatccaggtggtgcggggccagcgcaaggtcatctgcctgctcaaggagcagatcagcaatgagggtgaggacaaaatcttcttaatcaacaagcttcactccatctacgagaggaaggagagggaggagaggagcagggttgggacaaccgaggaggctgcggcaccccctgccctgctcacagatgaacaggatgcctagggggacggcgatgggcctcacgggcccgcccagcaccctgagaccacactgttgcctcccagtgaccctgctgggacaccaggacaaggaagacagtttcgcctctcgaaagccgcagctgcgcctaggctggagctggaagggtgggtgaatccggcttgggcatccccaatgaactctgccctgcctgggactctatttattctgattaaaggggttttgcaaatgggcttgtcccttggggctctgtgtctgtgaccacacccggggcctgcttcccgctgccctggggccacctccaggcgcaggtctgggtcctgggaacctcagctggagtgggggcgccctctgctggccaagccccagatggcaggggctggaccgcgccagggcttgattcgcttgctgcctttgaccagcctgaactcgcgcccaggaggggcttacacctgcacaagtgagccgagcaggcacggattgtgaccagagcgatgcgtcaaccattgggtgatgctgtagcatctactggagcaggagacaaatttagagagggacttggaggggagacatatcagttgcaaatgagttgtggggacagttgcctcccaggcataggtaaccagcacctgtgcttggaggcgaacagggcttggtgaggtggggctggccccctgcttctggctgccagcagctggctggggggtggtgatcctgggtctgactgggctgagtttgaggagcccgtgggataccgaaaaccgtaggctgtggggggtgggcacagggattcggggaccagcccgtcatgaccccgtgctccaggtctgcagggaccagcccatgacagcccagggctccaggtctgcggggaccagcccatcacagcccagggctccaggcctgcggggaccagcccgtcagcctcagttctccaggcctgcggggaccagcccgtcatgaccccagtgctccaggtctgtggggaccagcccgtcagcctgtgctccaggcctgcaggaaccagcccgtcagcctcagtgctccaggcctgcggggaccagcccgtcagcctgtgctccaggcctgcggggaccagcccgtcatgaccccagtgctccaggtctgtggggaccagcccgtcagcctgtgctccaggcctgcgggaaccagcccgtcatgaccccagtgctccaggcctgcggggaccagcccgtcatgaccccagtgctccaggtctgtggggaccagcccgtcacggcgcagggttccaggcttgtggggaccagcctgtcacagcccagggctccaggcctgcaggagctgcgcttgggattgggggaatgaacccaggtggggaaatggtcaaagagcgatgggcccagaaaagggtcagacccagatggagatgccactggctgctagcagacccccacgctgggtctagcccacccaatcccatggggatgctcctgtgctctgcagacatctgggtgctgccacaggggcccgacagagttggcatctgggtggatctgagccaagtggtgcttctgggcctcagcaagtagctggtgctgattctgggcagccaactgtggcagcatcttcaggtgcgagtgctgctgggtgaagctgcgtgggcagtccagaaagtgacgtgacagtccacagggaccgacgtagggtttccagcccctatctgtgcagatgctgtcctccaaaccatcacggtccctctctggctggggacgtgcgcctgccactgctggcttgccagcatgatcattggttgtgacctgttgagcccatcttgccagcctcacaaaggacagtactagctgcttatgacaggaaagtggaagaacttggcctggatatttctggagaattaccgtgtgtgctagtcagtctttcgtgtcaaccaggccaggctgtggggcccagtgatctcatcgagaggggccgaggtgttgctgtgatcgtgtgctgctggaatgtggtgaacacctacagtcgatttcacctaaagatcatccttgagaatgtgggtgggcctcatcctatcagctgaaagctttaagagcaaaacccgaggtgtcccagagagggaattctgccttgagacggcggcttcccactcccactggatgtccagcccgcggccccacggctgggtgagcccgtcctctcctcgtttctgtctccggacccaccgtgtggccccagaccctccagtgaggacctcccgtatttcttcagagcagcccttgcgtgctggaggcctgggcttcagtgtgtccctgggtgccctggggcatgttctgtgacctcccagctcctcgcctcatggggccgctgtatcaagtgacacagtttgtgtgctgcgtaccatgcctggcacccatttgaggtgttgcaaggaggccatgtttgctcgatgagagcagcctaagatctacaaactgttgttcgagtggatgggaacttgatgctattttcaggctgaatgacaagactccgcgatgcttctcggcctgggctgcacaacggaatctaccagggaggttttaaaaacactggtacttgctggaggtggtggcgcctgtctgtaattgcagctgctccagaggctgaggcggaggattgcttgagcccaagagtttcggtttatttgctttttcagagtcttg

SEQ ID NO: 193282 - DNA, 2389 bp, Homo sapiens
  Payload ID: 18152
  Gene Name: transmembrane channel-like 6
  Uniprot ID: Q7Z403
  ENST ID: ENST00000589553
  CDS Start-End: 700-1596
aggtgcggctactcccccggccccggcagacctgcgactggcccagtcgcccctggggccctttgccactcccttggcaaggagagccgagacctcagttcccggcggctcttgcggggcacaggtgagccctggctgcgcgcgcggcccctcctccccggcgcctcccagccagggccccagcccctatgatgaaagcgaagtgcacgactccttccagcagctcatccaggagcagagccagtgcacggcccaggaggggctggagctgcagcagagagagcgggaggtgacaggaagtagccagcagacactctggcggcccgagggcacccagagcacggccacactccgcatcctggccagcatgcccagccgcaccattggccgcagccgaggtgccatcatctcccagtactacaaccgcacggtgcagcttcggtgcaggagcagccggcccctgctcgggaactttgtccgctccgcctggcccagcctccgcctgtacgacctggagctggaccccacggccctggaggaggaggagaagcagagcctcctggtgaaggagctccagagcctggcagtggcacagcgggaccacatgcttcgcgggatgcccttaagcctggctgagaaacgcagcctgcggccttgcacagcctgggcctggcgctgctctccgccctgcaggccctgatgccgtggcgctacgccctgaagcgcatcgggggccagttcggctccagcgtgctctcctacttcctctttctcaagaccctgctggctttcaatgccctcctgctgctgctgctggtggccttcatcatgggccctcaggtcgccttcccacccgccctgccgggccctgcccccgtctgcacaggcctggagctcctcacaggcgcgggttgcttcacccacaccgtcatgtactacggccactacagtaacgccacgctgaaccagccgtgtggcagccccctggatggcagccagtgcacacccagggtgggtggcctgccctacaacatgcccctggcctacctctccactgtgggcgtgagcttctttatcacctgcatcaccctggtgtacagcatggctcactctttcggggagagctaccgggtgggcagcacctctggcatccacgccatcaccgtcttctgctcctgggactacaaggtgacgcagaagcgggcctcccgcctccagcaggacaatattcgcacccggctgaaggagctgctggccgagtggcagctgcggcacagccccaggagcgtgtgcgggaggctgcggcaggcggctgtgctggggcttgtgtggctgctgtgtctggggaccgcgctgggctgcgccgtggccgtccacgtcttctcggagttcatgatccagagtccagaggctgctggccaggaggctgtgctgctggtcctgcccctggtggttggcctcctcaacctgggggccccctacctgtgccgtgtcctggccgccctggagccgcatgactccccggtactggaggtgtacgtggccatctgcaggtgtgtggccgcacatgaaaacatcatttggtgctggagctgatactggttgtttagctccgggtgtatccaaacctacttaggatgaggccggtgtgaccaagcccctggtgggggccctggggtgcatcttctgtcccctgtacccgcccctcagcctttgcaccccgccctccgcaggaacctcatcctcaagctggccatcctggggacactgtgctaccactggctgggccgcagggtgggcgtcctgcagggccagtgctgggaggattttgtgggccaggagctgtaccggttcctggtgatggacttcgtcctcatgttgctggacacgctttttggggaactggtgtggaggtgagggggtcctgggcggactgggtggtgagtgttctccccttagtggccgggacgtgtggccgggaggttctcaggcctggacctttcccatcagggccctgtgtctccacccttcagaggaagactcaggaaatagaaccgaactcatttttagattggaaaggaaaacaggtttcaaagtgatgtgtatggccaggcatggtggctcatgcctgtaatcccagcactttgggaggctgaggtgagtggatcacctgaggtcaggagtttgagaccagcctggccagcatggcaaaaccccgtctctactaaaaatacaaaaattagcagggcgtggtggcgcacaccagtagtcccagctactcgggaggcagaggcatgagaatcgcttgaacctgggaagcggaggttgtagtgagctgagattgcgcctctgcactccagcccgggcgacagagcaagactgtgttgcc

SEQ ID NO: 193283 - DNA, 821 bp, Homo sapiens
  Payload ID: 18152
  Gene Name: transmembrane channel-like 6
  ENST ID: ENST00000586126
  CDS Start-End: 472-597
gccgctctgccacctccggggctcagaaatgagagagaatcctgctgcggtcgaattcgggcccagccccgctccaactctcagagggacacacagccacggcctcagtctccccatctgtcaaatggggtgaaagatccaaagggcacagaaagtctggaccggcacaggcaaagaaagccaagacctgctgcaccccgcatccacctgtgcctgggcccaccgtcaccccaaggagagacaattccctctcttctccacgtggcagtttgcccttccggaagagcctgtgtcccaaaccccacagttcctgggactcggcatctgccacatctgactctggatgtcgggggacccccttctgtcttccttcttgtggtccagcctccagtcccagatgggggctccggaggtggcgcccaggctctgagctaccctaggtctgcagactagcgggcattggccagagacatggcccagccactggccttcatcctcgatgtccctgagaccccaggggaccagggctcatccaggagcagagccagtgcacggcccaggaggggctggagctgcagcagagagagcgggaggtgacaggaagtagccagcagacactctggcggcccgagggcacccagagcacggccacactccgcatcctggccagcatgcccagccgcaccattggccgcagccgaggtgccatcatctcccagtactacaaccgcacggtgcagcttcggtgcaggagcagccggcccctgctcgggaactttgtccgctccgcctggcccagcctccgcctgtacgacctggag

SEQ ID NO: 193284 - DNA, 743 bp, Homo sapiens
  Payload ID: 18152
  Gene Name: transmembrane channel-like 6
  ENST ID: ENST00000592063
  CDS Start-End: 283-743
ctgcgactggcccagtcgcccctggggccctttgccactcccttggcaaggagagccgagacctcagttcccggcggctcttgcggggcacaggtgagccctggctgcgcgcgcggcccctcctccccggcgcctcccaggaatgggtggtgtggacagctgccaggcgttgaagaccacccctggctctgtgcccctgtctcatcagatgggggctccggaggtggcgcccaggctctgagctaccctaggtctgcagactagcgggcattggccagagacatggcccagccactggccttcatcctcgatgtccctgagaccccaggggaccagggccagggccccagcccctatgatgaaagcgaagtgcacgactccttccagcagctcatccaggagcagagccagtgcacggcccaggaggggctggagctgcagcagagagagcgggaggtgacaggaagtagccagcagacactctggcggcccgagggcacccagagcacggccacactccgcatcctggccagcatgcccagccgcaccattggccgcagccgaggtgccatcatctcccagtactacaaccgcacggtgcagcttcggtgcaggagcagccggcccctgctcgggaactttgtccgctccgcctggcccagcctccgcctgtacgacctggagctggaccccacggccctggaggaggaggagaagcagagcctcctggtgaaggagctcca

SEQ ID NO: 193285 - DNA, 551 bp, Homo sapiens
  Payload ID: 18152
  Gene Name: transmembrane channel-like 6
  ENST ID: ENST00000592594
  CDS Start-End: 122-551
aaactgaggccaagcaggcacttcctgtgggcccctgagatgcagagatgggggctccggaggtggcgcccaggctctgagctaccctaggtctgcagactagcgggcattggccagagacatggcccagccactggccttcatcctcgatgtccctgagaccccaggggaccagggccagggccccagcccctatgatgaaagcgaagtgcacgactccttccagcagctcatccaggagcagagccagtgcacggcccaggaggggctggagctgcagcagagagagcgggaggtgacaggaagtagccagcagacactctggcggcccgagggcacccagagcacggccacactccgcatcctggccagcatgcccagccgcaccattggccgcagccgaggtgccatcatctcccagtactacaaccgcacggtgcagcttcggtgcaggagcagccggcccctgctcgggaactttgtccgctccgcctggcccagcctccgcctgtacgacctggagctggaccccacggccctggaggaggagg

SEQ ID NO: 193286 - DNA, 1099 bp, Homo sapiens
  Payload ID: 18152
  Gene Name: transmembrane channel-like 6
  ENST ID: ENST00000589271
  CDS Start-End: 243-1099
ggcagacctgcgactggcccagtcgcccctggggccctttgccactcccttggcaaggagagccgagacctcagttcccggcggctcttgcggggcacaggaatgggtggtgtggacagctgccaggcgttgaagaccacccctggctctgtgcccctgtctcatcagatgggggctccggaggtggcgcccaggctctgagctaccctaggtctgcagactagcgggcattggccagagacatggcccagccactggccttcatcctcgatgtccctgagaccccaggggaccagggccagggccccagcccctatgatgaaagcgaagtgcacgactccttccagcagctcatccaggagcagagccagtgcacggcccaggaggggctggagctgcagcagagagagcgggaggtgacaggaagtagccagcagacactctggcggcccgagggcacccagagcacggccacactccgcatcctggccagcatgcccagccgcaccattggccgcagccgaggtgccatcatctcccagtactacaaccgcacggtgcagcttcggtgcaggagcagccggcccctgctcgggaactttgtccgctccgcctggcccagcctccgcctgtacgacctggagctggaccccacggccctggaggaggaggagaagcagagcctcctggtgaaggagctccagagcctggcagtggcacagcgggaccacatgcttcgcgggatgcccttaagcctggctgagaaacgcagcctgcgagagaagagcaggaccccgagggggaagtggaggggccagccgggcagcggcggggtctgctcctgctgtggccggctcagatatgcctgcgtgctggccttgcacagcctgggcctggcgctgctctccgccctgcaggccctgatgccgtggcgctacgccctgaagcgcatcgggggccagttcggctccagcgtgctctcctacttcctctttctcaagaccctgctggctttcaatgccctcctgctgctgctgctggtggccttcatcatgggccctcaggtcgccttcccacccgccctgccgggccctgcccc

SEQ ID NO: 193287 - DNA, 3640 bp, Homo sapiens
  Payload ID: 18153
  Gene Name: transmembrane channel-like 7
  Uniprot ID: Q7Z402
  ENST ID: ENST00000304381
  CDS Start-End: 131-2302
actccggcttctgtgatgtcagcgccggaacctggaatcccggctccgcgagggaaggccggggaggcggcggcggcggcggcggctggagagggtcctcggcagcctctgaggagcgcggggcgcggccatgagcgagtccagcggcagtgcgctccagcccggcaggcccagccggcagccggcggtccatccagagaacctctctctagactccagttgcttctcttctccacctgtgaacttcctccaagaattgccaagctaccggtccattgcacgtaggagaacgactgtccattcccgggacaagcaaagcggaactttgctaaagccaaccgactcttacagctcccagctggaggacagaatcgctgaaaacctcagcagccattctcttcgaaattatgcactgaacatctctgagaagcggagactaagggacattcaagagacacaaatgaagtatctctccgaatgggaccagtggaagcggtatagcagcaagtcttggaagaggttcctagagaaggctcgagagatgacgacccacctggagctgtggcgggaggacatccgcagcatagaagggaaatttggcactgggattcagtcctatttctccttcttgagattcctggtgttgctgaatttggtgatatttctgatcatctttatgctggttttgctcccagtcttactcacgaaatacaagatcaccaacagcagcttcgtgctcattcctttcaaagacatggataaacaatgtacagtctatccagtaagcagttctggactcatttacttttacagttatatcatagacttgctttctggcactggtttcctggaggaaactagcctcttttacggacattacaccattgatggggtgaaatttcagaacttcacctatgatctgcccctggcgtatttgttaagcacaatcgcctccctggccctgagccttctttggatagtgaaaaggtcggtggaaggattcaaaatcaacctgattcggagtgaggagcactttcagagttactgcaacaagatatttgccggctgggacttctgcatcactaaccgcagcatggcggatctgaagcacagcagcttgcggtacgagctccgagcagatctggaggaagaaagaatgcggcagaaaatagcagaaaggacctcagaagaaacaatacgcatttactctttgagactgtttttgaactgtattgttctggctgttttaggggcatgcttttatgcaatatacgtagcaactgtcttctcgcaagagcacatgaaaaaggaaatcgacaagatggtttttggagagaacctcttcatattgtatctaccgtctattgtgatcacgctggccaattttatcaccccaatgatctttgccaagatcatccgctatgaggattattctccaggctttgagatccgtctgacaatccttaggtgtgtctttatgcggctggccaccatatgtgtcctggtgttcacgctgggctccaagatcacatcctgtgatgatgacacatgtgacctttgcggctacaaccagaaactctacccgtgctgggagacccaagttgggcaggaaatgtacaagctgatgatcttcgacttcatcatcatcttggctgtgacactcttcgtggattttcctagaaagctcctggtgacctactgttcctcttgcaagctgattcagtgctgggggcagcaggagtttgccattcctgataacgtcctggggatagtttacgggcaaaccatctgctggatcggagcctttttctcaccccttctccctgcaattgcaaccctgaaattcattatcatcttctatgtgaaagagtggagtctgctttacacctgcagaccctcccccaggccgttcagagcatccaattctaatttcttcttcctgttggtgttgttgatcgggctgtgtttggcaataatacctctgacaatcagcatatcacgcatcccttcctcgaaagcctgtgggccgttcaccaacttcaacaccacctgggaggtcatccccaagacggtgagcaccttccccagctcgctgcagtccttcatccatggtgtcacatccgaagcctttgcagttcctttcttcatgattatttgcctcatcatgttttacttcattgccttagctggagcacacaaacgggtggtcatccagctccgagagcagctatccctggaaagtcgtgacaagtgctacctaatccagaaactaacagaagcccaaagggacatgaggaactaactagactgagcgtgaagatggtgctgcctgttgcttctaagctgacctagtgattctgctgagcctacagagtctacctgggttttgagtggacatttaaaaatatatttttcttgagtttaggcttttccatatgtgcagctgtgtttacctaacccagcccttaattagggcttcagtgacttagaaaagcaggggaaacccaaggctttgcctgcagaccggccactctgtgacaactctaccaaaaaccaacaagccattcaagcttttacaagaatgaaagagcggagacggtagtttagtatttgagccacgagtttatgtgcacaagtgttttgggttgtggactgaagctcagcctgttaatcagaccagcccatgagtgtataacaaacagaattggaggctggtttcttaaacacacacgtccacattttttagggttgttttcctgtgcttacaatttttaatgcatgtgcctttatttcacaaaacatgtggctgggcgcagcggctcacgcctgttatcccaacactttgggaggccgaggcaggcggagcacctaagttggggagttcaagaccagcctgaccaacgtggagaaactccgtctccactaaaatacaaaattagctgggtgtggtggcacatgcctgtaatatcagctactcaggaggctgaggcaggagaattgcttgaacccaggaggtggagtttgcagtgagctgagatcacaccattgcactccagcctgggcaaaaagagcaaaactctccctaaaaaaaaaatgtagaatatctcttaagatttccgttatggtaaaaaccatatgcaataaatacctcattgtaagcttacccaaaattgatagatgtcaaccttttaacagaagaacagaagtttaagttattgtttaatgtaatcagttttcattttaatatctttgaaatctttttcaaaggactgtagttttgtaatggacttttcaagccttccttccattgtttttcttccgttcactggctccacacgtttcctggggagtagcctggaatttaaagttgggtgcaggttttagaaagctgttgctgttaacaataattctcccggccatctccactccactactcaaaaatgcctgaatccttgctcagaggagcaaaggtatcttctcgtccctttcttacagccattttcttgcttttccacaaagatattatttaaagtggaatatttttgtaactgggataccaatgagcttttcggtcttttcctgacttggtaaggtttatgggtttctaaatctaataactacagtcataccaccctgaaaa

SEQ ID NO: 193288 - DNA, 4499 bp, Homo sapiens
  Payload ID: 18153
  Gene Name: transmembrane channel-like 7
  Uniprot ID: Q7Z402
  ENST ID: ENST00000421369
  CDS Start-End: 559-2400
ttccttattcctgctccctccacaaacgcgtcctcatccaatccagtggaacccagccgggccaaaaggacacgagaactgcagtctggaccgtggtgggtttgtcttccagctgttgaccgagacagtctttcaatagcctcatctgctgttaaatgaaaggatttgagcaccccctccacgcctaacattctggtatgaggtgcctgcctcccggacatttcagccttcacatacagttagaccaacttgaaaccgaattctgccttgtctgtttattgctgtgggacctttgagaacctctctctagactccagttgcttctcttctccacctgtgaacttcctccaagaattgccaagctaccggtccattgcacgtaggagaacgactgtccattcccgggacaagcaaagcggaactttgctaaagccaaccgactcttacagctcccagctggaggacagaatcgctgaaaacctcagcagccattctcttcgaaattatgcactgaacatctctgagaagcggagactaagggacattcaagagacacaaatgaagtatctctccgaatgggaccagtggaagcggtatagcagcaagtcttggaagaggttcctagagaaggctcgagagatgacgacccacctggagctgtggcgggaggacatccgcagcatagaagggaaatttggcactgggattcagtcctatttctccttcttgagattcctggtgttgctgaatttggtgatatttctgatcatctttatgctggttttgctcccagtcttactcacgaaatacaagatcaccaacagcagcttcgtgctcattcctttcaaagacatggataaacaatgtacagtctatccagtaagcagttctggactcatttacttttacagttatatcatagacttgctttctggcactggtttcctggaggaaactagcctcttttacggacattacaccattgatggggtgaaatttcagaacttcacctatgatctgcccctggcgtatttgttaagcacaatcgcctccctggccctgagccttctttggatagtgaaaaggtcggtggaaggattcaaaatcaacctgattcggagtgaggagcactttcagagttactgcaacaagatatttgccggctgggacttctgcatcactaaccgcagcatggcggatctgaagcacagcagcttgcggtacgagctccgagcagatctggaggaagaaagaatgcggcagaaaatagcagaaaggacctcagaagaaacaatacgcatttactctttgagactgtttttgaactgtattgttctggctgttttaggggcatgcttttatgcaatatacgtagcaactgtcttctcgcaagagcacatgaaaaaggaaatcgacaagatggtttttggagagaacctcttcatattgtatctaccgtctattgtgatcacgctggccaattttatcaccccaatgatctttgccaagatcatccgctatgaggattattctccaggctttgagatccgtctgacaatccttaggtgtgtctttatgcggctggccaccatatgtgtcctggtgttcacgctgggctccaagatcacatcctgtgatgatgacacatgtgacctttgcggctacaaccagaaactctacccgtgctgggagacccaagttgggcaggaaatgtacaagctgatgatcttcgacttcatcatcatcttggctgtgacactcttcgtggattttcctagaaagctcctggtgacctactgttcctcttgcaagctgattcagtgctgggggcagcaggagtttgccattcctgataacgtcctggggatagtttacgggcaaaccatctgctggatcggagcctttttctcaccccttctccctgcaattgcaaccctgaaattcattatcatcttctatgtgaaagagtggagtctgctttacacctgcagaccctcccccaggccgttcagagcatccaattctaatttcttcttcctgttggtgttgttgatcgggctgtgtttggcaataatacctctgacaatcagcatatcacgcatcccttcctcgaaagcctgtgggccgttcaccaacttcaacaccacctgggaggtcatccccaagacggtgagcaccttccccagctcgctgcagtccttcatccatggtgtcacatccgaagcctttgcagttcctttcttcatgattatttgcctcatcatgttttacttcattgccttagctggagcacacaaacgggtggtcatccagctccgagagcagctatccctggaaagtcgtgacaagtgctacctaatccagaaactaacagaagcccaaagggacatgaggaactaactagactgagcgtgaagatggtgctgcctgttgcttctaagctgacctagtgattctgctgagcctacagagtctacctgggttttgagtggacatttaaaaatatatttttcttgagtttaggcttttccatatgtgcagctgtgtttacctaacccagcccttaattagggcttcagtgacttagaaaagcaggggaaacccaaggctttgcctgcagaccggccactctgtgacaactctaccaaaaaccaacaagccattcaagcttttacaagaatgaaagagcggagacggtagtttagtatttgagccacgagtttatgtgcacaagtgttttgggttgtggactgaagctcagcctgttaatcagaccagcccatgagtgtataacaaacagaattggaggctggtttcttaaacacacacgtccacattttttagggttgttttcctgtgcttacaatttttaatgcatgtgcctttatttcacaaaacatgtggctgggcgcagcggctcacgcctgttatcccaacactttgggaggccgaggcaggcggagcacctaagttggggagttcaagaccagcctgaccaacgtggagaaactccgtctccactaaaatacaaaattagctgggtgtggtggcacatgcctgtaatatcagctactcaggaggctgaggcaggagaattgcttgaacccaggaggtggagtttgcagtgagctgagatcacaccattgcactccagcctgggcaaaaagagcaaaactctccctaaaaaaaaaatgtagaatatctcttaagatttccgttatggtaaaaaccatatgcaataaatacctcattgtaagcttacccaaaattgatagatgtcaaccttttaacagaagaacagaagtttaagttattgtttaatgtaatcagttttcattttaatatctttgaaatctttttcaaaggactgtagttttgtaatggacttttcaagccttccttccattgtttttcttccgttcactggctccacacgtttcctggggagtagcctggaatttaaagttgggtgcaggttttagaaagctgttgctgttaacaataattctcccggccatctccactccactactcaaaaatgcctgaatccttgctcagaggagcaaaggtatcttctcgtccctttcttacagccattttcttgcttttccacaaagatattatttaaagtggaatatttttgtaactgggataccaatgagcttttcggtcttttcctgacttggtaaggtttatgggtttctaaatctaataactacagtcataccaccctgaaaatgcctgatctcgtctaaatctaataactggtgtcatggaattttgagtaaccaaagattcattccagtctcacttaaaaaaataaattctgctgggcacagtggctcatgcctgcaatcccagaactttgggagtccaaggagggcagatcacctgaagtcagaagtttgagaccagcctggtcaatgtggcaagaccccgtctctactaaaagtacaaaaattagccaggcatggtggcgtgtgcctgtaatcccagctacttgggaggctgaggcatgagaatcacttgaacctgggaggtgaaggctgcagtgtgcgagaccgtgccactgtactccagcctaggtgacagagggagaccctatctcaaaaaaaaagataggtgaaaagaaaaaaaaagttgtaattgtaaacatttctgcccagtgcctttatatttatataacattttcactgtgaccagacttgatgatattcaagttttctatttgtgtgtgtgtgtgtgtgtgtgtgtgatgaacacaacgaaaacgtactgcgttttttttcctattataaaagtgatactgaaatatgctaattaatatattaattttagttaaatgctgctaatatgcatacctcttacttgaaggtttttaatatgttttgataactttaataacttcaggtgatgtctgtataacttttaaagtgcagctctctctaacaaatgtgccttacaactcctgattaaacggcgtcttgaaggttttaaaa

SEQ ID NO: 193289 - DNA, 2738 bp, Homo sapiens
  Payload ID: 18153
  Gene Name: transmembrane channel-like 7
  ENST ID: ENST00000569532
  CDS Start-End: 131-2407
actccggcttctgtgatgtcagcgccggaacctggaatcccggctccgcgagggaaggccggggaggcggcggcggcggcggcggctggagagggtcctcggcagcctctgaggagcgcggggcgcggccatgagcgagtccagcggcagtgcgctccagcccggcaggcccagccggcagccggcggtccatccagagaacctctctctagactccagttgcttctcttctccacctgtgaacttcctccaagaattgccaagctaccggtccattgcacgtaggagaacgactgtccattcccgggacaagcaaagcggaactttgctaaagccaaccgactcttacagctcccagctggaggacagaatcgctgaaaacctcagcagccattctcttcgaaattatgcactgaacatctctgagaagcggagactaagggacattcaagagacacaaatgaagtatctctccgaatgggaccagtggaagcggtatagcagcaagtcttggaagaggttcctagagaaggctcgagagatgacgacccacctggagctgtggcgggaggacatccgcagcatagaagggaaatttggcactgggattcagtcctatttctccttcttgagattcctggtgttgctgaatttggtgatatttctgatcatctttatgctggttttgctcccagtcttactcacgaaatacaagatcaccaacagcagcttcgtgctcattcctttcaaagacatggataaacaatgtacagtctatccagtaagcagttctggactcatttacttttacagttatatcatagacttgctttctggcactggtttcctggaggaaactagcctcttttacggacattacaccattgatggggtgaaatttcagaacttcacctatgatctgcccctggcgtatttgttaagcacaatcgcctccctggccctgagccttctttggatagtgaaaaggtcggtggaaggattcaaaatcaacctgattcggagtgaggagcactttcagagttactgcaacaagatatttgccggctgggacttctgcatcactaaccgcagcatggcggatctgaagcacagcagcttgcggtacgagctccgagcagatctggaggaagaaagaatgcggcagaaaatagcagaaaggacctcagaagaaacaatacgcatttactctttgagactgtttttgaactgtattgttctggctgttttaggggcatgcttttatgcaatatacgtagcaactgtcttctcgcaagagcacatgaaaaaggaaatcgacaagatggtttttggagagaacctcttcatattgtatctaccgtctattgtgatcacgctggccaattttatcaccccaatgatctttgccaagatcatccgctatgaggattattctccaggctttgagatccgtctgacaatccttaggtgtgtctttatgcggctggccaccatatgtgtcctggtgttcacgctgggctccaagatcacatcctgtgatgatgacacatgtgacctttgcggctacaaccagaaactctacccgtgctgggagacccaagttgggcaggaaatgtacaagctgatgatcttcgacttcatcatcatcttggctgtgacactcttcgtggattttcctagaaagctcctggtgacctactgttcctcttgcaagctgattcagtgctgggggcagcaggagtttgccattcctgataacgtcctggggatagtttacgggcaaaccatctgctggatcggagcctttttctcaccccttctccctgcaattgcaaccctgaaattcattatcatcttctatgtgaaagagtggagtctgctttacacctgcagaccctcccccaggccgttcagagcatccaattctaatttcttcttcctgttggtgttgttgatcgggctgtgtttggcaataatacctctgacaatcagcatatcacgcatcccttcctcgaaagcctgtgggccgttcaccaacttcaacaccacctgggaggtcatccccaagacggtgagcaccttccccagctcgctgcagtccttcatccatggtgtcacatccgaagcctttgcagttcctttcttcatgattatttgcctcatcatgttttacttcattgccttagctggagcacacaaacgggtggtcatccagctccgagagcagctatccctggtaaggaagcatagctccagagggtcatggctggggacatttacccaggacactgcaaggaaagtgctgttttcctgggagggagtgaaattactgcagccttctctcaccaccacctccccaaaactctgccttgaggcccagccgcgtccagcttcattaattcactgattcatccattccttcaagatgtgtattaagggggatgtggtggctcatgcctgtaatcccagcacttttgggaggccgaggcaggcagattacttgagctcaggagttcaagaccagcctggccaacatggtgaaaccccgtctctactaaaaatacaaaaagtagttgggcgtggtggtgggcacctgtaatcccagctacttgggaggctgaggcaggagaatcccttgaactcaggaggtggaggtcgcagtgagctgagattgcgctattgcactccagcctgggtgacagagtgagactccatcttaaaaataaaaataaaaaaag

SEQ ID NO: 193290 - DNA, 4411 bp, Homo sapiens
  Payload ID: 18154
  Gene Name: transmembrane channel-like 8
  Uniprot ID: Q8IU68
  ENST ID: ENST00000318430
  CDS Start-End: 375-2555
tgcctggcttggcaggagtcgtctgagaaggggactcctccagggacttggtccctaggtccccagatggggagactgaggccgtggctgtgtgtccctctgagagttggagcggggctgggcccgaattcgaccgcagcaggattctctctcatttctgagccccggaggtggcagagcggcagacccgggcaagtgaaccctagggctgcaggagcccaggccccgacgccggcgcagaggggacggaagggcccgcccccagcccagcgtgcacagaggccatagccaaggccttaaggctcatccaaccggggactcatatcccccccaccggcagcccggcgccccagcctctacccgtgcccgccgagatgctgctgccgcggtcggtgtcatcggagcgggcccctggggtgccggagccggaggagctgtgggaggcagagatggagcggctgcgcggctctgggacgcccgtgcgcgggctgccctatgccatgatggacaagcgcctcatctggcagctgcgggagcccgcgggggtgcagaccttgcgctggcagcggtggcagcgccggcggcagacggtggaaaggcgcctgcgggaggcagcgcagcggctggcccggggccttgggctctgggagggggcgctctacgagatcgggggcctcttcggcacaggaattcggtcctacttcaccttcctccgcttcctgctgctactcaacctgctgagcctgctgctcaccgcaagcttcgtgctgctgcccctggtctggctccgcccccctgacccaggccccaccctgaacttgaccctccagtgccctggtagccgccagtccccgcctggcgttttgaggttccacaatcaactttggcatgttttgactggcagggccttcaccaacacctatctcttctacggtgcgtaccgagtggggccggagagcagctccgtgtacagcatccgcctggcctacctcctcagcccgctggcctgcctgctcctctgcttctgtgggactctgcggcggatggtgaaggggctgccgcagaagactctgctgggtcagggctatcaggcgcctctcagcgccaaggtcttctcctcatgggacttctgcatccgggtgcaggaagcagccaccatcaagaagcatgagatcagcaacgagttcaaggtggagctggaggagggccgtcgcttccagctgatgcagcagcagacccgggcccagacggcctgccgcctgctctcctacctgcgggtcaacgtactcaacgggctcctggtggttggggccatcagcgccatcttctgggctaccaagtactcacaggacaacaaggaggagtccctgtttctgctgctccagtacctgccccctggggtcatcgccctggtcaacttcctgggtcccctgctgttcacatttctggtccagctggagaactaccctcccaacacggaggtcaacctcactctgatctggtgcgtggtgctgaagctggccagcttggggatgttctccgtctccctgggtcagaccatactgtgcattggcagagacaagagcagctgtgagtcctacggctacaacgtttgtgactatcagtgctgggagaactccgtgggggaggagctgtacaagctgagtatcttcaacttcctcctcaccgtggccttcgccttcctggtcaccctgcctcggaggctgctggtggaccggttctcaggccggttctgggcctggctggaacgggaggagttcctggtccccaagaatgtgctggacatcgtggcggggcagacggtcacctggatgggcctcttctactgccccctgctgcccctgctgaatagcgtcttcctcttcctcaccttctacatcaagaagtacaccctcctgaagaactccagggcatcttcgcggcccttccgtgcctccagctccaccttcttcttccagctagtgctcctcctgggcctgcttctggctgcagtgcccctgggctatgtggtcagcagcatccactcctcctgggactgcggcctcttcaccaactactcagcaccctggcaagtggtcccggagctggtggcccttgggctcccgcccattggccagcgtgccctccactacctgggctcccacgccttcagcttccccctcctcatcatgctcagccttgtcctgacggtgtgcgtctcccagacccaggccaatgccagggccatccacaggctccggaagcagctggtgtggcaggttcaggagaagtggcacctggtggaggacctgtcgcgactgctgccggagccaggcccgagcgactctccgggccccaagtaccctgcctcccaagcttcgcgcccgcagtccttctgccccggatgcccatgccctggctccccgggccaccaggccccgcggccgggcccctccgtcgtggatgccgcgggactgcgttccccttgccctggacagcacggtgccccggcctccgcccgcagattccgcttccccagcggcgcggagctgtaacccctacccctgcctccccgaagcctccctggggccccttcaggcctccttactccatcttccagacccctggcgaccaccgcccctctcagtggctccagggcctccctcagaggtccccaaagatggacacacaaccccagcggcagcaggaaaaacatatgggaattttctttctatattttaatctcatccctttaaaatgtctattttttattgtgttttttataatatacataatctattagtatagtatctcttgaatgcgattttttctagaatgtgttctgctgatttgttttagagccatgagtgcaatttatacacatacatctattgggaatgctcagaagttgtttactgatggaagtgccttcagaagagtccgggaaccacttcctaaggaaggaaagagctggccacagttagagcaagcctgcctggggccctgctctgtgttccagctgcaaactgcctgcatcatcccttcctgttactcttccttcacctgagacagtcgaggccacagcgtcagccagggccagagctgggatttgaacccaggcactcgggctccagagccacactgccccagtgtggggcttagtggcggctcctggccctgactgaggggctgactgaagcctggtgagagcgtgctgggtcagcctctccctggcgggaatcctctccgtccagtcttctaacctagcagcctcacgtccacagagctgccttgtgaaactcagcagagccctggcttcctgcagagccgtgttctcccagcctgcttcatggctccctggttgagccaagcttgcggatccgtggggtgaaggtacccgcaccgcctgggccttagtggtatgtacgggcctgcatcgtgagcagcgggcgggggcccaggcaggtgaggcagctggccacaagggcagggcccggcccccctcccaaggctgtgtctgatattcttgagcctgttcgagtttccttttccaagcctcctgttctcccacccccacccctgccatgctgcagtgactaaatctgtggttctcatccttggagaacacctgagtagctgctacaagctggccacagcccagcgactctgatgtggttgggctgggtgtggccagcagccagggcatcgggacttttcgaagctcccaggtgactcaccggcagctggggatgagaactgtcaggagggaaggtcagaagtcccaggatgcacttgaaaagcctctagctccaccagtgaccagctcctggctggactcctggtctggactcagcatcagggaggctctggcctctcgccctcagggctgggggcttcttcacatggtcatcaaagacttggccagttccgcctctcccacggccgtccttgtctcacccagcatcacgacgcatcagttcaccaacaaacacgattcagtgctgctagtgctgggtcctgttctgggggctggtgatgaggccaagagggaaagagggagctctgtgttccatcgagggggcgacaagcctggaccagatgaaagtgactcatgttgttaattagcggcttagggccaaaggtggcccctggaccagtggcctcagcatcacctgggaaaaggttagaaatgaacattcccaggccccacctcagcctcctgaatcagagcatccctttggcaaaccatactgagaaacaaccacgtgcatcaccaagcgctgtgaagaaggcaagctttgagaccttgaaggaatcatcaaactctgggcctcggtgtgctcacccagggcgagacaaagacgccatgctcctccaagtggcctccaagattaaatgagcaatgactttt

SEQ ID NO: 193291 - DNA, 971 bp, Homo sapiens
  Payload ID: 18154
  Gene Name: transmembrane channel-like 8
  ENST ID: ENST00000590799
  CDS Start-End: 383-971
caccaccctgcctggcttggcaggagtcgtctgagaaggggactcctccagggacttggtccctaggtccccagatggggagactgaggccgtggctgtgtgtccctctgagagttggagcggggctgggcccgaattcgaccgcagcaggattctctctcatttctgagccccggaggtggcagagcggcagacccgggcaagtgaaccctagggctgcaggagcccaggccccgacgccggcgcagaggggacggaagggcccgcccccagcccagcgtgcacagaggccatagccaaggccttaaggctcatccaaccggggactcatatcccccccaccggcagcccggcgccccagcctctacccgtgcccgccgagatgctgctgccgcggtcggtgtcatcggagcgggcccctggggtgccggagccggaggagctgtgggaggcagagatggagcggctgcgcggctctgggacgcccgtgcgcgggctgccctatgccatgatggacaagcgcctcatctggcagctgcgggagcccgcgggggtgcagaccttgcgctggcagcggtggcagcgccggcggcagacggtggaaaggcgcctgcgggaggcagcgcagcggctggcccggggccttgggctctgggagggggcgctctacgagatcgggggtaggacccgcgcgacccgcacctccccttgccctctctggagccccactgcccagatcggaaaaaggagagtggcatcatcccacctgccttcacccgggtcccccgaccaatcggcccctcccccctcccaccccttccgcccgcaggcaccgcaaacctcgggcccacgcagcacccccaggcctcttcggcacaggaattcggtcctacttcaccttcctccgcttcctgctgctactcaacctgctgagcctgctgctcaccgcaagcttcgtgctgctgcccctg

SEQ ID NO: 193292 - DNA, 433 bp, Homo sapiens
  Payload ID: 18154
  Gene Name: transmembrane channel-like 8
  ENST ID: ENST00000590426
  CDS Start-End: 427-433
ggctccctcaccaccctgcctggcttggcaggagtcgtctgagaaggggactcctccagggacttggtccctaggtccccaggtgagctggatgtccagtggagggagaatgcagaggatggggagactgaggccgtggctgtgtgtccctctgagagttggagcggggctgggcccgaattcgaccgcagcaggattctctctcatttctgagccccggaggtggcagagcggcagacccgggcaagtgaaccctagggctgcaggagcccaggccccgacgccggcgcagaggggacggaagggcccgcccccagcccagcgtgcacagaggccatagccaaggccttaaggctcatccaaccggggactcatatcccccccaccggcagcccggcgccccagcctctacccgtgcccgccgagatgctgc

SEQ ID NO: 193293 - DNA, 3927 bp, Homo sapiens
  Payload ID: 18154
  Gene Name: transmembrane channel-like 8
  Uniprot ID: Q8IU68
  ENST ID: ENST00000589691
  CDS Start-End: 561-2072
cctggcttggcaggagtcgtctgagaaggggactcctccagggacttggtccctaggtccccagatggggagactgaggccgtggctgtgtgtccctctgagagttggagcggggctgggcccgaattcgaccgcagcaggattctctctcatttctgagccccggaggtggcagagcggcagacccgggcctcttcggcacaggaattcggtcctacttcaccttcctccgcttcctgctgctactcaacctgctgagcctgctgctcaccgcaagcttcgtgctgctgcccctggtctggctccgcccccctgacccaggccccaccctgaacttgaccctccagtgccctggtagccgccagtccccgcctggcgttttgaggttccacaatcaactttggcatgttttgactggcagggccttcaccaacacctatctcttctacggtgcgtaccgagtggggccggagagcagctccgtgtacagcatccgcctggcctacctcctcagcccgctggcctgcctgctcctctgcttctgtgggactctgcggcggatggtgaaggggctgccgcagaagactctgctgggtcagggctatcaggcgcctctcagcgccaaggtcttctcctcatgggacttctgcatccgggtgcaggaagcagccaccatcaagaagcatgagatcagcaacgagttcaaggtggagctggaggagggccgtcgcttccagctgatgcagcagcagacccgggcccagacggcctgccgcctgctctcctacctgcgggtcaacgtactcaacgggctcctggtggttggggccatcagcgccatcttctgggctaccaagtactcacaggacaacaaggaggagtccctgtttctgctgctccagtacctgccccctggggtcatcgccctggtcaacttcctgggtcccctgctgttcacatttctggtccagctggagaactaccctcccaacacggaggtcaacctcactctgatctggtgcgtggtgctgaagctggccagcttggggatgttctccgtctccctgggtcagaccatactgtgcattggcagagacaagagcagctgtgagtcctacggctacaacgtttgtgactatcagtgctgggagaactccgtgggggaggagctgtacaagctgagtatcttcaacttcctcctcaccgtggccttcgccttcctggtcaccctgcctcggaggctgctggtggaccggttctcaggccggttctgggcctggctggaacgggaggagttcctggtccccaagaatgtgctggacatcgtggcggggcagacggtcacctggatgggcctcttctactgccccctgctgcccctgctgaatagcgtcttcctcttcctcaccttctacatcaagaagtacaccctcctgaagaactccagggcatcttcgcggcccttccgtgcctccagctccaccttcttcttccagctagtgctcctcctgggcctgcttctggctgcagtgcccctgggctatgtggtcagcagcatccactcctcctgggactgcggcctcttcaccaactactcagcaccctggcaagtggtcccggagctggtggcccttgggctcccgcccattggccagcgtgccctccactacctgggctcccacgccttcagcttccccctcctcatcatgctcagccttgtcctgacggtgtgcgtctcccagacccaggccaatgccagggccatccacaggctccggaagcagctggtgtggcaggttcaggagaagtggcacctggtggaggacctgtcgcgactgctgccggagccaggcccgagcgactctccgggccccaagtaccctgcctcccaagcttcgcgcccgcagtccttctgccccggatgcccatgccctggctccccgggccaccaggccccgcggccgggcccctccgtcgtggatgccgcgggactgcgttccccttgccctggacagcacggtgccccggcctccgcccgcagattccgcttccccagcggcgcggagctgtaacccctacccctgcctccccgaagcctccctggggccccttcaggcctccttactccatcttccagacccctggcgaccaccgcccctctcagtggctccagggcctccctcagaggtccccaaagatggacacacaaccccagcggcagcaggaaaaacatatgggaattttctttctatattttaatctcatccctttaaaatgtctattttttattgtgttttttataatatacataatctattagtatagtatctcttgaatgcgattttttctagaatgtgttctgctgatttgttttagagccatgagtgcaatttatacacatacatctattgggaatgctcagaagttgtttactgatggaagtgccttcagaagagtccgggaaccacttcctaaggaaggaaagagctggccacagttagagcaagcctgcctggggccctgctctgtgttccagctgcaaactgcctgcatcatcccttcctgttactcttccttcacctgagacagtcgaggccacagcgtcagccagggccagagctgggatttgaacccaggcactcgggctccagagccacactgccccagtgtggggcttagtggcggctcctggccctgactgaggggctgactgaagcctggtgagagcgtgctgggtcagcctctccctggcgggaatcctctccgtccagtcttctaacctagcagcctcacgtccacagagctgccttgtgaaactcagcagagccctggcttcctgcagagccgtgttctcccagcctgcttcatggctccctggttgagccaagcttgcggatccgtggggtgaaggtacccgcaccgcctgggccttagtggtatgtacgggcctgcatcgtgagcagcgggcgggggcccaggcaggtgaggcagctggccacaagggcagggcccggcccccctcccaaggctgtgtctgatattcttgagcctgttcgagtttccttttccaagcctcctgttctcccacccccacccctgccatgctgcagtgactaaatctgtggttctcatccttggagaacacctgagtagctgctacaagctggccacagcccagcgactctgatgtggttgggctgggtgtggccagcagccagggcatcgggacttttcgaagctcccaggtgactcaccggcagctggggatgagaactgtcaggagggaaggtcagaagtcccaggatgcacttgaaaagcctctagctccaccagtgaccagctcctggctggactcctggtctggactcagcatcagggaggctctggcctctcgccctcagggctgggggcttcttcacatggtcatcaaagacttggccagttccgcctctcccacggccgtccttgtctcacccagcatcacgacgcatcagttcaccaacaaacacgattcagtgctgctagtgctgggtcctgttctgggggctggtgatgaggccaagagggaaagagggagctctgtgttccatcgagggggcgacaagcctggaccagatgaaagtgactcatgttgttaattagcggcttagggccaaaggtggcccctggaccagtggcctcagcatcacctgggaaaaggttagaaatgaacattcccaggccccacctcagcctcctgaatcagagcatccctttggcaaaccatactgagaaacaaccacgtgcatcaccaagcgctgtgaagaaggcaagctttgagaccttgaaggaatcatcaaactctgggcctcggtgtgctcacccagggcgagacaaagacgccatgctcctccaagtggcctccaagattaaatgagcaatgacttt

SEQ ID NO: 193294 - DNA, 2500 bp, Homo sapiens
  Payload ID: 18155
  Gene Name: transmembrane epididymal protein 1
  Uniprot ID: Q5T9Z0
  ENST ID: ENST00000367565
  CDS Start-End: 132-953
gtcctgagtattgctcttcacgcttcagtcggacaggcctgtattccatgggaaagtccattggccatttttaactggggctatttcttttctcttatggactatatcaggccacagtggtctccaagggcatgatactcaaaggttgtctcctgtatcctttgtgctctcccaggaataagcaaagatgtgccaggctgtggaaaatagcctatggaggattactaaagatagtgactggctccctcttaacattttatgtggttctctgtcttgatggcgggatggtgctcatgaggaagcaagtgccatcaaggttcatgtaccccaaagagtggcagcacctcaccatgttcatcctcctcactcttaatggctgtgtggacttcatgagcaagaatgtgctgcctcagaggtgtgtgggcctagaaaaaggtaccctggtcctgatcatctacgagctcctgctgctgatggtgtcacatgttaaagattcagaaggggtggagctgcacgtttattctctgctcatcttggtggtgttcctgctgttgctggtgttgactgcagagctgtgggctcccaacatgtgtcatctccagctgatggagacctttctgattctgatgatgggctcctggctgatgcaggcaggctttattctatacagacccgtctctggctacccatggcaggacgatgacatcagtgacatcatgtttgtcaccaccttcttctgctggcatgtgatgatcaatgcctcattcctgttgggaatctatggcttctcttccttttggtatcattgtttcagacccagcttgaagctgactgggcccaaagaagctccatattatgcaagcactccaggacccctctacaagttgctacaggaagtggagcagtcagagaaagaggaccaggctctcctccttccaaagagctccccctgagacagggcctacagtggctggcacatcgtccacctcatcttcctcctgttggctcctcagccacgagcatggtaccctccttggtaaaggtaatggccttgaaggctagcagttggtcccgtctgctggttcattttcttttcttctcttttctttttttttttttttgagacagagtctcgctctgttgcccagcctggagtgcaatggcacaatctcagctcagtgcaacctccgcctcccgagttcaagcgattctcctgcctcagcctcccgagtagctgcaattacaggagcctgccaccatgcccgtgctggtgcattttctgtccctgagcctctaattactgagaagataaggggagagggattgagaaagagacgctgatgggatttgcgggagggagggaaaaggacgaggagaacacttcttcttagtgtgcaagaaaagccactgggggaagagaatgcaacaaaaggaagagctgtgaagggaggagaacagagtctagcagttatgctgtcattagcgtcatcaggcacaagggattgccttttacctgagggaataaagacttctcacaactcaaaactggacccattcaaatctcatcttgataaagaaaagtgggtactttacgtgctcaccaaagtggtgccaccatgtggaaatagcatgatagaatttataattaattcatacaggctgaaattatgctcgctttgcctccttctctctccgcagctttcaagaattggcttcatttcaaactttacatataaagtgagactttttaaatacttaataacatttcaaatttccataatttaaatttgtatagaattcaactgctatagcatttttatagcattcaaatgcttggtacttccctgacttctcattttattactcttattctagcccaaactttccttttcaccatgaccacccttgcacatgcaatttagcagataccattcttgggtctttgcaaatttcttttccttgcaaatcacagccagtcatcctacagtcacatatttaccatgttattcgattcccagaataaacctacatccacccccacaccgcaccaagtatccccaaggtggccttctccagaactcttactgattcccttgttttggaactcttgggcacttacattaaatctgctttgttagtttgctcatacaggtgacccactttcttttatactgctgctgaaatcattttctttcagaaggttcttcctcacccactaaagtacaggctcctaaagggaaaagactttgccttatccaagttaccaaatttcctatgtatactccagctatggatcatggttatgtttaataaagccttctttgcttccagagtcttccctaatcctgtttcttctaaatgtattgctggacaggttggaggttttgtgaatctctctgggtgacaacaacagtcctgaacactgagtcactgccttagtaatgcacccactctcttccttgttttggggtataataaaatccagtaacttgtttctgaa

SEQ ID NO: 193295 - DNA, 1824 bp, Homo sapiens
  Payload ID: 18156
  Gene Name: transmembrane inner ear
  Uniprot ID: Q8NEW7
  ENST ID: ENST00000326431
  CDS Start-End: 156-626
ggcggcgcgggaacctgacaccgaggatgaataaatgatgctcgctgactacccgtggccaaagcccgtggccaccgagcgccggctggcaggggcagtgaccggcggccggcccgttcgtccctgggctccgcaagcggcgcggtggcacgaagatggcggggtggccgggcgcgggtcccctctgcgtgctgggcggcgccgcactcggggtgtgcctcgcgggggttgccgggcagctggtggagcccagcacggccccacccaagcccaagccgcctccgctgaccaaggagacagtggtgttctgggacatgcgcctgtggcacgtggtgggcatcttttcgctcttcgtgttgtccatcatcatcacgctgtgctgtgtcttcaactgtcgtgtgccacggacccggaaggagatcgaagcccggtacctgcagcgaaaggcagccaagatgtacacagacaagctggagactgtgccacccctcaatgagctcacagaagtcccaggagaggataagaagaagaagaagaagaagaagaaggacagtgtggacacagtggccatcaaagtagaggaggatgagaagaatgaggccaagaagaagaaaggagagaaatgaagacatcctgggcagcttgggctggcgggccctggagctcaagccgtggccggggtccaggcatgttggactctgagctcatttggggaccacagaggctgtggtcagagagggaagctgaggcccatggccacatcctcatggcccatcaggggcaggaaccagacaatctcgtaggtgtcctgccccccagcctaggcttggctcctttcaccccatccacatgggtactgtctcggcagaggtggtctggtgccaccgtccctctgcagatacactgctctccccacccagacctgcctgtctcccaccctttctgccagggatggcagtggctgtgaaggagtaatgggatatggggttacttcagccaccctttctggcacgaaatggctgaagtgcatgggtcagggtgtgaggccacacccagagtagccatgaggaggcagagagggtcactgggggacactgtggcagcaggagggactctgtctggccagggaggagccccagtggtgagaagacttccccaagcctggcaggggatccagctcaagggagtaagtagaggtggcttcagaaatggaacccccagcccagcagacatcaagctcaaggcaatgggctaccctcatttcacacgttgtgatgaagctgaggctgctgccaggcccggcatgaggccccgaggctcgagctcggggctgggggctgcagggctgggtcaggggtacacagagctaaggccaatgggctagagggtgccggaaagagagctggagtctgggctcctcttgggaatcagagtatatttaagaagccaagggggacctcgggctgttctggtggccccttctatgcccagctgtgctgggaggtcccagggccctagaagatcacagcagggccttctgcctgctgaccataacagtgccagcttctttgcagcttcctcttctaccatttcccactacgggcacctaaaagaagcatctctgaccagaagacaaaggcccaaatagcacctgggggagggaagatgcacagaggcacttccagatggcatcgaacagactaaggctctgaaacctaggcctgaacactaaggtctcgagacaccagaggtttctgagccaggagagcctgctggaaaagcagcctgcagagatttgtgaataaagctgattgccttctcaga

SEQ ID NO: 193296 - DNA, 1340 bp, Homo sapiens
  Payload ID: 18157
  Gene Name: transmembrane p24 trafficking protein 1
  Uniprot ID: Q13445
  ENST ID: ENST00000214869
  CDS Start-End: 100-783
atacagaagccactgccaatgagctccgccgagtagcaccggggcagggctagcgcttaaaggagccgcgacccctttgcagaccagagggtgacccggatgatggcggccggcgcggccctagccctggccttgtggctactaatgccaccagtggaggtgggaggggcggggcccccgccaatccaggacggtgagttcacgttcctgttgccggcggggaggaagcagtgtttctaccagtccgcgccggccaacgcaagcctcgagaccgaataccaggtgatcggaggtgctggactggacgtggacttcacgctggagagccctcagggcgtgctgttggtcagcgagtcccgcaaggctgatggggtacacacggtggagccaacggaggccggggactacaagctgtgctttgacaactccttcagcaccatctccgagaagctggtgttctttgaactgatctttgacagcctccaggatgacgaggaggtcgaaggatgggcagaggctgtggagcccgaggagatgctggatgttaaaatggaggacatcaaggagtccattgagaccatgcggacccggctggagcgcagcatccagatgctcacgctactgcgggccttcgaggcacgtgaccgcaacctgcaagagggcaacttggagcgggtcaacttctggtcagctgtcaacgtggcggtgctgctgctggtggctgtgctgcaggtctgcacgctcaagcgcttcttccaggacaagcgcccggtgcccacgtagcccctgccatggaaggaagaacgggacaaaggaggggcagcagggtgtgtgcatatgagacttgggggtccctccccaattttagtttcctgccaaaacgggagtgtgcagtcagggcctgcggtctggccccatgagtctccttccgtcctcagcgggcagggaacacctctggcttgtagaagggacggctcagtggctgcaccgacggtcctggaaatctcacatggtgggcactgcagcgttggaacgtgagcctcggatttcctggcccctctactgtaaatgtgccttagcctaagcctcccatcctgtgttagcgttgcctggtgcggggcagggcctaacaaggaaacctgggccctccaagccaggttgaggtctggtaacagaatgccaggaagggggcctggaagaccacctgccccggcccctctcctgcaggggccccacacaggcatgagggatggcccggccaaagtctaggcagaagcctcctataacaaagggtggtgtggcctgggcattggagtcaataaattatggtcagaaaatca

SEQ ID NO: 193297 - DNA, 541 bp, Homo sapiens
  Payload ID: 18157
  Gene Name: transmembrane p24 trafficking protein 1
  ENST ID: ENST00000588289
  CDS Start-End: 283-531
ggaggcggagccaaccaggggcgtggtcaggtgatcggaggtgctggactggacgtggacttcacgctggagagccctcagggcgtgctgttggtcagcgagtcccgcaaggctgatggggtacacacggtggagccaacggaggccggggactacaagctgtgctttgacaactccttcagcaccatctccgagaagctggtgttctttgaactgatctttgacagcctccaggatgacgaggaggtcgaaggatgggcagaggctgtggagcccgaggagatgctggatgttaaaatggaggacatcaaggagtccattgagaccatgcggacccggctggagcgcagcatccagatgctcacgctactgcgggccttcgaggcacgtgaccgcaacctgcaagagggcaacttggagcgggtcaacttctggtcagctgtcaacgtggcggtgctgctgctggtggctgtgctgcaggtctgcacgctcaagcgcttcttccaggacaagcgcccggtgcccacgtagcccctgccat

SEQ ID NO: 193298 - DNA, 713 bp, Homo sapiens
  Payload ID: 18157
  Gene Name: transmembrane p24 trafficking protein 1
  ENST ID: ENST00000586835
  CDS Start-End: 1-197
aggaggtcgaaggatgggcagaggctgtggagcccgaggagatgctggatgttaaaatggaggacatcaaggtgtgtccaggctgcgctggggccactccttccagatctctaggattcacctggggtgccccccttgggctgacccagcctcccctccgtagttgtgccctccaactgaattatagagtccattgagaccatgcggacccggctggagcgcagcatccagatgctcacgctactgcgggccttcgaggcacgtgaccgcaacctgcaagagggcaacttggagcgggtcaacttctggtcagctgtcaacgtggcggtgctgctgctggtggctgtgctgcaggtctgcacgctcaagcgcttcttccaggacaagcgcccggtgcccacgtagcccctgccatggaaggaagaacgggacaaaggaggggcagcagggtgtgtgcatatgagacttgggggtccctccccaattttagtttcctgccaaaacgggagtgtgcagtcagggcctgcggtctggccccatgagtctccttccgtcctcagcgggcagggaacacctctggcttgtagaagggacggctcagtggctgcaccgacggtcctggaaatctcacatggtgggcactgcagcgttggaacgtgagcctcggatttcctggcccctctactgtaaatgtgccttagcctaagcctccc

SEQ ID NO: 193299 - DNA, 578 bp, Homo sapiens
  Payload ID: 18157
  Gene Name: transmembrane p24 trafficking protein 1
  ENST ID: ENST00000589638
  CDS Start-End: 5-578
ccggatgatggcggccggcgcggccctagccctggccttgtggctactaatgccaccagtggaggtgggaggggcggggcccccgccaatccaggacggtgagttcacgttcctgttgccggcggggaggaagcagtgtttctaccagtccgcgccggccaacgcaagcctcgagaccgaataccaggtgatcggaggtgctggactggacgtggacttcacgctggagagccctcagggcgtgctgttggtcagcgagtcccgcaaggctgatggggtacacaccaccatctccgagaagctggtgttctttgaactgatctttgacagcctccaggatgacgaggaggtcgaaggatgggcagaggctgtggagcccgaggagatgctggatgttaaaatggaggacatcaaggagtccattgagaccatgcggacccggctggagcgcagcatccagatgctcacgctactgcgggccttcgaggcacgtgaccgcaacctgcaagagggcaacttggagcgggtcaacttctggtcagctgtcaacgtggcggtgctgctgctggtggctgtgc

SEQ ID NO: 193300 - DNA, 616 bp, Homo sapiens
  Payload ID: 18157
  Gene Name: transmembrane p24 trafficking protein 1
  ENST ID: ENST00000588259
  CDS Start-End: 11-235
ggtgacccggatgatggcggccggcgcggccctagccctggccttgtggctactaatgccaccagtggaggtgggaggggcggggcccccgccaatccaggacggtgagttcacgttcctgttgccggcggggaggaagcagtgtttctaccagtccgcgccggccaacgcaagcctcgagaccgaataccagggtggagccaacggaggccggggactacaagctgtgctttgacaactccttcagcaccatctccgagaagctggtgttctttgaactgatctttgacagcctccaggatgacgaggaggtcgaaggatgggcagaggctgtggagcccgaggagatgctggatgttaaaatggaggacatcaaggagtccattgagaccatgcggacccggctggagcgcagcatccagatgctcacgctactgcgggccttcgaggcacgtgaccgcaacctgcaagagggcaacttggagcgggtcaacttctggtcagctgtcaacgtggcggtgctgctgctggtggctgtgctgcaggtctgcacgctcaagcgcttcttccaggacaagcgcccggtgcccacgtagcccctgccatggaaggaaga

SEQ ID NO: 193301 - DNA, 809 bp, Homo sapiens
  Payload ID: 18157
  Gene Name: transmembrane p24 trafficking protein 1
  ENST ID: ENST00000591695
  CDS Start-End: 128-685
actcctggcacctctggttacggacaacatacagaagccactgccaatgagctccgccgagtagcaccggggcagggctagcgcttaaaggagccgcgacccctttgcagaccagagggtgacccggatgatggcggccggcgcggccctagccctggccttgtggctactaatgccaccagtggaggtgggaggggcggggcccccgccaatccaggacggtgagttcacgttcctgttgccggcggggaggaagcagtgtttctaccagtccgcgccggccaacgcaagcctcgagaccgaataccaggtgatcggaggtgctggactggacgtggacttcacgctggagagccctcagggcgtgctgttggtcagcgagtcccgcaaggctgatggggtacacacgagtccattgagaccatgcggacccggctggagcgcagcatccagatgctcacgctactgcgggccttcgaggcacgtgaccgcaacctgcaagagggcaacttggagcgggtcaacttctggtcagctgtcaacgtggcggtgctgctgctggtggctgtgctgcaggtctgcacgctcaagcgcttcttccaggacaagcgcccggtgcccacgtagcccctgccatggaaggaagaacgggacaaaggaggggcagcagggtgtgtgcatatgagacttgggggtccctccccaattttagtttcctgccaaaacgggagtgtgcagtcagggcctgcggtctggccccatgagtctccttccgtcctcagcgggcagggaacacctctggcttgtag

SEQ ID NO: 193302 - DNA, 717 bp, Homo sapiens
  Payload ID: 18157
  Gene Name: transmembrane p24 trafficking protein 1
  ENST ID: ENST00000591157
  CDS Start-End: 59-346
gggcagggctagcgcttaaaggagccgcgacccctttgcagaccagagggtgacccggatgatggcggccggcgcggccctagccctggccttgtggctactaatgccaccagtggaggtgggaggggcggggcccccgccaatccaggacggtgagttcacgttcctgttgccggcggggaggaagcagtgtttctaccagtccgcgccggccaacgcaagcctcgagaccgaataccaggtgatcggaggtgctggactggacgtggacttcacgctggagagccctcagggcgtgctgttgggtggagccaacggaggccggggactacaagctgtgctttgacaactccttcagcaccatctccgagaagctggtgttctttgaactgatctttgacagcctccaggatgacgaggaggtcgaaggatgggcagaggctgtggagcccgaggagatgctggatgttaaaatggaggacatcaaggagtccattgagaccatgcggacccggctggagcgcagcatccagatgctcacgctactgcgggccttcgaggcacgtgaccgcaacctgcaagagggcaacttggagcgggtcaacttctggtcagctgtcaacgtggcggtgctgctgctggtggctgtgctgcaggtctgcacgctcaagcgcttcttccaggacaagcgcccggtgcccacgtagcccctgccat

SEQ ID NO: 193303 - DNA, 4127 bp, Homo sapiens
  Payload ID: 18158
  Gene Name: transmembrane p24 trafficking protein 10
  Uniprot ID: P49755
  ENST ID: ENST00000303575
  CDS Start-End: 53-712
ccccggttccggcgcggttgaggccttcggtggtgaacgagtctccagcaccatgtctggtttgtctggcccaccagcccggcgcggcccttttccgttagcgttgctgcttttgttcctgctcggccccagattggtccttgccatctccttccatctgcccattaactctcgcaagtgcctccgtgaggagattcacaaggacctgctagtgactggcgcgtacgagatctccgaccagtctgggggcgctggcggcctgcgcagccacctcaagatcacagattctgctggccatattctctactccaaagaggatgcaaccaaggggaaatttgcctttaccactgaagattatgacatgtttgaagtgtgttttgagagcaagggaacagggcggatacctgaccaactcgtgatcctagacatgaagcatggagtggaggcgaaaaattacgaagagattgcaaaagttgagaagctcaaaccattagaggtagagctgcgacgcctagaagacctttcagaatctattgttaatgattttgcctacatgaagaagagagaagaggagatgcgtgataccaacgagtcaacaaacactcgggtcctatacttcagcatcttttcaatgttctgtctcattggactagctacctggcaggtcttctacctgcgacgcttcttcaaggccaagaaattgattgagtaatgaatgaggcatattctcctcccaccttgtacctcagccagcagaacatcgctgggacgtgcctggcctaaggcatcctaccaacagcaccatcaaggcacgttggagctttcttgccagaactgatctcttttggtgtgggaggacatggggtaccacctacacccaacaagtcaatgagggacttctttttaatttggtaggattttgactggttttgcaacaataggtctattattagagtcacctatgacaaaaaataggggttacctagataatgccaaagtcagcatttgtcctgggttcccttgtgtgatctgtttggactatgttttcttttcttctcccacttgctcagcagcttgggcttccattctagttcttttaccaagatttttgtgtgaccatgttgacttcatttggattgccctctttcaatttccttgtgaaaacacccttaactttctctttacccttagctgaaatgtttacatagcttctggtgatatcttttcatgattttatatctcttaaaatggtgatggatgtgacacctcataaaagtgagctttgaactgtagataactcttaaagaaaatgtcattttagacaattaaaatatttgtgctcaactgcttgaacttttttcgtgtatgtgtatttaattctatgcaatattatcacatgtgtagattcatgtgaccaccatcacaagagacagaacagttctgtcacatggatcccttgcactgcccttttacagccgcagccacatccctttcttataccctcaccccaacctgtggctaccactgttctgtcctccatctctgtaattttgtcatttcaagaatgttgtatgaatggaatcatacagaatgtaatcttacgaggctgatcttttttcattcagcataattcccttgaaatccatccaagttgttgcatgtatgaatagtttcttcctttttttcttttaaaaatgttttatatatttagggggtataagtacagatttcttacatgcatatattgcatcgtggtgaagtgggggcagttccttttgattgctgagtagtattccatggtatggatgtaccacagtttgcttaaccattcacccactaaaggacataagagttgttttcagttttttgccctaataaagctgctgtgaacattcatgtacaggtttttatgtgaacatacattttcattttctgggataaatgctcaaaagggcaactgttgggttgtatggtaaacacatatatttttgtaagaaactaccctactctttttccagagtggctctactttttacatacagccactcatacaattcagacagcaatgtatgattgatccagtttcttcacatcctcaccagcatttggtattactactattttttatcttaaccattcacatagatgtgtgtaatgataccacatgtggttttaatttgcatttccaatggctaatgatgttgagtatctttttgtgtgctaatttgccatctatgtatcctcttcggtgaaatgtcttcatgtcttttgtctattttctatttaggtcatttgttctttttactattgagttttgagaggttttttatatatcctagataaaattcctctgttagatatgtggttgcttgaatttttaacataacttctaccaaggaaaaataagtaaaatttccaacccttgcatggccagtcacttacttaattcctgtccttcagtgttccatctagagaattaagagatatgatgtataaaatagacatcgagggccattaagagagtaaatacttaaaaatacatgttatgaaagcaaagccaataatcactgtaggagtatgagttgcctaagggccaaaactaatgtaaataagagaaagtgtggatataaatgaccattgtttataaacagttatgaaaaatgctgtgacttgaaatctttcccacatctcccaagaaagtaggtaggagtttatcctttccgtaatctctttttaaccctgctgactattacagggcttgtttaatcacagtggcaagaattacatgtatcttacagtaaagaaacagaatactggaatcgttagagaaccctgatgtgttgacctggataaagtacaaaggtggaagagggaatgagttatgctgttaaaatctcaggctattctgttaatgttcctgctactatgaacccaaactttttttttcccccttttgactccttgtgtcttcctctcctgtggcataaaagtagttctgtcgttaacttgtacaacattgccatctgctgttgagaattggtaggtactgcttctgagaacctggctgcagatccttagcataggcagcaaatgttgagaaagtctatctgtagtattacatatactaagttacagaggatgcatccaagtagagaaaataatatgtgggttaagatacatccttaaacttttttttttttggggggggggggacggagtcttgctgcaacgcccaggctggagtgcaatggcactatctcagctcgctgcaaccttcacctcctgggttcaagcaattctcctgcctcagcctcctgagtagctgggaatataggtgcacaccaccatgcctggctaatttttgtattttcagtagaagcagagtttcaccatattggccaggttggtctcgaactcctgacctcaagtgatctgcctgcctcagcctcccaaagtgctgggattacacgcgtgagccaccacacccagcctccatctttaaacttttaaatgtgaaatttctatcatgtaccgttagcctaacaagattttctttcctatttctgactggtgcctttcccctttttaggagcaacgaaagctactctcttagttatgttcttgtgatgtgacaaaatgtcaagaagataggagaagagaatattttatttcgttgatgcttttgttcccaagtgtgaccctaaacttaagctttgtaggagttgacattctttcatgtcccttccctttactcatgccgaaactatcaactgggacattttgtgcttttggtttaaaagttaattgatattatactttggttttatctaaaaagtaaatgtatttgcctttgacaaaagactgacacaagagcaaataagctttaaaatcgggtgttatgtgctttcctccatttttgagcatattatccaaaatggtctgtataatataaatgagaatgatgcagtttaagtaagccttgttataccattgtcatggacccctgtcataaagccatttcttggtttgtttgggaaagaggcatatgggatttatacagattcacttgtaaatgttggattggggatttttgtgtaaattttctcaaataaaggctagcagaaacc

SEQ ID NO: 193304 - DNA, 1161 bp, Homo sapiens
  Payload ID: 18158
  Gene Name: transmembrane p24 trafficking protein 10
  ENST ID: ENST00000555873
  CDS Start-End: 19-480
gaacgagtctccagcaccatgtctggtttgtctggcccaccagcccggcgcggcccttttccgttagcgttgctgcttttgttcctgctcggccccagattggtccttgccatctccttccatctgcccattaactctcgcaagtgcctccgtgaggagattcacaaggacctgctagtgactggcgcgtacgagatctccgaccagtctgggggcgctggcggcctgcgcagccacctcaagatcacagattctgctggccatattctctactccaaagaggatgcaaccaaggggaaatttgcctttaccactgaagattatgacatgtttgaagtgtgttttgagagcaagggaacagggcggatacctgaccaactcgtgatcctagacatgaagcatggagtggaggcgaaaaattacgaagagcatagtgtctcagaagaaaaggtgtggaaagataatacatcaagtttataagcatctttacctctggaaagcaatgtgggaattgaggaaccatgaagattgcaaaagttgagaagctcaaaccattagaggtagagctgcgacgcctagaagacctttcagaatctattgttaatgattttgcctacatgaagaagagagaagaggagatgcgtgataccaacgagtcaacaaacactcgggtcctatacttcagcatcttttcaatgttctgtctcattggactagctacctggcaggtcttctacctgcgacgcttcttcaaggccaagaaattgattgagtaatgaatgaggcatattctcctcccaccttgtacctcagccagcagaacatcgctgggacgtgcctggcctaaggcatcctaccaacagcaccatcaaggcacgttggagctttcttgccagaactgatctcttttggtgtgggaggacatggggtaccacctacacccaacaagtcaatgagggacttctttttaatttggtaggattttgactggttttgcaacaataggtctattattagagtcacctatgacaaaaaataggggttacctagataatgccaaagtcagcatttgtcctgggttcccttgtgtgatctgtttggactatgttttcttttcttctcccacttgctcagcagcttgggcttccattctagttcttt

SEQ ID NO: 193305 - DNA, 2560 bp, Homo sapiens
  Payload ID: 18159
  Gene Name: transmembrane p24 trafficking protein 2
  Uniprot ID: Q15363
  ENST ID: ENST00000262225
  CDS Start-End: 107-712
ggagcttaggcggcggtggctgagaaggcagcggggcggcggcggcggcggcggcggcggctgtggaggccgcagtccgggtcctggcttcggcctcagccccaccatggtgacgcttgctgaactgctggtgcttctggccgctctcctggccacggtctcgggctatttcgttagcatcgacgcccatgctgaagagtgcttctttgagcgggtcacctcgggcaccaagatgggcctcatcttcgaggtggcggagggcggcttcctggacatcgacgtggagattacaggaccagataacaaaggaatttacaaaggagacagagaatccagtgggaaatacacatttgctgctcacatggatggaacatacaaattttgttttagtaaccggatgtccaccatgactccaaaaatagtgatgttcaccattgatattggggaggctccaaaaggacaagatatggaaacagaagctcaccagaacaagctagaagaaatgatcaatgagctagcagtggcgatgacagctgtaaagcacgaacaggaatacatggaagtccgggagagaatacacagagccatcaacgacaacacaaacagcagagtggtcctttggtccttctttgaagctcttgttctagttgccatgacattgggacagatctactacctgaagagattttttgaagtccggagagttgtttaaaaagcctcttcctgatgatcccaactcagaattcactgtttaccaaacaccttggtcataataatgtcattagtttctccatttttattttctgaactgtacattcacaacttatgtttctttgagattaatagatattgggggaaaaacgcctttttaggaaaattatagtgaaaatttgacagttgattggcataatttcttgtttgaatgctgcctccattatataggtccttccaggaactcaaacactgtaagtgaaatatgggagtatagtttttattatttcttcttttccttttgttttcataatataatgcagtttgttcaggaaatcagcacaaagcctgatagtactttactaaaatgactgcattctttggattccttcagtctatggttcaagtcactaaagattcatttttgttgagtccttatgagaaacagcagtatgaatcttgacggtttctgcccgtcctaatggcagagctctctgacttgggtgtatgctgccaggctgggtactttcatactttgttttcttgttttgctttaaaactacgactcagcatacattttcccacatacatttttacattgtaccttaggactcagtcatctccacttaaattgatgacacaagcagctaataaccatttctgggtttctgcctaaccccctaattgtctgttaaagccaattctctgggtgtcccagtgagtggtggctttttttctttccacattggcacattcacttctcccactcttggcatgtaagaaataagcatttacataattggaaaaatctggatttctgatgccaaagggttaaagcttcttggatttcatttcattgatatacagccactattttatttttgatcagtggcctttgggccactgttcagggtactgaccatcagtgtcagcattagggttttggtttttgtttcttttgggtctttcttttttggcacatgtgaatcttgttttgtgtaaaatgaaattactttctcttgttctctgatgatgggtttaaaattaaaagagcatccggttttggtatggggatgatccaggattatgttgtgactgatacatattagttacttgtgcttttttttttttttttggatctttgcaagggcaaaactacaagtaacgagttttatataattaatttaaatttgttacaggttttcatgttcaggataaaccatacttccaccttgggtgagaacacttgcaacagtttattaatgaggtgactttcaccttaggacaactgttgcatgccaagttttttgtgtgtgtgaaacacttcaaaactgatttaaaagatgtaaatttaaaattggttgtatctaatatgccccaggttcggtaaataaacaattctttttaaaaacagtattctgtgttttatatattgacagctaatccacattttttacacaccaactttctgttcttatttgacatgagacatgttcatgttttctgagtatttatacctattacgtctgttactttttaattctataaacttgaggatagtgaatggtaccaagttttagtttctgcgtaggttttccagtgtggcttctctgatggatcagtgctaaaatcttaagtatttttctatttgggaaaaaagggttgaattattttcacttgcccacgtagtttatgaatgtgggaaatagcttcaaagacagattaaatgatttgcccaaggccacagaaaagagtgaaaggtggaaccggagactagatcaccacctgtagaaactgttcttcctctgtgaaactaacggcctgctggtaataaaagtagctaccattt

SEQ ID NO: 193306 - DNA, 603 bp, Homo sapiens
  Payload ID: 18159
  Gene Name: transmembrane p24 trafficking protein 2
  ENST ID: ENST00000438031
  CDS Start-End: 105-603
agcttaggcggcggtggctgagaaggcagcggggcggcggcggcggcggcggcggcggctgtggaggccgcagtccgggtcctggcttcggcctcagccccaccatggtgacgcttgctgaactgctggtgcttctggccgctctcctggccacggtctcgggctatttcgttagcatcgacgcccatgctgaagagtgcttctttgagcgggtcacctcgggcaccaagatgggcctcatcttcgaggtggcggagggcggcttcctggacatcgacgtggagattacaggaccagataacaaaggaatttacaaaggagacagagaatccagtgggaaatacacatttgctgctcacatggatggaacatacaaattttgttttagtaaccggatgtccaccatgactccaaaaatagtgatgttcaccattgatattggggaggctccaaaaggacaagatatggaaacagaaggtggtggagatacctgggatgctcaccagaacaagctagaagaaatgatcaatgagctagcagtggcgatgacagctgtaaagcacgaacaggaatacatggaagtccgggagagaatacacagag

SEQ ID NO: 193307 - DNA, 1975 bp, Homo sapiens
  Payload ID: 18159
  Gene Name: transmembrane p24 trafficking protein 2
  ENST ID: ENST00000509052
  CDS Start-End: 1261-1611
gattaattgggtctaaggagtttccatttgacagtgtactcagtagggctgggcacaagttacacaatacaagtgaaatccaaaaataaggggataacggaagggagagactcttacacttagctaagaatttagcgatcaactattacagtctcgaagttatgcaagtgacatgcactttgaaagagcgactgacttgatcacagcctaacagctgatttgtagcagactgggatgagagtttgggtcttctcatttccaggctagtcctttcccctaagccttcaggcatctcagataaagcagaattccttcactgtttggcagtaatctggaaaaccttgaaatgtgataaaaattcatcttgtttatattttaaaaaaccacaaacgtttattacctcatggtttctgtggccaggaattatggagaggcttagctgggtggttctggcttggagtatctcatgaggttgcaatcaagatgtcaaccagggatgcagaaattctttattttaaagagatttcttttttcttgagttttgctatcagtcacagttccatgtttgttggtgatattaggccagttagagaccacatttaaggtgagctttctgtttctgaggggtttaataaggataaataagacataaatgtcaggacctaaaggtgttttagaaagccatgaagtcaactcttattttataaagtgggagaattgcagcccaaaatggttattatcacttaccgaagtgaagctaagtgaaagttacatattcttggtgaatttcttttttttttttttttttggaccaagtctcgctctgtcgcccaggctggagtgcagtggcacgatctcgactcactgcaacctctgcctcccgggttcaagcgattttcctgcctcagcctcctgagtagctgggaatacaggcgtgcgccaccatgcccggctaatttcgtgtttttagtagagacggagttttaccatgttggccaggctggtcttgaactcctgacctcaagtgatctgcctgccttggcctcccaaagtgctgtgattacaggcgtgagccaccatgcccagccatattcttggtgaatttcttactgccattagacattacttataaagtctatgacttaatcttttgtgacattttatgcatttctctcttgcctccagattacaggaccagataacaaaggaatttacaaaggagacagagaatccagtgggaaatacacatttgctgctcacatggatggaacatacaaattttgttttagtaaccggatgtccaccatgactccaaaaatagtgatgttcaccattgatattggggaggctccaaaaggacaagatatggaaacagaagctcaccagaacaagctagaagaaatgatcaatgagctagcagtggcgatgacagctgtaaagcacgaacaggaatacatggaagtccgggagagaatacacagagccatcaacgacaacacaaacagcagagtggtcctttggtccttctttgaagctcttgttctagttgccatgacattgggacagatctactacctgaagagattttttgaagtccggagagttgtttaaaaagcctcttcctgatgatcccaactcagaattcactgtttaccaaacaccttggtcataataatgtcattagtttctccatttttattttctgaactgtacattcacaacttatgtttctttgagattaatagatattgggggaaaaacgcctttttaggaaaattatagtgaaaatttgacagttgattggcataatttcttgtttgaatgctgcctccattatataggtccttccaggaactcaaacactgtaagtgaaatatgggagtatagtttttattatttcttcttttccttttgttttcataatataatgcagtttgttcaggaaatcagcacaaagcctgatagtactttacta

SEQ ID NO: 193308 - DNA, 1475 bp, Homo sapiens
  Payload ID: 18160
  Gene Name: transmembrane p24 trafficking protein 3
  Uniprot ID: Q9Y3Q3
  ENST ID: ENST00000299705
  CDS Start-End: 189-842
aaggtgcccgggcccactttgagcgcgcggctgcgcactgagccgccggccctcccggaagcgcagagctccgctggtgccacgtctatccccttacatcctcctaggacccggtcggtagtcgtcgccccagcccgccgggggcgcagcgcccgagccgcggccctcgagacgggaccgagagcatcatgggcagcactgtcccgcgctccgcctccgtgctgcttctgctgctgctcctgcgccgggccgagcagccctgcggggccgagctcaccttcgagctgccggacaacgccaagcagtgcttccacgaggaggtggagcagggcgtgaagttctccctggattaccaggtcatcactggaggccactacgatgttgactgctatgtagaggacccccaggggaacaccatctacagagaaacgaagaagcagtacgacagcttcacgtaccgggctgaagtcaagggcgtttatcagttttgcttcagtaatgagttttccaccttctctcacaagaccgtctactttgactttcaagtgggcgatgagcctcccattctcccagacatggggaacagggtcacagctctcacccagatggagtccgcctgcgtgaccatccatgaggctctgaaaacggtgattgactcccagacgcattaccggctgcgggaggcccaggaccgggcccgagcagaagaccttaatagccgagtctcttactggtctgttggcgagacgattgccctgttcgtggtcagcttcagtcaggtgctactgttgaaaagcttcttcacagaaaaacgacccatcagcagggcagtccactcctagccccggcatcctgctctagggcccctcatgccccaggctggagcagctctcctaggtcacagcctgctgggctgggtcgcgtagcccagggtggaggcagaacgatgctgctgtggtagccctttgcctttcatgcccatgcttgattcttgcacctcagcagctgaaggtctcagagaccagtaatcagaaggcatccgactgcattaagtgtgcagcgctgaaaagacatttacaactaggccagggattagccactgtgggagggtggacaggcaatggttcagtggcctggctgttggcaggaactccaagtgcccaggcctcttgggcagcttagggccctgcctctgtttcatgatgcatgggtcatttgtcttgggtgtcctatcccatatggagaagaaaggggctctaagttctggctcttctttctttggggttctctgtacctgaggaaaccaggccctgggtgactttgcagatctgctcaccctcggtgagcaacagtgtcagccatgcaagcaggacagaatggtgactgggtgcccttggtgagctgtgtatttcctaggaggtagaaaactgtgggaaactgtggctaataaaaactaagtgtgagcgtcctggaga

SEQ ID NO: 193309 - DNA, 16555 bp, Homo sapiens
  Payload ID: 18160
  Gene Name: transmembrane p24 trafficking protein 3
  Uniprot ID: Q9Y3Q3
  ENST ID: ENST00000424155
  CDS Start-End: 106-627
gtctatccccttacatcctcctaggacccggtcggtagtcgtcgccccagcccgccgggggcgcagcgcccgagccgcggccctcgagacgggaccgagagcatcatgggcagcactgtcccgcgctccgcctccgtgctgcttctgctgctgctcctgcgccgggccgagcagccctgcggggccgagctcaccttcgagctgccggacaacgccaagcagtgcttccacgaggaggtggagcagggcgtgaagttctccctggattaccaggtcatcactggaggccactacgatgttgactgctatgtagaggacccccaggggaacaccatctacagagaaacgaagaagcagtacgacagcttcacgtaccgggctgaagtcaagggcgtttatcagttttgcttcagtaatgagttttccaccttctctcacaagaccgtctactttgactttcaagtgggcgatgagcctcccattctcccagacatggggaacagggtcacagctctcacccagagattcagaggagcttattggaaggaggtggacaagatggtcgactatatgcagccaggcggaacacctgccaccgagggactgggacgactggcaccctcctaacagattttcagcggggaggcactgagagtggatggagggaagacacagaagctacgctgaagtgggaggaagctgctgcacagagctaccatgcactgggactagctcctggtccccagtgactccaggggaacaggtgagttaaactggcaaggaacaacctgctctcaccacaggcctctggaatcccggcaggaggagactccttgaccaccacagacacttgagctggcagggagagttgcttggagaagtggtaggggcagcacttcagcctgggtggagcccagagggtttggtgtgggagcatttgcaataaagcatagccagggacagccatccctctaggctcgacttgctcccatggcagactttaaccctagggggactgttgaaactaaattcttcagggtggtcttgcctgtcagatgaggccagttcaataacctgagcaccccttggttttctggtctctcctggagccccagactggccgtgcctgcttgcagtgcagccttgggtagccctgggggcccgcatcacagctcctgtgctggcaaaccacaccatgtttgccagtgcagtagctgtgatgcgggcccccagggctacccaaagcagaaagctccagcacagcagcccctatggacatgcaccagcccagccacttccttcctctactgcagtttccgctgggcccatggccatcccccccaatcactgctggtgcacatgtgagcaggcagatcttgccttctctgccctgccagtgtgcatgtgtgcatgtgccctgccctgccactgctgctggcatgagtgaactcagcctcctcctccccacaccatgccatcattgcagtcaaagccttggcaggcacagagtccaccagcctcaccttcaccagtgccttgcccctgcactaacactgctgctggagtgaaactaggcagggagaacagtggacttaccacaccctgagcagccacccttgcctgcaaaaactcagacagagggtgcacgcagaccagcacctgccagtctcccgctcccatgctaacaccactaccagcgggacagcatgcgaagttgccattgggcgtgaggggcccaccttcccatgtcatgctgcctccactgctgctgccaatgcccacatggaggctggcacctgggcaccccctagcaccctgccatagccaatgagcatgcaccctgctgcgctgccactgccactaccactggcacatgtgaatgaggacagattccactgccactgccctacaaaatgctttggctggcaccacccattggagtgttgtgaccagcagtcagggagcaccttggctgcacccagcacagtgggttcctaaccttgaggagccagagaacgaagttgggcctgataccaatcccctagggttagggtatgcagtctaggagttggaagcctagctttggctccctgaaattttccagaaatgaagccagtcatttgaactcatcttataacacaagcaaaccctcaaggtcatcaaataggatacaagagaaaaaaaaaccatcccaaggacagcaacttcaaagactgaaggaacatcagtctgcaaacatgagaaagacccagagcaagaactctgaaaacacaaaaaactagagtaccttctttctccaaatgaccacactagctctccagccagggttctgaacccgcacatgtacccctaaacttaaaagatttttaaaaaagagattcagagaaggactgtagctgtggacccaagctcccttcaaagcactggcaggtcaatcgtttgcaacgcagacagctgtatgtagagctctgtgatccacccaattattggctcatcaaggagtgtgccacatgccagatgctctgcagaacccaacagaggggttgctcctccatggaaacaacaagaagctttgatcaaagagcctgtattgactccttcagtgaaattcttgactgaaataatcaccttcttaaaatacacacatggtgaggtttgaagaggggaaattgccatccaggtaagaaaccttggccttgtcccaatttagtagtgctgaaggtgtgttcatttgaacatagatcatgtgctaggtactgggaggatacaggaatgagcatgggaataaactttacatagctcttgttcaagcaggaactttacaatctagttagaataaagaattatctgtgagtcctggttggacagtgtgtatcccagcactatctaggggtaaggatgccttcataccaacctcgtcatgactgtgctaagtggcaggtctgatttggttatagaactggatacatcagacagttttaactttatgctattaaatatttgaacatatcactgtgcactatgatggatattaattgtttatggctgtctagcacctattccaccttctactgaaaatggcagccagcttttacttctcttctatgggatactgtctagggggaggtggggtatgtatttaattagatcttgcctttgtctagttgtgaaataggacacactaggctactgatacacccattccctgaatgttaatgatatggaaagaagcaaagggactgaaaatgtgggatgcctgcatttgttgctgtcagatatttgttatgtgctgtgctggggtttcctgcctttctttctctcctggaagcaacactacatccttcctataacttctctttcaattcaagatagccagtttcagattctgtgagtgcacacaaagagccctaatatataggttaagatccctgtgcactgaattcctcctaccaagcaaccttctacttacatgcatgttttcaatctttctattcccatgaacatggcacacaaaaaattctcaatgatttttgtggaacaaatgaatgagtaaaccacaagtacagaaaagtagtgatgtgtcaggatatgtgatgtagtcatggttgaaactatgaagaggacagaaagctgtaggtaagaggcaaaccgggggagaagctaaggtggaagtgtagctggagctgagttttgatggctaaatatggtttgaatggatggacagggaggttgaggtatggagataagaatgaggatggtatagctaaaaagaaggcagttttagcgtggttggagatgtaggtgacctccttggaacagtcacctgaatttcataaataattattgagaaggtattgtgtgcttgtaatgtgcctagaggggcacttgggttcagagatgagtaagacccgatcaaattggggtgggatgggggaattaacctggagcatgcagataattatagctcaaggcataatgcagtgagcactccaagacgggtacaaaccagcacccttaggtcctcaaggggtttggatcttgagcatgtctaatctgtgataaaatgcagagctttccagcaaggttaagaaaagacagtcacaaattttaacaatgggcctgtgttcagcgaccataggttgaatctttgaggttgtccatgtcaagataaggaataaacagtgatgctgtgttgggttcctcatgcagatgtgggaaacccagtgaggtgtcaggataagtttcacatgggggaaagccctacaggcctccagggtgaggggccctgccaagtaggacagagtgggaaagcacagggtgctcatggggaaccaagagttgctgttagtctggaatagggacaggcacacccagagactgataggcacctactgaaaggtcgtgactccagggctgaggggtcctgcatttaacaatgtcagccacagggagccacaggtcagtggctggatgagaccatatgtcatttctaataagtcaataaatgtgccttctcaatatcctccaaagcacgaaggagctacagattacccaacttgggccttttaatcttatttgcaatttcttgatcgtatctgttaatctgatatcaggagggtattattatttttctgccaagggtggctgaattcttttgaagttgcagaccaaaatcggtagtagttgcggtaaaacctttgcactgtggacctagttttgggaaattacgtgatgaatttggatgagggctctacttgattggattgtgaacagaggcaacttacagagggtgcattcaggccaggttccttagggctggctggatctttccctctacatcactctaggggctcacgtctgagtgtgtcaaagccataacaaaagcagcactcccagaaaaggtcaagaagcatgaaacagaaattttaattacaggcctgtatgctgagaacatagagacctggagatagctcaggggtttaacaaacaaaattcccatggtgtggcaggaaaacttatttgtgtgtgtttagtaaggcaatacttttaaaaaattatagaaaaaatcatcaactattactttcccttctgctccataccttccaattcttgttcatatgccaaggtagatattttctttgttgcaatggtaatacacagtatatgattcctttgaagtttttgttcacatagcgtatcttaaatttgtttctctttcagatattaatttcattttagtggtcgaggaacacatcatcttagtgaatatagcatacttttcaaaattcttttcttaacaccggaaacttgtttctatcatagccaaagctgccacagacaccactatggacagctttcagaaaatgtctctcttggcttcctattctgcctttttataaatcagtcttaaagttatcagttcagccctgaattggcagctggtatggaaatttcttgcctggcacatctggaaaggaggggcttgtttgtgatcgaacagatttcttggccaaaaatattggccagccaggatccactgcccattatgagaaattcctagcttgccagcaatgtgatctctttccaggggtcgtaagtctcatcttaccaggacagaaccacttcattaataatggcaatccagtctgatggggccattttcttcagcttcatggtagtgtagagatcttcaaacatcttgtggagtttgatctcttcaaggcaaatacagggctgagggggaaactcattatgcaaataatctgagctattgaagggcgttagaatagcaaacgggaaaagtgagactaaatctaacaatcgacccctgaatctgagtgccacaaattcacagcagtcagcgaggcaggccgagatcatggtggctggctgaggaacaccgtggttctaccttcttagcttgcaagaatacccagtctctaggaccattgactcccaatcagcatatggtaaaagaggccattagtgtccattgtgacctctgctcctcctctcagcatcctcactacatccatttggacacaggggaggccttgacaccagctgacaatgagccctttcctcagggctctggaaaatctctaccttcccagggatttgtgaagttttcttttaggcagacagctgccaggcgtcacatgtgcaacacaggtaccgtgagctcacctgactttgtccacccacagagagggccagcaggctccaacacaagcaggtactctgtccaagttcacttcttggcaggaggctgctttcatcttctctgcccactcagacatagggatttgagttgcaaatattgccaggttcacatagttcaattacacctccttaacaatcacaagaatgtagaatacacagtttaggaagctgttaatgtaagcatctgtctattaaattgcagatagttccaggcatcactgcaggatgagtcttattaaccaaggttaataatcctttctaatcagcacagtatttctccactagcggtgggcttagaaatcatctatggcacttgtaaaatatgtggatcccgaagacgggcttctcctccaaagctgcaggtcttcctgctgaaatggcttgttagtgtctgactttgtgtggtaaatggtacctgaaagggcttcctccttcattaattggagatctcctccctggccatctcctgtgtcttccatcagcttccctgcatcctttttatgaggctgcagcagctgtggttagaaatcatctgtttgctgctgcagaaccagagtttctctgttttactgtttgatcccctctgcagtgtgggctcttcgctcttccatctttaaaagtatggagcaaacgcacacagcagggccaaagggaaagcagccaggcttagagccatcaagaggcctgaccatcaggctatttggtttaatgctgtggattaaaagttggttcctggtagatacaaaagcacatgttggaaatgcctgcagagacttgaaaaatagctgcttcttaaggattttgaacacgggcttggccgtgctgttgacactgtttatctgcactttccatgaagccacgattttacgaagcgaagataaactttggtccagttacggaattatcatacattctaaatgagtgtcatccaagttaatgacaagtaaaactgtaatgcggagtgcaaatgcaaggactgggaaaaggtagaattaatcacgtgattctccttggagataaaggatgggaaggctgtcagttgtttatgggaatcccagcagaaagccccactcctttgatcacacacagctgcatttaaggcagaaatgtggaattgcagactagagagaaatttaaagatcatcttgcccagatcttccatttataggtaaaaaaatgaaatcagagaggtgaaatgtttgttcaaagtcacagagcaaagctattaagagctaaaaatagaagttatttaagtaagatgtttaggtgtaaactgtcttttaaaaacaccgctgtgaagattgatttagtggcattagcatggtttcgcagtcccctgcacccactctgcctatccacaaactccatagaaatgatataaaataatgttttgtaagctattcacccttggaaaccacattgggtactctcagtgttgaatctgtgatgggtccttgaaagatgacagcagaaagccaccaaggaaagccctaagatagcagagggaaggacagctggggacaccataagtgaacaatttgggacagagaaatggggataacattgaggatgctctttgtcaaaaggtggcaaaagctgggggcaggagggagcccgagattagcagcaggaatgctgttttcctccagccggaagagtgggtatagatgcttggactggaaaggacaggcagggccctgggagaaaaggggacactaatgcccagatggacagctgccctaggagcccagccagctggcctcactccatgagcgcagtgcattctgcaggggtgattccttcatcttctcccagcccagcaggagatccactaactgagtcttggctaagaaaacgagcctgcaattaaaggcagcaaacatttgcagagagcaaaccccatgtaaatgagtcaattcatccaaacaaaggaagagtttaattctaaaggaacacatcgaccctactgggacttcagatataatgtgatgggtgttggttcatgcctcggccataggctacccttcttagctattgtggggatggggagcggtggcatggtgagagggcaagacctcgcaggaaaagggatagcagggaagctgggaggcagagtatttcctgccccgggattattctcagactgagctgataaggtgggaactaactaatcaggggagccctggaatagtttctggtgtcctggaactctcagaagcctcatgactcaagatagtctccactgatatttaaactgaagtggaccaccaccagtgtcagatggtgccagacttcaagtgggatctgaatgggcttggactttgcagttgctgcctgtgactgtccactggccagctgcgtgggtgtcccccagcatgccctctagagataccaggtttctttttctatctagaaatgactgcaagtggaagctggtaacatgtaaccctttatgaagaggggactttgctgtctatgtgcaacagcttcatgtcctctctccctcccccagacagcacatagttaggacagaagaaagatattttataactaagaagatcttggaaatgaaaacatgaatgctaaaataaaatgttcaataaacgagctgaatagaatgactagaatcaaagagtaaattaataaaatatatgactgaactgaggcattctctcaaatcatggtttaagagagaaaaaatacatagcataaagggaatgttcggagacatgcaggatgaatccaaaggcccccaaatctacttaataacaattttagaagaagagaatagaaagaatggtggtgagaagaatacaagatctgagaaaaaaaagcttaattgtctacaaccatagaaaagattgaacaggcctactgtttaccaactagggtgaattaaaaaacaaaccaacaaacaacacctgaacaaattgtagtgaaattttaaaacatcaaagacaaagaaaattctttaaaattccagagaataaagatagactattatgtatgaatgaaaatcaaatttgtctcagtaacactaggtggaagaagacaatgaggaaaaatctttaagatgctgagggagggaagaagaaaacttttgatgcttgaatgttatatccattagattatcattctacagggagaacttaatatacacatttttaataaggactcaggtaatttgcctacatcattaggcaatgtgggtgttttatcgagcagtgattctcagactaactgatgtgaaataccagtattttaaaaaatgtccaatttactcaaatcaatacttttatacagtaaaataagaataaatttttggaaaaataattacaggaattacaaattatcgcaaaagtaattcagctgtaggcttgggggaaacttggtggtccctctagagataccaggcttcttttttatctagaaatgactgcaagtggaagctggtaatatgtgggcactttgtaaattcatattgagtaaatgaatgaaattgtgacttcctgagaattgaaacttggtttcctaaccctaattgatatgaggcgaattgctctatggtggtgtacaaactcacctgaaaaggacttttatagacaaatcttcatgacctgttcttgccccagttcatcacctcttttacaccaaaaggcctacagggtgtggtcactgtttcttttgggtcattttggggtggaaatggtggatgtaatgaagccaataattcaggacttaattcctttcatgttgtggttttttgctcttgcactagagtacgaaatagcttccaggagctccagctctaagcttgaaagagtctgtatgattgtaatcacatggtgacgatactcagaatctacattggacttctgttgtattctcatcactcagtttatcttttagcagtttaataggtacacttcagggtcttccattttgtgtggaattaaatcctcctcttcaaatgctgtaaataacatcagttaaaataaaacttgaataaaatattggaaaaaagtaatgcagtaaaaaaattacagtaacaaaatagacacacaaaaatataagccagcattgtttattattaaattcaacatacataaaattactctgtcaaagtgctatgaaagtttctgaatacttaccctgatttgtgaatttctgctattgtgggcaggtagcagtttgtgggtcagcaccagcctaggatgatgatagtgacctccttatggagggcacagtgacctgcctgaagatctatccagagtgagcagcaaaggaaggacttgatctcaggtcttctccctccaggtccaggaggtttttgatcctcctgcatctttgccactgcacctacctgaaacctgtctctctcccttcagccacagcaggaaggtgtccctgaggtgggcagtagatctctctagacacagcagtcaagctccaattgaacacctcttggatttgaatgaagttctagggtaaagggatgaagaggtcatgccacctccccctactcttagaaatggtctccaaaggggcaaaagcagttcagaatccatctttgatgaaacatggagtaagtgaatgagggaggggcttccaaaggcagtgaaagccatatgaatgctaggggtaaaggaagacaccagaggggacacctgcccacctgcctgtacaaatcccaggcaaagcgagcacttctccagggaaggcaacatatcctcaggccaaaacccggaaatgccttgtttagaggaaagggaaaagggtgggtcgcctggtggtgggaacttgcctgaagctagtttgacgtggagagaaatagtgggagtttgagtggatggagacacattgtatatgcagtcagcagcctgttgtcaaggtggggtaaggagagagactgcactatgagcagccggcaggagctggcctctgcaaaggaaaggaactaagtgaatgctgaaacagcccccatccccagtgtctcacctcatatgaccttgtgaacagagagggggtctgccaacctccagtgaggccccagccctcatccccaaaccttcagtgaataacttttctcaaggagtaagttcttatttgttcacagtcaggaggcaccactgtaaaacatcccttctgagttaaaggcttcagatatgcaggccaggcgtggtggctcacgcctgtaatcccagcactttgggaggccgaggtaggtggatcacctgagttgggagttcgagaccaacctggccaacgtggtgaaaccccgtctctactaaaaatacaaaaaattaggcgtggtgatgggcacctgtaatcccagctactagggaggttgaggcaggagaatcacttgaacccgggaggtggaggttgcagtgagtcaagattaagccactgcactctagcctgggcaacgagagtgaaactctgtctccaaaaaaaaaaaaaagggtttcagatatgcagagacaatatcactcagaaatgaataacaagatcagaaagagaggaatggaaaagaaaaaaaaacaaatggcaaatgaagaacattcactggaaaaatgttgccacaaaattgtgccaagtagatgccacagttcaaaaagtgtaatgaagctgccacttgtatataactaaagcttaaagggcagataagagagaaggtgagggaagtttggccagaccacagaagaaggtaaaacatgggcaggtagaacaagaggaaataaaaccattgcagaactgaagtctcagttggaggagagtgtatattggtgtaacctcaagggaaggtaaaatttcaatattgacaaattaaaatttcatatgccctttgattcagcagttccacttttaaggatttatcctacaggcatttccttgcaaatgtgtgaaataatatgttcaagtctgttaattgtattgacatttataacagcaaaacttttgaaatgacctatatattcccttatagagactcattaaataaattatggttatctctacaatggagtattatgcaaccataaaacataagataactgcatgtgactctatatgtatctcaaaataaaaagcttaattaaaaaataataaggcagccttataaatactgttagagtaatctctaaaatattatgttgatggtgaaacaaattaacatgtaagataatgtgtatagaatgttagcattgtataaaaaaataacagactatgctgaccttcttttatttccttagtctatctctggagggacatataagaaactggtaaagcagttgtctctggacaaggaaactagctggtttcttttgagtgttgtaacattttataccattgtattattacctattcaaaacaataaattaaacaatttatttaacaataaccgacactcctatggctcctctatggcccaccctcttcagtgtccccacaccatcctgcactccctggtcaccctgagttataaggactttcttggcatctgcctttcccagtggacagtgagacttttgagggcagggactatgtgtcactcatctcagaatggtataaacattcaacacgtaggttctagaattaggctgcctgggctgaaatccctgctccagctcttcttatctttgtaaccttagggaaataactaaacctttcattgcctcaatttttcatccataaagtgggaataatggcatgacctgccttataggatttttgtaaggattaagtaagataagtctcagaacacatacctggcatgtaacaaattctagataattgttagcttctgttgacatctctgcattcagatgcagctaacagagggcctgacatattggtagcactggtgttttcacagaatgaataaaatgcatgccaccctgtgatctggtgctaacagagctatctttcttctgcttagctggtagataattttggatgattcaagctgtctaccaacctaacatccctgacatcatgaaggaggtggttatttcagtggaaacctggaggcatgcccatcaatgccgaccctaaaaatatttttgtttatctcagtgatccagataactccatggaaataatgggactctcagaatgaggcttagttaccagacattcagatagagagaccaggctttatctgatcacaaaatagcacctgaagcaccagcaatcccttaagtacccttttcgattgagtttcctttcgttgaactttccttttcaggcaatattatttaggtatgctgaattgagatctaattctttttgaagttcagtctagtggagaaaatgttagaacagcattagagaactcccactctctgaacgacgtggtgaagtcatttcattcacagcactgtggctttcttctcccatctgtcaagtcatgataaaataacaaataaaccaaatccctgctgcagcgtgaggatattataaggttaatgttaagcttgggctgggaagtgcccagataaaattgcatgaaagtacagagatgattctataaacatgtgctgagcacctattatgtgctgggtcttgcatttagttgtggggacttgaaaatgaaagagattcatgctcggtaatttttacaagaacatcgaactcacttggcaaatatttactgagcccctactgtatttcaggcactgttttagtgcttgggatatatcagcgacccaaatccacaaaaattcattcttttgctttccaagtcacttggatgttattggatgcttgggtgctgtggagaagaaatagaaggaaggcctagatacttcttcccaggatgcaagtttcaacactcatgtttcaacaaaaacaatgacatctataaattatataagcattagtgtgcaattattgtcgtaaaaaggaggagtcatggttcttcttttgtttgtttgtgtttttttttttatttttttgagacagagtctcactctatcgtccaggttagagtgcaggggcaccatcttggctcactgcagcctctgcctctcaggttcaagctattcccctacctccgtcccccaagtagctgggactatagtcatgcgccaacacgcccgactaatttttgtatttttattagagatggggtttcaccatgttggccaggctggtcttgaactcctgacttcaggtgatctgcccacctgtcaaggtgctgggattacaggcctgagccaccgtgccaggcccatggttcttctttaacaatgtatataactgtcatcccatttgaacactgcaagttaataggtgactgtaagttaaatggtaatgcccaaaatatattgatttccccacttacccctgtaccaggacagcatgtctcattcctccctcacctcacatgatgaaattagaatctcaaaccatggacaaagctcctttcccctctccactgtttcctcctttatctctcattcatggcagctcaaccaacaagcctcactcgtttggaggtaaaaattggcagccaggatgactggggactcttccccagacatccaggaatccttgagcattggagtggcaaaggtctctaggaaacatatggtgtagcctcttcattcgacagctgaggaaacagaagtccagagactgcagtgccttggccaaggtaccagagccagacacgagagagccgggcctggaacccaagcctcctgcctccttggtcagtacaccacactttagcccctgtgttgtacaataggccctgtatcctgcagaggagagggaagcatcaggaagctcttgtggcctggtgagttctgtttcatcatggctggacactcggagctggatctcaacgcagctgtcctgtctgggacttccagggcatgatcatttccaagagtcaaaagccaatctctcatgcaccagtcaggactctgggttgccaacatcagacactgactctggcgtgcttggagagtgaaggaatctactgaacggatatcaggagctgacagaatcagtggtggggccagagaatcagtatcggaaaatatgcatgcaggaactgaaggaaactgggggagttggggggctggaatcactgccaaggtcgtgccacaggaagaggctgtttaggctctgttgctcccactactggactcagaccattgtaccctggatgccactaccactaggggtgggacgattttcagactgtcaccagattctttcacatcgtccctggcttcagattcacagcctcaggcaaaagcattgggttggccaagctcgggccacttgcccgtgcccatgctgtcaaggttcaggagaagagaggctcttgaaatttcactatggcagcttccattgaaatagggagagaatttggaatctgggcagccaaataacaaaaaacgaatatcctctgcatctgccaaacaggccaccacagcagcctctgcttggaaaggccatttgcaaagcaggagagtagaattcagtggagcatggattaactcaagctgtagtatgctcagcctggctccctgggaccagccttctgaaggggaccatgggtactgctatactcaccttcgtctagagaggcccctagtctccagcctgactcaaggaagctcctagacagcatagagatgctctgaactccaggccgtattttaggaaatttaggaagtaaccctttgtgagcactgggctgcattcagaagaactcagttctagtttcagattcatttataattcacagcatcacttagaagtttataattcctaccatttgtcccagcaatccattattgggtatagacccaaaggcaaataaatagttctaccataaagacacatgcacacgtatgttcattgcagcactattcacaatagcaaagacatgaaatcaacctaaatgcccatcaatagtagactggataaaaaaatgtggtacatatgcaccatggaatactatgcagccatgaaaaaacaagatcatgtcctttgcagggacatggatggagctgaaggccattatccttagcaaactaatgtgggaacagaaaaccaaataatgcatgttctcacttataaatgggagctaaatgatgagaactcatggacacgaagaagggaacaatggaggctggggcctactggagggtggaggatgggaggaggtagaggatcaggaaaaataatgagtactaggcctaatacctggatgacaaaataatctgtacaacaaaccctcatgacacgagtttacctatataacaaacctgcatatgtacccctgaacctaaaataaaagttaaaaaatcag

SEQ ID NO: 193310 - DNA, 1483 bp, Homo sapiens
  Payload ID: 18160
  Gene Name: transmembrane p24 trafficking protein 3
  ENST ID: ENST00000543455
  CDS Start-End: 92-532
atcctcctaggacccggtcggtagtcgtcgccccagcccgccgggggcgcagcgcccgagccgcggccctcgagacgggaccgagagcatcatgggcagcactgtcccgcgctccgcctccgtgctgcttctgctgctgctcctgcgccgggccgagcagccctgcggggccgagctcaccttcgagctgccggacaacgccaagcagtgcttccacgaggaggtggagcagggcgtgaagttctccctggattaccaggtcatcactggaggccactacgatgttgactgctatgtagaggacccccaggggaacaccatctacagagaaacgaagaagcagtacgacagcttcacgtaccgggctgaagtcaagggcgtttatcagttttgcttcagtaatgagttttccaccttctctcacaagaccgtctactttgactttcaagtgggcgatgagcctcccattctcccagacatggggaacagggtcacagctctcacccagggcttcagggtcttctgcctgtagctgccaaaggaagagagaatgagaaaagcccatctacttcttaaaagcccaggcccagtgggaatacgtatcacctgctcatgtcccatggatggagtccgcctgcgtgaccatccatgaggctctgaaaacggtgattgactcccagacgcattaccggctgcgggaggcccaggaccgggcccgagcagaagaccttaatagccgagtctcttactggtctgttggcgagacgattgccctgttcgtggtcagcttcagtcaggtgctactgttgaaaagcttcttcacagaaaaacgacccatcagcagggcagtccactcctagccccggcatcctgctctagggcccctcatgccccaggctggagcagctctcctaggtcacagcctgctgggctgggtcgcgtagcccagggtggaggcagaacgatgctgctgtggtagccctttgcctttcatgcccatgcttgattcttgcacctcagcagctgaaggtctcagagaccagtaatcagaaggcatccgactgcattaagtgtgcagcgctgaaaagacatttacaactaggccagggattagccactgtgggagggtggacaggcaatggttcagtggcctggctgttggcaggaactccaagtgcccaggcctcttgggcagcttagggccctgcctctgtttcatgatgcatgggtcatttgtcttgggtgtcctatcccatatggagaagaaaggggctctaagttctggctcttctttctttggggttctctgtacctgaggaaaccaggccctgggtgactttgcagatctgctcaccctcggtgagcaacagtgtcagccatgcaagcaggacagaatggtgactgggtgcccttggtgagctgtgtatttcctaggaggtagaaaactgtgggaaactgtggctaataaaaactaagtgtgagc

SEQ ID NO: 193311 - DNA, 2265 bp, Homo sapiens
  Payload ID: 18160
  Gene Name: transmembrane p24 trafficking protein 3
  ENST ID: ENST00000536821
  CDS Start-End: 95-562
tacatcctcctaggacccggtcggtagtcgtcgccccagcccgccgggggcgcagcgcccgagccgcggccctcgagacgggaccgagagcatcatgggcagcactgtcccgcgctccgcctccgtgctgcttctgctgctgctcctgcgccgggccgagcagccctgcggggccgagctcaccttcgagctgccggacaacgccaagcagtgcttccacgaggaggtggagcagggcgtgaagttctccctggattaccaggtcatcactggaggccactacgatgttgactgctatgtagaggacccccaggggaacaccatctacagagaaacgaagaagcagtacgacagcttcacgtaccgggctgaagtcaagggcgtttatcagttttgcttcagtaatgagttttccaccttctctcacaagaccgtctactttgactttcaagtgggcgatgagcctcccattctcccagacatggggaacagggtcacagctctcacccagggtcccagtgcttcaccaacaccaacgccaccactaagggttccagtgtgatcaccatctgggatctacctgttccaactgcttgtttacctcctgtgcatgctccacgggacatggctctttgcctgtagatcgccaggtacccacagctttactgccatggtgcacttcacttcctgccttgtccactctcacctgcaccagttattgcttacgtggtaatcagtatagtcattgatcttcagggaccatccagctacccgatttccaatgtggctgcctttgctatcttgttttggaaaatgtcttaaggctgttgaagattatatctatttgatcctttgtgcccttagatggagaaaagaaatgtattgagtagaagctctgaaagtttggaaggtccctcacaccatcctcaggttcagagtttcactagatgaagtcacagaactcagcaagccaatttacccatggttacagtttgttagagcagaagaatacatttgaaaatcaacaataagaaaaggtacaaaaggtaaagtctaggagagaccaggaatggagcttcccacttgtcgctccccagtgaagtcatacagactgcacttatctctccccgcaacgatgtgtgacaatatgcctagggtattgccaactagggaagttcacttgagtctcagtgtccagagattttattgaggaatcagtcacatagatatggctagccaccatacgactgactttgatctctagcccctccagagataaagctgatgttgtgttgtccaaggacctcaccataaatcttatggttagtacagactatctggcatggcccaaggtcctaggtttataaagacacttttgaaagccaggacattccaagggcttaaatgttaccttccagaaactgggggtaaagagccaaaactttctttgggttaatcctttactgcataagctctaagaccccaataattcatggccctatttctggggcatgattcagcccagagaagagatcggagaaacctacctcccatcatcaaagagctcctggatgttccatcaagcaaaactgtgggaggaaattcagtgttcctatggagatggtggtgtgacctgagctggctcagaggttctaaaagcttcttctcaaacattggcaaggtcacaggtacccaataaggtacatcttccctttccttcaacagtccaaaacctccagaactctctcgaggcagtgattaatactaaacaaaggacttgaaggataggagggattctgaacagggtagaaataaatagtagtgtgggatattcgtatagttttcttggaagaggtaatatttgagtaggatcttgaaaaatgagtagacgtgtaaatgccacaagtaaaggcaaagatatatacatcattgtcggaataggaaagagtgtggcacatctgggaatgatgaggggccttatgcagctgggggagtctattggtcagacatgaggctggaaatggtgcaagggctagatagggaagggcttcatatgcgatgccaagaggcacagactatgctgtgattccctggcagtatagctggtgggacaaagagaaatcaaactcaaaaagttcccctcttgtctaccatgtgtatactcaagtaggtgatgagattgtaggaagaaggtaggatataatagcagataattgggtagccatatagaaaaatcaaataaaatttgacctttaccttataaaa

SEQ ID NO: 193312 - DNA, 2203 bp, Homo sapiens
  Payload ID: 18161
  Gene Name: transmembrane p24 trafficking protein 4
  ENST ID: ENST00000289577
  CDS Start-End: 82-618
ctaactctcagggtcgctagggtggcgcgcaggcgcagagcgatgcgcaaatgtgcgcaggcgcttaggggctgaggcgcgatggcaggtgtcggggctgggcctctgcgggcgatggggcggcaggccctgctgcttctcgcgctgtgcgccacaggcgcccaggggctctacttccacatcggcgagaccgagaagcgctgtttcatcgaggaaatccccgacgagaccatggtcatcggcaactatcgtacccagatgtgggataagcagaaggaggtcttcctgccctcgacccctggcctgggcatgcacgtggaagtgaaggaccccgacggcaaggtggtgctgtcccggcagtacggctcggagggccgcttcacgttcacctcccacacgcccggtgaccatcaaatctgtctgcactccaattctaccaggatggctctcttcgctggtggcaaactgtatcgtgaagagcgcttccgactgacgagcgagagcaccaaccagagggtcctatggtggtccattgctcagactgtcatcctcatcctcactggcatctggcagatgcgtcacctcaagagcttctttgaggccaagaagctggtgtagtgccctctttgtatgacccttcctttttacctcatttatttggtactttccccacacagtcctttatccacctggatttttagggaaaaaaatgaaaaagaataagtcacattggttccatggccacaaaccattcagatcagccacttgctgaccctggttcttaaggacacatgacattagtccaatctttcaaaatcttgtcttagggcttgtgaggaatcagaactaacccaggactcagtcctgcttcttttgcctcgagtgattttcctctgtttttcactaaataagcaaatgaaaactctctccattaccttctgctttctctttgtccacttacgcagtaggtgactggcatgtgccacagagcaggccctgcctcactgtctgctggtcagttctgggttcacttaatggctttgtgaatgtaaataaggggcaggtcttggccctagaggattgagatgtttttctaaatcttagaactatttttggataaattatatattttccttcctagtagaagtgttactgcctgtaactagctcaaaataccaatgcagtttctgcattctgggttttgtttttccttttttttttttttttttttttttgagttttgctcttgtcgcccaggctggagtgcaatggcgtgatctcagctcactggcaacatctgcctcccgggttcaaatgattctcctgcctcagtctcctgagtagctgggattacaggtgcccgccaccacgctcagctaatttttgtatttttagtagagatggggttttaccatgttggccaggctggtcttagactcctgacctcagttgatccacctgcctcagcctctgcattcagtttattcacatatttttggtaactcccatggcagctcctaggatttcagcggtctgtgggccagaaagcaggcaccagggctgacctcaaggccgtatcagagggccaagcagagttcttttggatacctgcttttcatcccacagggccttagagtcagaggtaaggtagcaacagagctagaatggggcaatgcactcttaccctccttctcaacttttatttaagctgtgctaaatgttttcttcaagggaaccagatttagttctttacagaattttccagtgaaataaaacatgttgtaatagctgtgtttgagatgaaataagaggttgtgggtagaggggaggcacctaaaggaaaagaggaaaggtgcctgggctacctatgcagataacctggagtggacttcactgtggactcgtggtactaaggcttggcctggacaggcagtctagggggtatgggaatacacggtgtggttgttcaactatttgcaaaggtcaaccaaatagaccacatgttcgcaaagtatcatctgaggaaattaagtaccttcttagccctctcagtcataaatttgaacaaattttaatacacttccctcatgcccttctatataaaacttaataccattagttccccattcttgacattttatttcagtttttattatatatttatttgaaatatttattaaattatctgacctacagaactaaa

SEQ ID NO: 193313 - DNA, 2322 bp, Homo sapiens
  Payload ID: 18161
  Gene Name: transmembrane p24 trafficking protein 4
  Uniprot ID: Q7Z7H5
  ENST ID: ENST00000457408
  CDS Start-End: 54-737
gcaggcgcagagcgatgcgcaaatgtgcgcaggcgcttaggggctgaggcgcgatggcaggtgtcggggctgggcctctgcgggcgatggggcggcaggccctgctgcttctcgcgctgtgcgccacaggcgcccaggggctctacttccacatcggcgagaccgagaagcgctgtttcatcgaggaaatccccgacgagaccatggtcatcggcaactatcgtacccagatgtgggataagcagaaggaggtcttcctgccctcgacccctggcctgggcatgcacgtggaagtgaaggaccccgacggcaaggtggtgctgtcccggcagtacggctcggagggccgcttcacgttcacctcccacacgcccggtgaccatcaaatctgtctgcactccaattctaccaggatggctctcttcgctggtggcaaactgcgggtgcatctcgacatccaggttggggagcatgccaacaactaccctgagattgctgcaaaagataagctgacggagctacagctccgcgcccgccagttgcttgatcaggtggaacagattcagaaggagcaggattaccaaaggtatcgtgaagagcgcttccgactgacgagcgagagcaccaaccagagggtcctatggtggtccattgctcagactgtcatcctcatcctcactggcatctggcagatgcgtcacctcaagagcttctttgaggccaagaagctggtgtagtgccctctttgtatgacccttcctttttacctcatttatttggtactttccccacacagtcctttatccacctggatttttagggaaaaaaatgaaaaagaataagtcacattggttccatggccacaaaccattcagatcagccacttgctgaccctggttcttaaggacacatgacattagtccaatctttcaaaatcttgtcttagggcttgtgaggaatcagaactaacccaggactcagtcctgcttcttttgcctcgagtgattttcctctgtttttcactaaataagcaaatgaaaactctctccattaccttctgctttctctttgtccacttacgcagtaggtgactggcatgtgccacagagcaggccctgcctcactgtctgctggtcagttctgggttcacttaatggctttgtgaatgtaaataaggggcaggtcttggccctagaggattgagatgtttttctaaatcttagaactatttttggataaattatatattttccttcctagtagaagtgttactgcctgtaactagctcaaaataccaatgcagtttctgcattctgggttttgtttttccttttttttttttttttttttttttgagttttgctcttgtcgcccaggctggagtgcaatggcgtgatctcagctcactggcaacatctgcctcccgggttcaaatgattctcctgcctcagtctcctgagtagctgggattacaggtgcccgccaccacgctcagctaatttttgtatttttagtagagatggggttttaccatgttggccaggctggtcttagactcctgacctcagttgatccacctgcctcagcctctgcattcagtttattcacatatttttggtaactcccatggcagctcctaggatttcagcggtctgtgggccagaaagcaggcaccagggctgacctcaaggccgtatcagagggccaagcagagttcttttggatacctgcttttcatcccacagggccttagagtcagaggtaaggtagcaacagagctagaatggggcaatgcactcttaccctccttctcaacttttatttaagctgtgctaaatgttttcttcaagggaaccagatttagttctttacagaattttccagtgaaataaaacatgttgtaatagctgtgtttgagatgaaataagaggttgtgggtagaggggaggcacctaaaggaaaagaggaaaggtgcctgggctacctatgcagataacctggagtggacttcactgtggactcgtggtactaaggcttggcctggacaggcagtctagggggtatgggaatacacggtgtggttgttcaactatttgcaaaggtcaaccaaatagaccacatgttcgcaaagtatcatctgaggaaattaagtaccttcttagccctctcagtcataaatttgaacaaattttaatacacttccctcatgcccttctatataaaacttaataccattagttccccattcttgacattttatttcagtttttattatatatttatttgaaatatttattaaattatctgacctacagaactaaa

SEQ ID NO: 193314 - DNA, 1755 bp, Homo sapiens
  Payload ID: 18161
  Gene Name: transmembrane p24 trafficking protein 4
  Uniprot ID: Q7Z7H5
  ENST ID: ENST00000481238
  CDS Start-End: 26-586
gcaggcgcttaggggctgaggcgcgatggcaggtgtcggggctgggcctctgcgggcgatggggcggcaggccctgctgcttctcgcgctgtgcgccacaggcgcccaggggctctacttccacatcggcgagaccgagaagcgctgtttcatcgaggaaatccccgacgagaccatggtcatcggcaactatcgtacccagatgtgggataagcagaaggaggtcttcctgccctcgacccctggcctgggcatgcacgtggaagtgaaggaccccgacggcaaggtggtgctgtcccggcagtacggctcggagggccgcttcacgttcacctcccacacgcccggtgaccatcaaatctgtctgcactccaattctaccaggatggctctcttcgctggtggcaaactgcgggtgcatctcgacatccaggttggggagcatgccaacaactaccctgagattgctgcaaaagataagctgacggagctacagctccgcgcccgccagttgcttgatcaggtggaacagattcagaaggagcaggattaccaaagggcaagtgcatatctccttgtaatttgagagggcagttgacctttatacccactatacctactcaagtttctgcttgggagatcagctctgcagagaatggaatgagaagtattggtttagataggttgtttgtttgttgtttttgagacggagtttcactcttgttgcccatgctggagtgcaatgccatgatcttggctcactgcaacctccgcctccccaggttcaagcgattctcctgcctcagcctcctgagtagctgggattacaggcatgcgccaccatgcctggctaattttgtacttttagtagagacgggggtttctccacgttggtcaggctggtctcgaactcccgacatcaagtgatccgcccgcctcagcctcccaaagtgctgggattacaggtgtgagctaccgcgccctgcctgttttgcttttttatcaaaacattttattgtggtaaaatataacaccaaatgtgtcattttaactgtctatatagttcagtggtattaagtgccttcataatgttgtgctaccaacaccatcatccagctccagaactttttcatcttctcaaactaaaaatctgtacttattttgttttgtttttgagatggagtctcgctctgttgcccaggctggagcgcagtggcgccatctcggctcactgcaccctccgcctcccaggttcaagcgattctcctgcctcagcctcccaagtagctgggattacaggcaagtgccaccatgcgtggctcatttttgtgtttttagtagagactgggtttcaccatgttggccaggctggtcttgaactcctggcctcaggcaatccactgccgcagcctcccaaagtgttgggattacaggcgtgagccactgcacccagcaaatctgtacttattataaacaataacttcccgtttccttttgtcctgacacccaccattctactttctgtctctatgatcctgactaccctatctcatataagtggaatcattcagtatttgtccttttgtgactggcttatttcactgagtataatgttctcacagttcatccatgttatagcatgtgtcagaatttcttaaggctaatattccattgtatgcatgtgccacatttcgctttcagtagtcatttttaagctctataaaataaaatgaagaaaggacagttcacaatcta

SEQ ID NO: 193315 - DNA, 750 bp, Homo sapiens
  Payload ID: 18162
  Gene Name: transmembrane p24 trafficking protein 5
  ENST ID: ENST00000370280
  CDS Start-End: 20-508
cgggatcgccccagcagggatgggcgacaagatctggctgcccttccccgtgctccttctggccgctctgcctccggtgctgctgcctggggcggccggcttcacaccttccctcgatagcgacttcacctttacccttcccgccggccagaaggagtgcttctaccagcccatgcccctgaaggcctcgctggagatcgagtaccaagttttagatggagcaggattagatattgatttccatcttgcctctccagaaggcaaaaccttagtttttgaacaaagaaaatcagatggagttcacactgtagagactgaagttggtgattacatgttctgctttgacaatacattcagcaccatttctgagaaggtgattttctttgaattaatcctggataatatgggagaacaggcacaagaacaagaagattggaagaaatatattactggcacagatatattggatatgaaactggaagacatcctggtcagtatggtcttctaataaaataaaaattattaacagccagaggccttactatggtaataagttactgaactaagcattttatctgcattatccaggaaaatctgtttctaatattttatttttgccataaatactttgacctcaagtatcagcttaattttattttatattaatatagcccttttatagttttcaaataacttatcttccaggaccctattataaaaatagcttcagatgtgcaaataagactgcat

SEQ ID NO: 193316 - DNA, 6104 bp, Homo sapiens
  Payload ID: 18162
  Gene Name: transmembrane p24 trafficking protein 5
  Uniprot ID: Q9Y3A6
  ENST ID: ENST00000370282
  CDS Start-End: 487-1176
gaaccgccgcgggagccgttgggacgcgcctacccggtcactgccccgccccggcgcagactgcgtgaggcgccgccgaaggcgcggggcttgccggggatcgtggtcggcgagcgcgcccgagcccactagcggagcccgcccgggactacatttcccacaattaccgccatgatgcccattggtgggggaagccatgggaaccggaggccgtcagggggagaggcgggcggcgctcacgcctggcctgagggggccgagactgaggcggttgcggaataggactgctagccccgcccagagtccctaccctttggagaactgcgcttctctttcggagggagtgttcgccgccgccgcggccgccacctggagtttcttcagactccagatttccctgtcaaccacgaggagtccagagaggaaacgcggagcggagacaacagtacctgacgcctctttcagcccgggatcgccccagcagggatgggcgacaagatctggctgcccttccccgtgctccttctggccgctctgcctccggtgctgctgcctggggcggccggcttcacaccttccctcgatagcgacttcacctttacccttcccgccggccagaaggagtgcttctaccagcccatgcccctgaaggcctcgctggagatcgagtaccaagttttagatggagcaggattagatattgatttccatcttgcctctccagaaggcaaaaccttagtttttgaacaaagaaaatcagatggagttcacactgtagagactgaagttggtgattacatgttctgctttgacaatacattcagcaccatttctgagaaggtgattttctttgaattaatcctggataatatgggagaacaggcacaagaacaagaagattggaagaaatatattactggcacagatatattggatatgaaactggaagacatcctggaatccatcaacagcatcaagtccagactaagcaaaagtgggcacatacaaactctgcttagagcatttgaagctcgtgatcgaaacatacaagaaagcaactttgatagagtcaatttctggtctatggttaatttagtggtcatggtggtggtgtcagccattcaagtttatatgctgaagagtctgtttgaagataagaggaaaagtagaacttaaaactccaaactagagtacgtaacattgaaaaatgaggcataaaaatgcaataaactgttacagtcaagaccattaatggtcttctccaaaatattttgagatataaaagtaggaaacaggtataattttaatgtgaaaattaagtcttcactttctgtgcaagtaatcctgctgatccagttgtacttaagtgtgtaacaggaatattttgcagaatataggtttaactgaatgaagccatattaataactgcattttcctaactttgaaaaattttgcaaatgtcttaggtgatttaaataaatgagtattgggcctaattgcaacaccagtctgtttttaacaggttctattacccagaacttttttgtaaatgcggcagttacaaattaactgtggaagttttcagttttaagttataaatcacctgagaattacctaatgatggattgaataaatctttagactacaaaagcccaacttttctctatttacatatgcatctctcctataatgtaaatagaataatagctttgaaatacaattaggtttttgagatttttataaccaaatacatttcagtgtaacatattagcagaaagcattagtctttgtactttgcttacattcccaaaagctgacattttcacgattcttaaaaacacaaagttacacttactaaaattaggacatgttttctctttgaaatgaagaatatagtttaaaagcttcctcctccatagggacacattttctctaacccttaactaaagtgtaggattttaaaattaaatgtgaggtaaaataagtttatttttaatagtatctgtcaagttaatatctgtcaacagttaataatcatgttatgttaattttaacatgattgctgacttggataattcattattaccagcagttatgaaggaaatattgctaaaatgatctgggcctaccataaataaatatctccttttctgagctctaagaattatcagaaacaggaaagaatttagaaaaacttgagaaaacctaatccaaaataaaattcacttaagtagaactataaataaatatctagaatctgactggctcatcatgacatcctactcataacataaatcaaaggagatgattaatttccagttagctggaagaaactttggctgtaggtttttattttctacaagaattctggtttgaattatttttgtaagcaggtacattttataaaatgtaagccctactgtaaggtttagcactgggtgtacatatttattaaaaatttttattataacaacttttattaaaatggcctttctgaacactttatttattgatgttgaagtaaggattagaaacatagactcccaagttttaaacacctaaatgtgaataacccatatatacaacaaagtttctgccatctagctttttgaagtctatgggggtcttactcaagtactagtaatttaacttcatcatgaatgaactataatttttaagttatgcccatttataacgttgtttatgactacattgtgagttagaaacaaacttaaaatttggggtatagaacccctcaacaggttagtaatgctggaattcttgatgagcaataatgataaccagagagtgatttcatttacactcatagtagtataaaaagagatacatttccctcttaggcccctgggagaagagcagcttagatttccctactggcaaggtttttaaaaatgaggtaaatgccgtatatgatcaattaccttaattggccaagaaaatgcttcaggtgtctaggggtatcctctgcaacacttgcagaacaaaggtcaataagatccttgcctatgaatacccctcccttttgcgctgttaaatttgcaatgagaagcaaatttacagtaccataactaataaagcagggtacagatataaactactgcatcttttctataaaactgtgattaagaattctacctctcctgtatggctgttactgtactgtactctctgactccttacctaacaatgaatttgttacataatcttctacatgtatgatttgtgccactgatcttaaacctatgattcagtaacttcttaccatataaaaacgataattgctttatttggaaaagaatttaggaatactaaggacaattatttttatagacaaagtaaaaagacagatatttaagaggcataaccaaaaaagcaaaacttgtaaacagagtaaaaatctttaatatttctaaagacatactgtttatctgcttcatatgctttttttaatttcactattccatttctaaattaaagttatgctaaattgagtaagctgtttatcacttaacagctcattttgtctttttcaatatacaaattttaaaaatactacaatatttaactaaggcccaaccgatttccataatgtagcagttaccgtgttcacctcacactaaggcctagagtttgctctgatatgcatttggatgattaatgttatgctgttctttcatgtgaatgtcaagacatggagggtgtttgtaattttatggtaaaattaatccttcttacacataatggtgtcttaaaattgacaaaaaatgagcacttacaattgtatgtctcctcaaatgaaaattctttatctgaaattttaaaagacattgattccacatgtaaggatttttcatctgaagtacaataatgcacaatcagtgttgctcaaactgctttatacttataaacagccatcttaaataagcaacgtattgtgagtactgatatgtatataataaaaattatcaaagaaaattaactgccagtcatttgtaaatgctgtctactcctgaaagccttccttcatctctatttagttaataatgtgctctctcctcctgttttgaaaccccatagctctctacacctcttattgtacatcactctactttgcattggagttctgtttctatatgtacttattcacctgttgcctaaacatgcactgttcctaaaaggtacagtttttgctcaaaatatatgaaaggaaagataatcagttcttaaagtttggtatgctaaataagcacccagggaacttacctgctccacctcaccccagaaattgattattcaggtctggaatatggctcaggattcttaattttcaaccaacacaatatagaatcctgtcagttatccttggatcatttgctaagtgatcttgcaaaatcaaaactcctttgagactatttcattttcagaaatattttaaaacttgttcagaaacatcttaaaacttgttagcatataggaaaagtacaatgcttggtgtaggtaggttattatttggtcatttccctcaaaccatccagacaagccactcttctaccacaagctggtagaaatccttaggcacctttctgcttctgcactgctatcactttcaggtgtctaaggcttctggaaggctgttgtcataacctggagccatacacctaatgtacgtctggggaaaggacaccaattaaagaatctagagctaggatgatgttacataagacagggcacaatggagatggactctggatccctgcatctgaaagaaaaaggcaagaaaatgcagggcagggaaaatcctgaaggtcttcactgaccatgaattaaaatcctaattgacagttttacaaacaaaaaccctcgttttagtacttgtgttgtttttgtttctgttttaacaagcttagatttattattgtgccttttatggaagatgaggaagaaataggaaagcagtaaaatgaacaatgagaatctgttacccaaactgatataaactccctcagaaagaaagatactactccctaatcctggaagtgttaagtggcaataatgatcaaatgttgtaaaggggattgttactacagctaatatgaaatgggaggctggactaaatctaacctttctacccttgatttcaattctaaaaggacacgtaataccattgcagaaagaaaagacagttccaaatgataaattttagagttgttttgctaggatgcaagagaaattggataagtggaccactcatacgttgctggtgagatatgaaatagtagagccactgtggaaaatattcttggcagtttcttataaaactaaacatacatttaacatataactggcatttgtactacttgacagttatccctgagaagttaaaacttaacattcacaaatgttacatagcaccttcatttataatagccaaaacccggaaacaacctggatgtccttcaaaaagagtgaatggtttagtatgtccacaccatggaatactaaatagtaatatgaaggaacaaactactgatacatgtaacaaattgcatggacctcaagggaattatgcttgggtggtttggggggacaatcctaaagttttacacactgtatgattctgtttttgtaacattcttaaataataaagctatagagatgggaaacaagattcgtggttgccaggtcttgggactgaagggaaggagaatgtggctataaagggagccttgtggtggaaaagttctgtagtttgattgtggtgattacataaatatacatgtgaaatgttagaagtatttatagctgaaacatattagtatgttggtatatacatatttctgactaattaatttcgccatgttgcccaggctggtctcgaactcctaagctcaagtgatgtgcccgcctcaacttcccaagtgctgagattacaggcgtgagccaccatgtccggcctgttttttcctatgcatgcataattacgatcaagtttaatttgtaattaggcacattaagagattaacaatagctaacaaaatggaacaattacaacaatatattgtaataaaagttatgcaaatgtg

SEQ ID NO: 193317 - DNA, 1296 bp, Homo sapiens
  Payload ID: 18162
  Gene Name: transmembrane p24 trafficking protein 5
  Uniprot ID: Q9Y3A6
  ENST ID: ENST00000479918
  CDS Start-End: 120-701
acctggagtttcttcagactccagatttccctgtcaaccacgaggagtccagagaggaaacgcggagcggagacaacagtacctgacgcctctttcagcccgggatcgccccagcagggatgggcgacaagatctggctgcccttccccgtgctccttctggccgctctgcctccggtgctgctgcctggggcggccggcttcacaccttccctcgatagcgacttcacctttacccttcccgccggccagaaggagtgcttctaccagcccatgcccctgaaggcctcgctggagatcgagtaccaagttttagatggagcaggattagatattgatttccatcttgcctctccagaaggcaaaaccttagtttttgaacaaagaaaatcagatggagttcacactgtagagactgaagttggtgattacatgttctgctttgacaatacattcagcaccatttctgagaaggtgattttctttgaattaatcctggataatatgggagaacaggcacaagaacaagaagattggaagaaatatattactggcacagatatattggatatgaaactggaagacatcctggaccctattataaaaatagcttcagatgtgcaaataagactgcatcttggaatccatcaacagcatcaagtccagactaagcaaaagtgggcacatacaaactctgcttagagcatttgaagctcgtgatcgaaacatacaagaaagcaactttgatagagtcaatttctggtctatggttaatttagtggtcatggtggtggtgtcagccattcaagtttatatgctgaagagtctgtttgaagataagaggaaaagtagaacttaaaactccaaactagagtacgtaacattgaaaaatgaggcataaaaatgcaataaactgttacagtcaagaccattaatggtcttctccaaaatattttgagatataaaagtaggaaacaggtataattttaatgtgaaaattaagtcttcactttctgtgcaagtaatcctgctgatccagttgtacttaagtgtgtaacaggaatattttgcagaatataggtttaactgaatgaagccatattaataactgcattttcctaactttgaaaaattttgcaaatgtcttaggtgatttaaataaatgagtattgggcctaattgcaacaccagtctgtttttaacaggttctattacccagaacttttttgtaaatgcggcagttacaaattaactgtggaagttttcagttttaagttataaatcacctgagaattac

SEQ ID NO: 193318 - DNA, 3847 bp, Homo sapiens
  Payload ID: 18162
  Gene Name: transmembrane p24 trafficking protein 5
  ENST ID: ENST00000370290
  CDS Start-End: 275-637
gtcagggggagaggcgggcggcgctcacgcctggcctgagggggccgagactgaggcggttgcggaataggactgctagccccgcccagagtccctaccctttggagaactgcgcttctctttcggagggagtgttcgccgccgccgcggccgccacctggagtttcttcagactccagatttccctgtcaaccacgaggagtccagagaggaaacgcggagcggagacaacagtacctgacgcctctttcagcccgggatcgccccagcagggatgggcgacaagatctggctgcccttccccgtgctccttctggccgctctgcctccggtgctgctgcctggggcggccggcttcacaccttccctcgatagcgacttcacctttacccttcccgccggccagaaggagtgcttctaccagcccatgcccctgaaggcctcgctggagatcgagtaccaagttttagatggagcaggattagatattgatttccatcttgcctctccagaaggcaaaaccttagtttttgaacaaagaaaatcagatggagttcacacgtgtataagaagtaaaaatgggccaggcactgcggttcacgcctataatcccagcactttccgaggccaagtgtagagactgaagttggtgattacatgttctgctttgacaatacattcagcaccatttctgagaaggtgattttctttgaattaatcctggataatatgggagaacaggcacaagaacaagaagattggaagaaatatattactggcacagatatattggatatgaaactggaagacatcctggaatccatcaacagcatcaagtccagactaagcaaaagtgggcacatacaaactctgcttagagcatttgaagctcgtgatcgaaacatacaagaaagcaactttgatagagtcaatttctggtctatggttaatttagtggtcatggtggtggtgtcagccattcaagtttatatgctgaagagtctgtttgaagataagaggaaaagtagaacttaaaactccaaactagagtacgtaacattgaaaaatgaggcataaaaatgcaataaactgttacagtcaagaccattaatggtcttctccaaaatattttgagatataaaagtaggaaacaggtataattttaatgtgaaaattaagtcttcactttctgtgcaagtaatcctgctgatccagttgtacttaagtgtgtaacaggaatattttgcagaatataggtttaactgaatgaagccatattaataactgcattttcctaactttgaaaaattttgcaaatgtcttaggtgatttaaataaatgagtattgggcctaattgcaacaccagtctgtttttaacaggttctattacccagaacttttttgtaaatgcggcagttacaaattaactgtggaagttttcagttttaagttataaatcacctgagaattacctaatgatggattgaataaatctttagactacaaaagcccaacttttctctatttacatatgcatctctcctataatgtaaatagaataatagctttgaaatacaattaggtttttgagatttttataaccaaatacatttcagtgtaacatattagcagaaagcattagtctttgtactttgcttacattcccaaaagctgacattttcacgattcttaaaaacacaaagttacacttactaaaattaggacatgttttctctttgaaatgaagaatatagtttaaaagcttcctcctccatagggacacattttctctaacccttaactaaagtgtaggattttaaaattaaatgtgaggtaaaataagtttatttttaatagtatctgtcaagttaatatctgtcaacagttaataatcatgttatgttaattttaacatgattgctgacttggataattcattattaccagcagttatgaaggaaatattgctaaaatgatctgggcctaccataaataaatatctccttttctgagctctaagaattatcagaaacaggaaagaatttagaaaaacttgagaaaacctaatccaaaataaaattcacttaagtagaactataaataaatatctagaatctgactggctcatcatgacatcctactcataacataaatcaaaggagatgattaatttccagttagctggaagaaactttggctgtaggtttttattttctacaagaattctggtttgaattatttttgtaagcaggtacattttataaaatgtaagccctactgtaaggtttagcactgggtgtacatatttattaaaaatttttattataacaacttttattaaaatggcctttctgaacactttatttattgatgttgaagtaaggattagaaacatagactcccaagttttaaacacctaaatgtgaataacccatatatacaacaaagtttctgccatctagctttttgaagtctatgggggtcttactcaagtactagtaatttaacttcatcatgaatgaactataatttttaagttatgcccatttataacgttgtttatgactacattgtgagttagaaacaaacttaaaatttggggtatagaacccctcaacaggttagtaatgctggaattcttgatgagcaataatgataaccagagagtgatttcatttacactcatagtagtataaaaagagatacatttccctcttaggcccctgggagaagagcagcttagatttccctactggcaaggtttttaaaaatgaggtaaatgccgtatatgatcaattaccttaattggccaagaaaatgcttcaggtgtctaggggtatcctctgcaacacttgcagaacaaaggtcaataagatccttgcctatgaatacccctcccttttgcgctgttaaatttgcaatgagaagcaaatttacagtaccataactaataaagcagggtacagatataaactactgcatcttttctataaaactgtgattaagaattctacctctcctgtatggctgttactgtactgtactctctgactccttacctaacaatgaatttgttacataatcttctacatgtatgatttgtgccactgatcttaaacctatgattcagtaacttcttaccatataaaaacgataattgctttatttggaaaagaatttaggaatactaaggacaattatttttatagacaaagtaaaaagacagatatttaagaggcataaccaaaaaagcaaaacttgtaaacagagtaaaaatctttaatatttctaaagacatactgtttatctgcttcatatgctttttttaatttcactattccatttctaaattaaagttatgctaaattgagtaagctgtttatcacttaacagctcattttgtctttttcaatatacaaattttaaaaatactacaatatttaactaaggcccaaccgatttccataatgtagcagttaccgtgttcacctcacactaaggcctagagtttgctctgatatgcatttggatgattaatgttatgctgttctttcatgtgaatgtcaagacatggagggtgtttgtaattttatggtaaaattaatccttcttacacataatggtgtcttaaaattgacaaaaaatgagcacttacaattgtatgtctcctcaaatgaaaattctttatctgaaattttaaaagacattgattccacatgtaaggatttttcatctgaagtacaataatgcacaatcagtgttgctcaaactgctttatacttataaacagccatcttaaataagcaacgtattgtgagtactgatatgtatataataaaaattatc

SEQ ID NO: 193319 - DNA, 938 bp, Homo sapiens
  Payload ID: 18163
  Gene Name: transmembrane p24 trafficking protein 6
  Uniprot ID: Q8WW62
  ENST ID: ENST00000288025
  CDS Start-End: 57-779
cttgatttccctgggctgcgagcagttcacctgcagaggaggctccagaaagcggcatgtcccctttgctctttggggctgggctggtcgttctgaatctagtgacgtctgccaggagccagaagacagaacctctaagtggctctggggaccagccactcttccgtggagctgatcgatatgactttgccatcatgatacctccaggaggcacggaatgcttttggcaatttgcccaccagactggatacttctatttcagttacgaggttcagcggacagtggggatgtcacatgaccggcatgttgctgccacggcacataacccacagggatttctcatagacacctcccagggtgttcggggccagattaacttctctacccaagagacaggtttttatcagctttgtctaagtaatcagcataatcacttcggttctgtgcaagtgtacctcaactttggggtcttctatgaggggcctgagactgatcacaaacagaaggaaagaaaacaactgaatgatactctggatgcaattgaggacggcacacaaaaggtgcagaacaatatctttcacatgtggcgatactacaactttgcccggatgaggaaaatggctgactttttccttatccaatcaaactataactacgtgaactggtggtcgacagcccagagccttgttattattctttctgggatcctgcaactgtatttcttgaagcgtctcttcaatgttccaacaactacagatacaaagaagccaagatgctaagctaaggtgactatagcaccctggctgttttcttctggggcttagtcgaatcagctttgtaatgttatgggacaaaaatcaattatctcattaatgttttagtctgctgcacacatctaaaaaagcaaaatggcaataaaatcataacagtgaaaaagt

SEQ ID NO: 193320 - DNA, 3757 bp, Homo sapiens
  Payload ID: 18164
  Gene Name: transmembrane p24 trafficking protein 7
  Uniprot ID: Q9Y3B3
  ENST ID: ENST00000456936
  CDS Start-End: 382-1056
cccaggctgcaacggaggcagagccaacgcctcgcgggcttccacgtacgcactccaacgcgtgttcccggagaagaacgcatccgggtcacgggagccggtgtctcaggctccgccccttcaccccccgaaaggctaatccccacttccgaccctctcaggccttttccgcttctcttttacctccccaggtccgcccgtctgcgcccctcacaggaagccggagggtcgctctgatcccgaatctcccacaggcgtgaacctgctctgctgtgtatctttgcggggtggcctgcgctgaggcctgccgcgcgcggtgagtccgcgcagacctgaccctgcgtctcgcagctcggttgaggccgccgccgccttctcgggatgccgcggccggggtccgcgcagcgctgggcggccgtcgcgggccgttgggggtgcaggctgctcgcactgctgctactggtgcctggacccggcggcgcctctgagatcaccttcgagcttcctgacaacgccaagcagtgcttctacgaggacatcgctcagggcaccaagtgcaccctggagttccaggtgattactggtggtcactatgatgtagattgtcgattagaagatcctgatggtaaagtgttatacaaagagatgaagaaacagtatgatagttttaccttcacagcctccaaaaatgggacatacaaattttgcttcagcaatgaattttctactttcacacataaaactgtatattttgattttcaagttggagaagacccacctttgtttcctagtgagaaccgagtcagtgctcttacccagatggaatctgcctgtgtttcaattcacgaagctctgaagtctgtcatcgattatcagactcatttccgtttaagagaagctcaaggccgaagccgagcagaggatctaaatacaagagtggcctattggtcagtaggagaagccctcattcttctggtggttagcatagggcaggtatttcttttgaaaagctttttctcagataaaagaaccaccacaactcgtgttggatcataactacgttttgagaattgatgcaccattgccactgtaatattgctgtcctctaattaattttaggtactgaagaacttaatattggcaacatttttaaatccttactcatacacttgttgggagggatgtacaatgcatattcccaaactgtggaaaggacacctttttttatttgtaaaggtggaaaaactttggaactcattttgggctattcatgttaaatattcaacaccaatgatctactctgttcgcagttgtttatatctactcttcgcacactaaactttggtattttgattccttttaaccatttaagactacttttcttataggtagttgatattttaaaaactttagatttaatgtctacatgtgttagggaggaagaaaattgccttttaattgttaataagaaaaccaaatgtgatgaactgtagcccaagccctattctgcactgttcagttttatggaggaaaaataaatctaccataggaatgttagttaatattgatatatcatggtaaaattgatttctcactagcttagaaaatgtcagacttttgtttttggggtttataatttaaaccagctatgctattttttcataaaggcatttgtagtacacagaaaacagtagtttcagtagtgtaaaagagtttatacaggccttaaatatcagactttgtaacaggtagaaatattacagaataatttaagacactacaatgggggcaaatgaaataggaaaatttttagtgagttacacgtactcattacattttcagtgcttttacaaggaaaaaaggtgatatgtttaattttaaaattttaattggctagctcttgcccttatatgactttaatgtctgtgagtcattcccagcttaaattaacaattgttagtattagtctcacacataagtgccatacattttatcctcatggatgtgatgcactgaaaagttagttgctctccttttttcttttttttgtcgtgcatattttatttctgtagtttctggttagctaccctaaagtgatttaaaaatttagaatgctttgtgtttcctatttggtaatcttcattgacttttctttagttaatgagtattaaatagtgcatattctgtagactatagggtttacattgtgttgcatcttataacttgtatagattgagctgattgaaataagattttgttccaagtattatctgatagaatacaagatgattcaaaattatatagatatttaaagcttttctgctgttttttttttttttaattgcaactgcttttctgccgtgcctctcttccctacccaaaagtgatgagttctgaacaagacaagactgtcatattgtagagactttggtatgtgataccatagaatactgattggatagccatcctagtcacttaccaatactgactagaagttaactcttaattctaagctatcttaaaatgcatatatatacttcttgcatggaagagcaaaacaaattcaagttgtcatgcctgataatttcagatgccaccgtatagcaaagggtgaacatgttttcaaccctttaactttttacggtgtttgaagaccagctactccttaatatttatcaatggattaagaagtttaagattttgcagatttatcaatttgggtttttgtactgaagttgtcttgcggctttgcaagtgtccctttatatttaaatttgaaagttgtaagcactgatgttaatgtgattgatcagcatgggcatatgtaaaatgtccttttctggttgcctctctatgctattgtgttcagatacttacaccataattaaacagtaagttatagacttgctgagtttggcatagatagtgcactcatttaatctgtgcctctcaaaacttcagaatattagcatattaccacaaataatttttggtgaaactattgagatattaaaatttttgaaatcactactgttacctgttatagaaaatagtgttggcttagtctagtctctgtgtaactggttacattttgatggttgtctatactcaactggatatgtgtatgtaaattagaaaatacatacctatccagacataaatgctaagtaacatttttttcttcctccaactacataatttgtagctcatcatttttccttaatcctttcctaacttgttgcagcagtttgaatttcccagatatttatgtttgaacataatggctcagaatacatatttgaacatcatagttgtatatatttttaaagtagaataaataatggaaagcaacttgatatacaagtttatactaaaatttcaactgtgtgaagatacattttaaggcattactttgctaataatctacacattcttttttctattaaataaacaaatggtttgtggttcacagctttcatccaagcttggtgataatcaattttgaaaatacagtggactgaaaagcaaatttattctttcgaagatttcatttaaatctctgtactatgcatttttgtttcagtttgtaaatgtgtaacatttatagttaaataggacaaagcaggccctatgactattgttttcaaaaaattaatatataaataattcagaggggtttttcatttacttttgaaaagaaatttctttaacaggattgcacctatcaatttcttgtagaataaaaaaaaatctttca

SEQ ID NO: 193321 - DNA, 572 bp, Homo sapiens
  Payload ID: 18164
  Gene Name: transmembrane p24 trafficking protein 7
  ENST ID: ENST00000508420
  CDS Start-End: 328-572
attaggaacttcatagctgcaagctaagggaatgctatccatcctgaaggattgcctattcaacaaaaggcaattggggtttgtcttattgctgcaggccttgcttctcagtcactgactgactgttgagagccaaggtccgcccgtctgcgcccctcacaggaagccggagggtcgctctgatcccgaatctcccacaggcgtgaacctgctctgctgtgtatctttgcggggtggcctgcgctgaggcctgccgcgcgcggtgagtccgcgcagacctgaccctgcgtctcgcagctcggttgaggccgccgccgccttctcgggatgccgcggccggggtccgcgcagcgctgggcggccgtcgcgggccgttgggggtgcaggctgctcgcactgctgctactggtgcctggacccggcggcgcctctgagatcaccttcgagcttcctgacaacgccaagcagtgcttctacgaggacatcgctcagggcaccaagtgcaccctggagttccaggtgattactggtggtcactatgatgtagattgtcgattagaagatcctgatgg

SEQ ID NO: 193322 - DNA, 1473 bp, Homo sapiens
  Payload ID: 18165
  Gene Name: transmembrane p24 trafficking protein 9
  Uniprot ID: Q9BVK6
  ENST ID: ENST00000332598
  CDS Start-End: 58-765
gcggcggcagggcgacgtggcgcggccggctgcggctgcgcaggcaggtggagcaagatggctgtggagctgggcgtgctgctcgtccggccccggcccggaaccgggctgggtagagtgatgcggaccctcctgctggtgctgtggctggcgacgcgcggaagcgcgctctactttcacatcggagagacggagaagaagtgctttattgaggagatcccggacgagaccatggtcataggaaactaccggacgcagctgtatgacaagcagcgggaggagtaccagccggccaccccggggcttggcatgtttgtggaggtgaaggacccagaggacaaggtcatcctggcccggcagtatggctccgagggcaggttcactttcacttcccatacccctggtgagcaccagatctgtcttcactccaattccaccaagttctccctctttgctggaggcatgctgagagttcacctggacatccaggtaggtgaacatgccaatgactatgcagaaattgctgctaaagacaagttgagtgagttgcagctacgagtgcgacagctggtggaacaagtggagcagatccagaaagagcagaactaccagcggtggcgagaggagcgcttccggcagaccagtgagagcaccaaccagcgggtgctgtggtggtccattctgcagaccctcatcctcgtggccatcggtgtctggcagatgcggcacctcaagagcttctttgaagccaagaagcttgtgtagctgtcccaggcgtcacaacccatcctcccaggctgggggagaaaggacctcctggaactgacttcttctgtcaggaggactggtttccagccatacctgttctggaagggagaggggctggaggcacccacaggcacaagctgaaggcagcagcttggctaatactgagcaggtagtggggcaaattcctgccctctctctctggcctctgggccgtttggtagtaatcacccaagggctggtaaagcccctcctcttggcacctcagaatcacagtgttactgatcagggatgtgaggctgctgttgggggtggggggaggggaatgggcaggcaagccagtcttctgtcttcctttgctaacttagggttttgagcaggttggggtatggtgcctgtcatacccacctgccaccctgggaacctcactgttctctctttcagcctagacctgctgatccagggtgtgtgtgagttgagggtgggtggaggggtttgcagtgtgggaatgtggccctgcagttgacctgagctgcttcacatggttgtccattctggggcttaaagaactgggaccagaccaagtagaggccttggtgctggttggggtggggcctgcagagtcttagttactgatttcattttcaataaatgtaggtttgttacatgagtttcccaataaaaaaaaaaatgacttcttgtccagtg

SEQ ID NO: 193323 - DNA, 7784 bp, Homo sapiens
  Payload ID: 18166
  Gene Name: transmembrane p24 trafficking protein family member 8
  Uniprot ID: Q6PL24
  ENST ID: ENST00000216468
  CDS Start-End: 57-1034
gctgtttccggagccactcgcggctggcagcggagagctccgtgcgcgggctgcagatgtctgacctgcaggcggctgaggggccgggctcctggagccccacagcccgcccagggtcggctggcggcgtcggggactgccagggagtggaggggagccaggcggccgcctcagagaatgaagatctagaaaacaaggatacctctttattggcttctgccaccgatccagaaccctgctcctcaccccacaggccacagatggtatctccagtgagtaaggatgccacggaagatctgcggaaagcaactggtcctttggaggctcaggccttggtgaaacaggatttgctgcctgcagaccaggcccaggtcctcaatgagatggctaagtatcaagttccacagaggtctggggacatcgttatgatccagtctgaacatacaggagctatagatgttctttcagctgatttggaatctgcagatcttctgggggaccacaggaaagtctccccacctctgatggctcctccatgcatctggacctttgccaaggtgaaggaattcaaaagcaagctgggcaaagagaagaacagccgtctggtggtgaagcgtggtgaggtggtgaccatccgggtacctactcatccagaggggaagcgtgtctgctgggagtttgcgaccgatgactatgacattggctttggagtttattttgactggacccctgtaactagcactgacataactgtgcaggtcagtgattccagtgacgatgaggatgaagaagaggaagaggaggaagagattgaagaacccgttccagctggagatgtggagagaggctccaggagctccttgcggggtcgctatggggaggtcatgcctgtgtaccggcgggacagccaccgagacgtgcaggctggcagccatgactaccctggtgagggcatctacctgctcaagttcgacaactcctactccctgctgcgcaacaagactctctacttccacatctactacaccagctgaaggactgctgggacaggggcaggctgtatttgctggctgaagcaggctgccagctggtgcctcttgtttgggataggcaagagccaaaggttcatggggggctgctgagcctcacaccctgtctggcatgcctgactgttggcccacgtagctttttccccttcttggcttctgcaggtggtggtgtagtgcccctgttctgtagtccctgactcatacccttcttgcttcagactccagcaaattccctcttgaaggcacctatggggcacaagcctaaaaggaagcagggcgatgttttttaaaaatagattcatcttggcacaggtttatcattcagattgctgccctctcctctcccacagcccttattgccagtgcatttagtggcacccactctcttcagttgttgaggtgccagaagagggaaaagcacattgcccatgaaggagccccatcttttggttggagaaagctctatccagcctgtcaccactgccatattcctgcctgctggttattcttggtctctgcatagctgggagaccacactgcctttggagggctattactattcctgatggtagacaccccctcctttctctttcctaagtctatgtttttgccattacagcaagaacattcatgcaatctcaagtgatgatcaatgtaacctaagatcttgtgggaagaaaaactgcccccattatttcctattccaagagctggtttcccttactatgggcactggcagtcaaagtggagagagtggaaattaggtactgaattgatgtcagaacccacatatttgaaagtcgtgttacttttttttttttttttggtataatcaaagaaggaatggtatcatctgacagagaagatgaaaaacaaaaaacactccagagtccccaccgcttttttttgtctttagagtaggagtgctgtttagaaatgttgctttggaatcaaatgcagtgaaacccaatcaggtttccaaagtttctgcatttagctttcttgcattgagggcttaaagcttttggtgttcaaagtcccttagtttaggtgataatgaagcttcactattgctgctgattgtatttgttctttacctgaccaaagcttgcatttccctggtgacagcatttcctactgtgtcacccctgaggctcaggagtgccacagagtgcaggtagtgctgcagccagtggtcaccagagcaccagctgctgggcccccaggcggaggaggagacggaggtgagatgggacctcagcagtctctgtgtttgtacctccctgtctcttactcctcgtgttatgtctgttactgcctacgaattctgaagaataattagatttatttattactgtatttatttttttagcacatttcattttgcctttgaaacagtttccatctgtttctcagaaggcttcccatctgttctgagccactgaagccccctcttttatggagttaaagatgatatttttaggagaatttgggaagcgatgatgttttatttctgtaggtcagtcctgtgacggctttgcgaggagtatggcccttcagagatggatgatgccaccttactccatgtttggggtacagtccagcactccccatgaaaaattctaagttgtgagggaatctgcccatttgctggagattgagtgcagaggaattccctaaccaatcagagatatcccgtgattccaggatttcagagtcctttgtctcctctgaggtgtcaccttctttgtgatgtttcctttgactcattgttagattcctcacaccaagggtctatccctacagtagcataactcaaggaacgggactcttcccagtgggtccctagtagcatctacatcacatcaaagggcaatatatcctgcacctgctcttcccctcggagcaaagccccaagtgggataggatgttggggactgccagagcattcccattctctgagcagcatcatacctccattattttatatttgcaaatgtgttttgtagaggattacactggccaacatttatatacctttaaagaaattattttagtgactgtctgttgaggcagtgaagagctgatttgctgtgtgtcatcccattggatagctgagtgaccgctcttgcatcattgaagttgaatcatgccttagctaactgaatataatctttgtaaaataattttctactgagctgttttctagtcagctaaagccttgcttatttttcctgtttattattaacttctgcctttctctcaaattgaaacagtcaggccatacacagcaagctcccaaggataacacttgttattatttattttcaccatgagattctctgcttattttctttggaatcctagttctgttgcatcagggaagcctaagggacttgttcccctcacctctgtgtgcctcttagggtctggtcacttttgaagtcctgggcatggttacatttcattcatactggtttttcaccaactgtcagggtttctgtgttccattagcacaaaatagctaaaagaagatattttcactgtctaattcactattttcatgttacatttctgaaataattgaactttaggggcaagatactacttactgaagcacaggtaattactgagaacccacagcccagcaaattctaagagacagtcatttcctcagcccctcccagtccaaatttatagacccaaacaatgaaatgaaaaccgtttgctttgatcctcaccctgttctctagagcacaaacaaatagtaacaaacaattgaaagaaagtgcttcatagtaggagagagattggaattctctatagtgactgagttcttaaatttctttagttttagttttgccactttgttgagagatgggccttttagaaaggaagacatatttaaagtattgatttcttttcccccagtgttttattgtgaaaaaatttcagcaaacagcttaaaagaaatataaatatattgtaaaccaaaaagtatctgagacaggtctcaatacatttagaggtttattttgccaaggttcagagcccatgatggggcctcaggaggttcttagaacatgtgcccgaggtagtcgggttacagttttatacatttgagggagacagaaggtccaggcaaagccataaatcaatacatgtaaggtatacactggtttggcctggaaaggcaggacatcttgaagatgggggtttccaggtcagaggtagatcaaagagttcctgactggcagttggttgagagagttaaactttacctgaaaagatgaagtcagcttaagttaaagtaagggaggcttggcttaagtcatgtagatgaagcctccaggtagcaggcttcagagagaacagatgatgaatttttctttttaggccttaaaaggtgtcagactctccagaaaagacctaataagagaaggagattctctacagaatgcagtttcccccacaagagacagctttgtagggccatttcaaaatacgtcaaataaatatattggggggtaaatttcctttggggcctgctgtcatgtgatgctataccagagtcaggttgggatttggtattttattgccacaaagggtctgtttggttagtcttaagatctctgttttaatgttaatgctggtcagttgtatttaaattccaaagggaagagggtaatatgaggcaccctgtaatctgaccataatatgaggcaccctgtcttcccatcatggactagtttttcaggttcctttgagatcccctgggccaagacaggggtccattcagccggttgggggatttagaatttatttttggtttgctgtatatatatgtatacacacactccccgcataaatgtaaaaattttaaactaccaattcctaggcaaagatgattctaacattctgttccttttgacaagtgtccaattagagaatgctgagaatgtcccctgcatatcggctctgttggagagcccctgatttttagcagacctgtttcattcaacatgggttacccaggaggtggtcttcataaaaatgtttcttggaggccaggcgccgtggcccacgcctgtaatcccagcactttgggaggccaaggtgggcagaccaccttaggccaggagttcgagaccagcctggccaacatagtgaaactccgtcgctactaaaaatacaaaaaattagctgggcgtggtggcgggcatctgtaatcccagctactctggaggcagaagcagggagaatttcttgagcccaggaggcagaggttgcagcgagccgagatcatgccactgcactccagactgggcaacagagcaagattccgtctcaaaaaaaaaaaaattgtttcttggtctccatctttcaagaaaatacatctgtgctgtattttccccttccctcaggccatgatctctgctgttttccttactaactggcatgtcagtacaagagtgattgtgaagctgctccggaagggctttatgctaacctctgttgcttgatgacatgtcctcaggactctgatattaaaactcaatccttagataacaggtagctttatcatggaagtaggtagcaatttggaattagaccattcttagttatttttttcttaatgaattgatacatgcactttaaaaaatatttttgttattttgggaagaaaaactcagacttttaaaaaagtgtatattgtcccattataatatgtatatggaagagtgaaatctgaacgctgtcttatattaagcagtagaattaggtattatcataaaaagtcttaatctgtagggaatatgagtttatgtttatgagtcctgctcagtccctctttgagagaattagttgaaacccagactctaaagtctgcttttatatttgtttgttaagaccacttatctgcagaaggttgccttttaaccccagtggttctaaggtgtggaattgagtgaccctaatatttacataagagacttgttttagtggagcataagggaggggcataagttacaccgttttgtgctgcttgagaactgtcttttaaaattgatcacaacgagggaaaacaaaataaaattagggggcaaagggtaggagtatggggggaggggagagcaaacctatcgaatatatcttagaattttgctcagaaatcactgctgcctctcaagtgttgcattgtccctgcctaaaccaagaaggctaaacaaagcccctcctgtttgaattcttaaggtaagaaatttctaagctaagaaaacactattgcctaaaaccaatgatagtggagctcatttacaaataggcatgcctcacacacacagtccaaaggcaagacactggctttgaaattaggctcatgatgtgattcctattatatgtacctgatttttttaggccccaggtatgtggaccagagttaatgtcatgactcttcaaagatatgatgaaaagttgccctagaaatctagagatgcatgtttatttaattccatagtttaaaaaaaaatttaagcaggtagttgtggcttatctgggggcaaaataatatatgtgaaattgcttccagaggacaaagtatattttctaaagtcctgaaataggatcatgaacccttctgaagttttggtttgaaatattatagtatatgatattaccaaagagcccttaattcagagtttaaggggctctcttcctgaactctcttcatcactcagggttgaatgtgtaatgttccttgctattgattgttattgttgattcttaggatcaggccaagaatcatctggaaaacattatcttaattccgtctctcatatcctaaacagtacattttactaagaaattccatatgaaaaactccactcatgtctcctgagattatcctgtaagtgaagtagctttcatttaaccaagctaaattatttccatttagccatgttaaagagaagccaagtctagagaaagcaatcctgtaacccatgaatctggtgtacccattttcccttaacgtaacgggaagtgttttgaaattcccagaagagagctgttttgtaatcaaagtgatggattataagaaagccagactttggaaaaggataattggaataaagggaggtgcttgaagattttccaaactactttatgtcatttagcttctattttctgaagggctttctttggtgccatgtactcagatcagtcagttgactgaaagatgatcatgttttcttcgtaaagatttaagcaattggcaactacaaagacattattttcttactgttctatatcatgtactgttgctgacattacaaaaagggtctggaagggaaaccgtgtcactgttttatcttttttctttaaaatacaaaagtatcccaactaatcatttattatggtcagcttgttttacatgtcccctatcatgagaaatgctatcaacatctgtgatttctaagagtcttaccaaattgttactttaattcttgtgtcctgctgagtggtttttcttttaaaataccatttttatcaccctgtggcactgggtgtgttactgcgattacactgatgattctgagctgtgcttcttcaagtagctcagttcttgcgttttatattaggtaacagttttgtgatgcttttgtgcattctttgtcatctcttctgagttttcgaatctgtcataaataaactttttcactatgcacctggtaa

SEQ ID NO: 193324 - DNA, 2542 bp, Homo sapiens
  Payload ID: 18167
  Gene Name: transmembrane phosphatase with tensin homology
  Uniprot ID: P56180
  ENST ID: ENST00000622113
  CDS Start-End: 353-1954
cgtctccgagcggcggggccaagggagggcacaacagctgctacctgaacagtttctgacccaacagttacccagcgccggactcgctgcgccccggcggctctagggacccccggcgcctacacttagctccgcgcccgagagaatgttggaccgacgacacaagacctcagacttgtgttattctagcagctgaacacaccccaggctcttctgcccggcagtggctctggaagcagtctggtgtatagagttatggattcactaccagattctactgtatgctcttgacaactatgaccacaatggtccacccacaaatgaattatcaggagtgaacccagaggcacgtatgaatgaaagtcctgatccgactgacctggcgggagtcatcattgagctcggccccaatgacagtccacagacaagtgaatttaaaggagcaaccgaggaggcacctgcgaaagaaagtgtgttagcacgactttccaagtttgaagttgaagatgctgaaaatgttgcttcatatgacagcaagattaagaaaattgtgcattcaattgtatcatcctttgcatttggactatttggagttttcctggtcttactggatgtcactctcatccttgccgacctaattttcactgacagcaaactttatattcctttggagtatcgttctatttctctagctattgccttattttttctcatggatgttcttcttcgagtatttgtagaaaggagacagcagtatttttctgacttatttaacattttagatactgccattattgtgattcttctgctggttgatgtcgtttacattttttttgacattaagttgcttaggaatattcccagatggacacatttacttcgacttctacgacttattattctgttaagaatttttcatctgtttcatcaaaaaagacaacttgaaaagctgataagaaggcgggtttcagaaaacaaaaggcgatacacaagggatggatttgacctagacctcacttacgttacagaacgtattattgctatgtcatttccatcttctggaaggcagtctttctatagaaatccaatcaaggaagttgtgcggtttctagataagaaacaccgaaaccactatcgagtctacaatctatgcagtgaaagagcttacgatcctaagcacttccataatagggtcgttagaatcatgattgatgatcataatgtccccactctacatcagatggtggttttcaccaaggaagtaaatgagtggatggctcaagatcttgaaaacatcgtagcgattcactgtaaaggaggcacagatagaacaggaactatggtttgtgccttccttattgcctctgaaatatgttcaactgcaaaggaaagcctgtattattttggagaaaggcgaacagataaaacccacagcgaaaaatttcagggagtaaaaactccttctcagaagagatatgttgcatattttgcacaagtgaaacatctctacaactggaatctccctccaagacggatactctttataaaacacttcattatttattcgattcctcgttatgtacgtgatctaaaaatccaaatagaaatggagaaaaaggttgtcttttccactatttcattaggaaaatgttcggtacttgataacattacaacagacaaaatattaattgatgtattcgacggtctacctctgtatgatgatgtgaaagtgcagtttttctattcgaatcttcctacatactatgacaattgctcattttacttctggttgcacacatcttttattgaaaataacaggctttatctaccaaaaaatgaattggataatctacataaacaaaaagcacggagaatttatccatcagattttgccgtggagatactttttggcgagaaaatgacttccagtgatgttgtagctggatccgattaagtatagctcccccttccccttctgggaaagaattatgttctttccaaccctgccacatgttcatatatcctaaatctatcctaaatgttccttgaagtatttatttatgtttatatatgtttatatatgttcttcataaatctattacatatatatagataaaatgtcagtgtctttcttcttttttgaaggtacatacttcacagtttccatcttgtatttacctaaatttggaacacagtatgcaggaacatcaggcatcattttgaagaactttgaaatagaactttcaaagcaaaaacttgagatattcaaaaattgtgattccccaacacccacttacttacatatttttggtcaagtatttattccctgctttggttcacatttgtaatttcagatttattagaaagctaatttatatatttttcttccccttcatttacaaactgtctgttaacagattggcaaccaagactaagttttaaatccagaagagagaaatgtttcacgcaagcagtcccccaactcccaacacacactccctttcattccgagcactaaataggtagcttacttgacaagctt

SEQ ID NO: 193325 - DNA, 2036 bp, Homo sapiens
  Payload ID: 18167
  Gene Name: transmembrane phosphatase with tensin homology
  Uniprot ID: P56180
  ENST ID: ENST00000427445
  CDS Start-End: 331-1872
gggagggcacaacagctgctacctgaacagtttctgacccaacagttacccagcgccggactcgctgcgccccggcggctctagggacccccggcgcctacacttagctccgcgcccgagagaatgttggaccgacgacacaagacctcagacttgtgttattctagcagctgaacacaccccaggctcttctgcccggcagtggctctggaagcagtctggtgtatagagttatggattcactaccagattctactgtatgctcttgacaactatgaccacaatggtccacccacaaatgaattatcaggagtgaacccagaggcacgtatgaatgaaagtcctgatccgactgacctggcgggagtcatcattgagctcggccccaatgacagtccacagacaagtgaatttaaaggagcaaccgaggaggcacctgcgaaagaaagcagcaagattaagaaaattgtgcattcaattgtatcatcctttgcatttggactatttggagttttcctggtcttactggatgtcactctcatccttgccgacctaattttcactgacagcaaactttatattcctttggagtatcgttctatttctctagctattgccttattttttctcatggatgttcttcttcgagtatttgtagaaaggagacagcagtatttttctgacttatttaacattttagatactgccattattgtgattcttctgctggttgatgtcgtttacattttttttgacattaagttgcttaggaatattcccagatggacacatttacttcgacttctacgacttattattctgttaagaatttttcatctgtttcatcaaaaaagacaacttgaaaagctgataagaaggcgggtttcagaaaacaaaaggcgatacacaagggatggatttgacctagacctcacttacgttacagaacgtattattgctatgtcatttccatcttctggaaggcagtctttctatagaaatccaatcaaggaagttgtgcggtttctagataagaaacaccgaaaccactatcgagtctacaatctatgcagtgaaagagcttacgatcctaagcacttccataatagggtcgttagaatcatgattgatgatcataatgtccccactctacatcagatggtggttttcaccaaggaagtaaatgagtggatggctcaagatcttgaaaacatcgtagcgattcactgtaaaggaggcacagatagaacaggaactatggtttgtgccttccttattgcctctgaaatatgttcaactgcaaaggaaagcctgtattattttggagaaaggcgaacagataaaacccacagcgaaaaatttcagggagtaaaaactccttctcagaagagatatgttgcatattttgcacaagtgaaacatctctacaactggaatctccctccaagacggatactctttataaaacacttcattatttattcgattcctcgttatgtacgtgatctaaaaatccaaatagaaatggagaaaaaggttgtcttttccactatttcattaggaaaatgttcggtacttgataacattacaacagacaaaatattaattgatgtattcgacggtctacctctgtatgatgatgtgaaagtgcagtttttctattcgaatcttcctacatactatgacaattgctcattttacttctggttgcacacatcttttattgaaaataacaggctttatctaccaaaaaatgaattggataatctacataaacaaaaagcacggagaatttatccatcagattttgccgtggagatactttttggcgagaaaatgacttccagtgatgttgtagctggatccgattaagtatagctcccccttccccttctgggaaagaattatgttctttccaaccctgccacatgttcatatatcctaaatctatcctaaatgttccttgaagtatttatttatgtttatatatgtttatatatgttcttcataaatctattacatatatatagataaaa

SEQ ID NO: 193326 - DNA, 1874 bp, Homo sapiens
  Payload ID: 18167
  Gene Name: transmembrane phosphatase with tensin homology
  Uniprot ID: P56180
  ENST ID: ENST00000612746
  CDS Start-End: 469-1710
gggagggcacaacagctgctacctgaacagtttctgacccaacagttacccagcgccggactcgctgcgccccggcggctctagggacccccggcgcctacacttagctccgcgcccgagagaatgttggaccgacgacacaagacctcagacttgtgttattctagcagctgaacacaccccaggctcttctgcccggcagtggctctggaagcagtctggtgtatagagttatggattcactaccagattctactgtatgctcttgacaactatgaccacaatggcagcaagattaagaaaattgtgcattcaattgtatcatcctttgcatttggactatttggagttttcctggtcttactggatgtcactctcatccttgccgacctaattttcactgacagcaaactttatattcctttggagtatcgttctatttctctagctattgccttattttttctcatggatgttcttcttcgagtatttgtagaaaggagacagcagtatttttctgacttatttaacattttagatactgccattattgtgattcttctgctggttgatgtcgtttacattttttttgacattaagttgcttaggaatattcccagatggacacatttacttcgacttctacgacttattattctgttaagaatttttcatctgtttcatcaaaaaagacaacttgaaaagctgataagaaggcgggtttcagaaaacaaaaggcgatacacaagggatggatttgacctagacctcacttacgttacagaacgtattattgctatgtcatttccatcttctggaaggcagtctttctatagaaatccaatcaaggaagttgtgcggtttctagataagaaacaccgaaaccactatcgagtctacaatctatgcagtgaaagagcttacgatcctaagcacttccataatagggtcgttagaatcatgattgatgatcataatgtccccactctacatcagatggtggttttcaccaaggaagtaaatgagtggatggctcaagatcttgaaaacatcgtagcgattcactgtaaaggaggcacagatagaacaggaactatggtttgtgccttccttattgcctctgaaatatgttcaactgcaaaggaaagcctgtattattttggagaaaggcgaacagataaaacccacagcgaaaaatttcagggagtaaaaactccttctcagaagagatatgttgcatattttgcacaagtgaaacatctctacaactggaatctccctccaagacggatactctttataaaacacttcattatttattcgattcctcgttatgtacgtgatctaaaaatccaaatagaaatggagaaaaaggttgtcttttccactatttcattaggaaaatgttcggtacttgataacattacaacagacaaaatattaattgatgtattcgacggtctacctctgtatgatgatgtgaaagtgcagtttttctattcgaatcttcctacatactatgacaattgctcattttacttctggttgcacacatcttttattgaaaataacaggctttatctaccaaaaaatgaattggataatctacataaacaaaaagcacggagaatttatccatcagattttgccgtggagatactttttggcgagaaaatgacttccagtgatgttgtagctggatccgattaagtatagctcccccttccccttctgggaaagaattatgttctttccaaccctgccacatgttcatatatcctaaatctatcctaaatgttccttgaagtatttatttatgtttatatatgtttatatatgttcttcataaatctattacatatatatagataaaa

SEQ ID NO: 193327 - DNA, 755 bp, Homo sapiens
  Payload ID: 18167
  Gene Name: transmembrane phosphatase with tensin homology
  ENST ID: ENST00000612957
  CDS Start-End: 334-755
caagggagggcacaacagctgctacctgaacagtttctgacccaacagttacccagcgccggactcgctgcgccccggcggctctagggacccccggcgcctacacttagctccgcgcccgagagaatgttggaccgacgacacaagacctcagacttgtgttattctagcagctgaacacaccccaggctcttctgcccggcagtggctctggaagcagtctggtgtatagagttatggattcactaccagattctactgtatgctcttgacaactatgaccacaatggtccacccacaaatgaattatcaggagtgaacccagaggcacgtatgaatgaaagtcctgatccgactgacctggcgggagtcatcattgagctcggccccaatgacagcccacacacaagtgaatttaaaggagcagcccgggtgtcacctatcagtgaaagtgtgttagcacgactttccaagtttgaagttgaagatgctgaaaatgttgcttcatatgacagcaagattaagaaaattgtgcattcaattgtatcatcctttgcatttggactatttggagttttcctggtcttactggatgtcactctcatccttgccgacctaattttcactgacagcaaactttatattcctttggagtatcgttctatttctctagctattgccttattttttctcatggatgttcttcttcgagtatttgtagaaaggagacagcagtatttttctgacttatttaa

SEQ ID NO: 193328 - DNA, 2150 bp, Homo sapiens
  Payload ID: 18167
  Gene Name: transmembrane phosphatase with tensin homology
  Uniprot ID: P56180
  ENST ID: ENST00000618007
  CDS Start-End: 331-1986
gggagggcacaacagctgctacctgaacagtttctgacccaacagttacccagcgccggactcgctgcgccccggcggctctagggacccccggcgcctacacttagctccgcgcccgagagaatgttggaccgacgacacaagacctcagacttgtgttattctagcagctgaacacaccccaggctcttctgcccggcagtggctctggaagcagtctggtgtatagagttatggattcactaccagattctactgtatgctcttgacaactatgaccacaatggtccacccacaaatgaattatcaggagtgaacccagaggcacgtatgaatgaaagtcctgatccgactgacctggcgggagtcatcattgagctcggccccaatgacagtccacagacaagtgaatttaaaggagcaaccgaggaggcacctgcgaaagaaagcccacacacaagtgaatttaaaggagcagcccgggtgtcacctatcagtgaaagtgtgttagcacgactttccaagtttgaagttgaagatgctgaaaatgttgcttcatatgacagcaagattaagaaaattgtgcattcaattgtatcatcctttgcatttggactatttggagttttcctggtcttactggatgtcactctcatccttgccgacctaattttcactgacagcaaactttatattcctttggagtatcgttctatttctctagctattgccttattttttctcatggatgttcttcttcgagtatttgtagaaaggagacagcagtatttttctgacttatttaacattttagatactgccattattgtgattcttctgctggttgatgtcgtttacattttttttgacattaagttgcttaggaatattcccagatggacacatttacttcgacttctacgacttattattctgttaagaatttttcatctgtttcatcaaaaaagacaacttgaaaagctgataagaaggcgggtttcagaaaacaaaaggcgatacacaagggatggatttgacctagacctcacttacgttacagaacgtattattgctatgtcatttccatcttctggaaggcagtctttctatagaaatccaatcaaggaagttgtgcggtttctagataagaaacaccgaaaccactatcgagtctacaatctatgcagtgaaagagcttacgatcctaagcacttccataatagggtcgttagaatcatgattgatgatcataatgtccccactctacatcagatggtggttttcaccaaggaagtaaatgagtggatggctcaagatcttgaaaacatcgtagcgattcactgtaaaggaggcacagatagaacaggaactatggtttgtgccttccttattgcctctgaaatatgttcaactgcaaaggaaagcctgtattattttggagaaaggcgaacagataaaacccacagcgaaaaatttcagggagtaaaaactccttctcagaagagatatgttgcatattttgcacaagtgaaacatctctacaactggaatctccctccaagacggatactctttataaaacacttcattatttattcgattcctcgttatgtacgtgatctaaaaatccaaatagaaatggagaaaaaggttgtcttttccactatttcattaggaaaatgttcggtacttgataacattacaacagacaaaatattaattgatgtattcgacggtctacctctgtatgatgatgtgaaagtgcagtttttctattcgaatcttcctacatactatgacaattgctcattttacttctggttgcacacatcttttattgaaaataacaggctttatctaccaaaaaatgaattggataatctacataaacaaaaagcacggagaatttatccatcagattttgccgtggagatactttttggcgagaaaatgacttccagtgatgttgtagctggatccgattaagtatagctcccccttccccttctgggaaagaattatgttctttccaaccctgccacatgttcatatatcctaaatctatcctaaatgttccttgaagtatttatttatgtttatatatgtttatatatgttcttcataaatctattacatatatatagataaaa

SEQ ID NO: 193329 - DNA, 1562 bp, Homo sapiens
  Payload ID: 18168
  Gene Name: transmembrane phosphoinositide 3-phosphatase and tensin homolog 2
  Uniprot ID: Q6XPS3
  ENST ID: ENST00000255310
  CDS Start-End: 46-1383
agtccacccacaaatgaattatcaggagtgaacccagaggcacgtatgaatgaaagtccacagacaaacgaatttaaaggaacaaccgaggaggcacctgcgaaagaaagcccacacacaagtgaatttaaaggagcagccctggtgtcacctatcagtaaaagaatatttggagttttcctggtcttactggatgtcactctcctccttgccgacctaattttcactgacagcaaactttatattcctttggagtatcgttctatttctctagctattggcttattttttctcatggatgttcttcttcgagtatttgtagaaggatggacacatttagttcgacttctacgacttattattctgataagaatttttcatctgcttcatcaaaaaagacaacttgaaaagctgatgagaaggctggtttcagaaaacaaaaggcgatacacaagggatggatttgacctagacctcacttacgttacagaacgtattattgctatgtcatttccatcttctggaaggcagtctttctatagaaatccaattgaggaagttgtgcggtttctagataagaaacatcgaaaccactatcgagtctacaatctatgcagtgaaagagcttatgatcctaagcacttccataatagggtcagtagaatcatgattgatgatcataatgtccccactctacatgagatggtggttttcaccaaggaagtaaatgagtggatggctcaagatcttgaaaacatcgtagcgattcactgtaaaggaggcaaaggaagaaccgggactatggtttgtgccctccttattgcctccgaaatatttttaactgccgaggaaagcctatattattttggagaaaggcgaaccaataaaacccacagcaataaatttcagggagtagaaactccttctcagaatagatatgttggatattttgcacaagtgaaacatctctacaactggaatctccctccaagacggatactctttataaaaagattcattatttattcgattcgtggtgatgtatgtgatctaaaagtccaagtagtaatggagaaaaaggttgtcttttccagtacttcattaggaaattgttcgatattgcatgacattgaaacagacaaaatattaattaatgtatatgacggtccacctctgtatgatgatgtgaaagtgcagtttttctcttcgaatcttcctaaatactatgacaattgtccatttttcttctggttcaacacgtcttttattcaaaataacaggctttgtctaccaagaaatgaattggataatccacataaacaaaaagcatggaaaatttatccaccagaatttgctgtggagatactttttggcgagaaatgacttccaatgatgttgtagctggatccgactaagtatagctcccccttccccttctgggaaagaattatgttctttccaacccctgccacatgttcatgtgtcctaagtcttccttgatgatgcatctatatttatatatgtttatatatgttcttcataaatctattaaatatatatag

SEQ ID NO: 193330 - DNA, 1677 bp, Homo sapiens
  Payload ID: 18168
  Gene Name: transmembrane phosphoinositide 3-phosphatase and tensin homolog 2
  Uniprot ID: Q6XPS3
  ENST ID: ENST00000382978
  CDS Start-End: 44-1492
tccacccacaaatgaattatcaggagtgaacccagaggcacgtatgaatgaaagtccacagacaaacgaatttaaaggaacaaccgaggaggcacctgcgaaagaaagcccacacacaagtgaatttaaaggagcagccctggtgtcacctatcagtaaaagtatgttagaacgactttccaagtttgaagttgaagatgctgaaaatgttgcttcatatgacagcaagattaagaaaattgtgcattcaattgtatcatcctttgcatttggaatatttggagttttcctggtcttactggatgtcactctcctccttgccgacctaattttcactgacagcaaactttatattcctttggagtatcgttctatttctctagctattggcttattttttctcatggatgttcttcttcgagtatttgtagaaggatggacacatttagttcgacttctacgacttattattctgataagaatttttcatctgcttcatcaaaaaagacaacttgaaaagctgatgagaaggctggtttcagaaaacaaaaggcgatacacaagggatggatttgacctagacctcacttacgttacagaacgtattattgctatgtcatttccatcttctggaaggcagtctttctatagaaatccaattgaggaagttgtgcggtttctagataagaaacatcgaaaccactatcgagtctacaatctatgcagtgaaagagcttatgatcctaagcacttccataatagggtcagtagaatcatgattgatgatcataatgtccccactctacatgagatggtggttttcaccaaggaagtaaatgagtggatggctcaagatcttgaaaacatcgtagcgattcactgtaaaggaggcaaaggaagaaccgggactatggtttgtgccctccttattgcctccgaaatatttttaactgccgaggaaagcctatattattttggagaaaggcgaaccaataaaacccacagcaataaatttcagggagtagaaactccttctcagaatagatatgttggatattttgcacaagtgaaacatctctacaactggaatctccctccaagacggatactctttataaaaagattcattatttattcgattcgtggtgatgtatgtgatctaaaagtccaagtagtaatggagaaaaaggttgtcttttccagtacttcattaggaaattgttcgatattgcatgacattgaaacagacaaaatattaattaatgtatatgacggtccacctctgtatgatgatgtgaaagtgcagtttttctcttcgaatcttcctaaatactatgacaattgtccatttttcttctggttcaacacgtcttttattcaaaataacaggctttgtctaccaagaaatgaattggataatccacataaacaaaaagcatggaaaatttatccaccagaatttgctgtggagatactttttggcgagaaatgacttccaatgatgttgtagctggatccgactaagtatagctcccccttccccttctgggaaagaattatgttctttccaacccctgccacatgttcatgtgtcctaagtcttccttgatgatgcatctatatttatatatgtttatatatgttcttcataaatctattaaatatatatagataaaa

SEQ ID NO: 193331 - DNA, 1558 bp, Homo sapiens
  Payload ID: 18168
  Gene Name: transmembrane phosphoinositide 3-phosphatase and tensin homolog 2
  Uniprot ID: Q6XPS3
  ENST ID: ENST00000390680
  CDS Start-End: 211-1548
atgatcgaagcagtacaaatcaggggagaacgtgcccaagacctggagaactgataataaattgtggtttatccttgcaatggaacactatatggaagtgaaaatgattgaaatagagctatacacatcatcacagacaaatttcagaaacaacgctgagtgaaaaatccacccacaaatgaattatcaggagtgaacccagaggcacgtatgaatgaaagtccacagacaaacgaatttaaaggaacaaccgaggaggcacctgcgaaagaaagcccacacacaagtgaatttaaaggagcagccctggtgtcacctatcagtaaaagaatatttggagttttcctggtcttactggatgtcactctcctccttgccgacctaattttcactgacagcaaactttatattcctttggagtatcgttctatttctctagctattggcttattttttctcatggatgttcttcttcgagtatttgtagaaggatggacacatttagttcgacttctacgacttattattctgataagaatttttcatctgcttcatcaaaaaagacaacttgaaaagctgatgagaaggctggtttcagaaaacaaaaggcgatacacaagggatggatttgacctagacctcacttacgttacagaacgtattattgctatgtcatttccatcttctggaaggcagtctttctatagaaatccaattgaggaagttgtgcggtttctagataagaaacatcgaaaccactatcgagtctacaatctatgcagtgaaagagcttatgatcctaagcacttccataatagggtcagtagaatcatgattgatgatcataatgtccccactctacatgagatggtggttttcaccaaggaagtaaatgagtggatggctcaagatcttgaaaacatcgtagcgattcactgtaaaggaggcaaaggaagaaccgggactatggtttgtgccctccttattgcctccgaaatatttttaactgccgaggaaagcctatattattttggagaaaggcgaaccaataaaacccacagcaataaatttcagggagtagaaactccttctcagaatagatatgttggatattttgcacaagtgaaacatctctacaactggaatctccctccaagacggatactctttataaaaagattcattatttattcgattcgtggtgatgtatgtgatctaaaagtccaagtagtaatggagaaaaaggttgtcttttccagtacttcattaggaaattgttcgatattgcatgacattgaaacagacaaaatattaattaatgtatatgacggtccacctctgtatgatgatgtgaaagtgcagtttttctcttcgaatcttcctaaatactatgacaattgtccatttttcttctggttcaacacgtcttttattcaaaataacaggctttgtctaccaagaaatgaattggataatccacataaacaaaaagcatggaaaatttatccaccagaatttgctgtggagatactttttggcgagaaatgacttccaatga

SEQ ID NO: 193332 - DNA, 1652 bp, Homo sapiens
  Payload ID: 18168
  Gene Name: transmembrane phosphoinositide 3-phosphatase and tensin homolog 2
  Uniprot ID: Q6XPS3
  ENST ID: ENST00000400103
  CDS Start-End: 238-1473
agaccaaattggataaaagaggacgaagtcatgaaagggatgcttcttcctcttagtatatttgtcactctaagttggtggtatccaatcccttaggaacgaacctctgaggttttccatttatgagactctcctactactagagtgggccaaagggagagagaatcctatttggagcaatgaggaggtaacagtccacccacaaatgaattatcaggagtgaacccagaggcacgtatgaatgaaagtccacagacaaacgaatttaaaggaacaaccgaggaggcacctgcgaaagaaagcccacacacaagtgaatttaaaggagcagccctggtgtcacctatcagtaaaagtatgttagaacgactttccaagtttgaagttgaagatgctgaaaatgttgcttcatatgaatggacacatttagttcgacttctacgacttattattctgataagaatttttcatctgcttcatcaaaaaagacaacttgaaaagctgatgagaaggctggtttcagaaaacaaaaggcgatacacaagggatggatttgacctagacctcacttacgttacagaacgtattattgctatgtcatttccatcttctggaaggcagtctttctatagaaatccaattgaggaagttgtgcggtttctagataagaaacatcgaaaccactatcgagtctacaatctatgcagtgaaagagcttatgatcctaagcacttccataatagggtcagtagaatcatgattgatgatcataatgtccccactctacatgagatggtggttttcaccaaggaagtaaatgagtggatggctcaagatcttgaaaacatcgtagcgattcactgtaaaggaggcaaaggaagaaccgggactatggtttgtgccctccttattgcctccgaaatatttttaactgccgaggaaagcctatattattttggagaaaggcgaaccaataaaacccacagcaataaatttcagggagtagaaactccttctcagaatagatatgttggatattttgcacaagtgaaacatctctacaactggaatctccctccaagacggatactctttataaaaagattcattatttattcgattcgtggtgatgtatgtgatctaaaagtccaagtagtaatggagaaaaaggttgtcttttccagtacttcattaggaaattgttcgatattgcatgacattgaaacagacaaaatattaattaatgtatatgacggtccacctctgtatgatgatgtgaaagtgcagtttttctcttcgaatcttcctaaatactatgacaattgtccatttttcttctggttcaacacgtcttttattcaaaataacaggctttgtctaccaagaaatgaattggataatccacataaacaaaaagcatggaaaatttatccaccagaatttgctgtggagatactttttggcgagaaatgacttccaatgatgttgtagctggatccgactaagtatagctcccccttccccttctgggaaagaattatgttctttccaacccctgccacatgttcatgtgtcctaagtcttccttgatgatgcatctatatttatatatgtttatatatgttcttcataaatctattaaatatatatag

SEQ ID NO: 193333 - DNA, 1793 bp, Homo sapiens
  Payload ID: 18168
  Gene Name: transmembrane phosphoinositide 3-phosphatase and tensin homolog 2
  Uniprot ID: Q6XPS3
  ENST ID: ENST00000400230
  CDS Start-End: 46-1614
agtccacccacaaatgaattatcaggagtgaacccagaggcacgtatgaatgaaagtccacagacaaacgaatttaaaggaacaaccgaggaggcacctgcgaaagaaagcccacacacaagtgaatttaaaggagcagccctggtgtcacctatcagtaaaagtatgttagaacgactttccaagtttgaagttgaagatgctgaaaatgttgcttcatatgacagcaagattaagaaaattgtgcattcaattgtatcatcctttgcatttggaatatttggagttttcctggtcttactggatgtcactctcctccttgccgacctaattttcactgacagcaaactttatattcctttggagtatcgttctatttctctagctattggcttattttttctcatggatgttcttcttcgagtatttgtagaagggagacagcagtatttttctgacttatttaacattttagatactgccattattgtgattcctctgctggttgatgtcatttacattttttttgacattaagttgcttaggaatattcccagatggacacatttagttcgacttctacgacttattattctgataagaatttttcatctgcttcatcaaaaaagacaacttgaaaagctgatgagaaggctggtttcagaaaacaaaaggcgatacacaagggatggatttgacctagacctcacttacgttacagaacgtattattgctatgtcatttccatcttctggaaggcagtctttctatagaaatccaattgaggaagttgtgcggtttctagataagaaacatcgaaaccactatcgagtctacaatctatgcagtgaaagagcttatgatcctaagcacttccataatagggtcagtagaatcatgattgatgatcataatgtccccactctacatgagatggtggttttcaccaaggaagtaaatgagtggatggctcaagatcttgaaaacatcgtagcgattcactgtaaaggaggcaaaggaagaaccgggactatggtttgtgccctccttattgcctccgaaatatttttaactgccgaggaaagcctatattattttggagaaaggcgaaccaataaaacccacagcaataaatttcagggagtagaaactccttctcagaatagatatgttggatattttgcacaagtgaaacatctctacaactggaatctccctccaagacggatactctttataaaaagattcattatttattcgattcgtggtgatgtatgtgatctaaaagtccaagtagtaatggagaaaaaggttgtcttttccagtacttcattaggaaattgttcgatattgcatgacattgaaacagacaaaatattaattaatgtatatgacggtccacctctgtatgatgatgtgaaagtgcagtttttctcttcgaatcttcctaaatactatgacaattgtccatttttcttctggttcaacacgtcttttattcaaaataacaggctttgtctaccaagaaatgaattggataatccacataaacaaaaagcatggaaaatttatccaccagaatttgctgtggagatactttttggcgagaaatgacttccaatgatgttgtagctggatccgactaagtatagctcccccttccccttctgggaaagaattatgttctttccaacccctgccacatgttcatgtgtcctaagtcttccttgatgatgcatctatatttatatatgtttatatatgttcttcataaatctattaaatatatatag

SEQ ID NO: 193334 - DNA, 1220 bp, Homo sapiens
  Payload ID: 18168
  Gene Name: transmembrane phosphoinositide 3-phosphatase and tensin homolog 2
  ENST ID: ENST00000462409
  CDS Start-End: 1-1014
atgaatgaaagtccacagacaaacgaatttaaaggaacaaccgaggaggcacctgcgaaagaaagcccacacacaagtgaatttaaaggagcagccctggtgtcacctatcagtaaaagatggacacatttagttcgacttctacgacttattattctgataagaatttttcatctgcttcatcaaaaaagacaacttgaaaagctgatgagaaggctggtttcagaaaacaaaaggcgatacacaagggatggatttgacctagacctcacttacgttacagaacgtattattgctatgtcatttccatcttctggaaggcagtctttctatagaaatccaattgaggaagttgtgcggtttctagataagaaacatcgaaaccactatcgagtctacaatctatgcagtgaaagagcttatgatcctaagcacttccataatagggtcagtagaatcatgattgatgatcataatgtccccactctacatgagatggtggttttcaccaaggaagtaaatgagtggatggctcaagatcttgaaaacatcgtagcgattcactgtaaaggaggcaaaggaagaaccgggactatggtttgtgccctccttattgcctccgaaatatttttaactgccgaggaaagcctatattattttggagaaaggcgaaccaataaaacccacagcaataaatttcagggagtagaaactccttctcagaatagatatgttggatattttgcacaagtgaaacatctctacaactggaatctccctccaagacggatactctttataaaaagattcattatttattcgattcgtggtgatgtatgtgatctaaaagtccaagtagtaatggagaaaaaggttgtcttttccagtacttcattaggaaattgttcgagagaagagggcagcacacagggccaactggaagggggagccatccaggagacctgtgctcgactgatgggtgggagcaatagcgagagagagggagggacctgagagtggaagcctttattgggataatcttcctaaatactatgacaattgtccatttttcttctggttcaacacgtcttttattcaaaataacaggctttgtctaccaagaaatgaattggataatccacataaacaaaaagcatggaaaatttatccaccagaatttgctgtggagatactttttggcgagaaatgacttccaatga

SEQ ID NO: 193335 - DNA, 3054 bp, Homo sapiens
  Payload ID: 18169
  Gene Name: transmembrane protease, serine 11A
  ENST ID: ENST00000334830
  CDS Start-End: 748-2013
ctgagggagaaggaaagggaccaagagtaggacattgtcaaacatggttttagtctcattttttacaaagaacatgtattaatatgttgtttgtctaattgaaaatgtttatttcttctctttttttcattctgataaatgtctgtcaatgttttatcacattaagtcatttggggaaacatatagttttatattaatttatttgcctgtactctcagaagtgggtatttaaaaaaactattatgtattagtaaattcactatgcttctgtaagatacctgctgttcaacatgaatttatggaatatttcttgagttatatttttattatgtatttagattttaagatctgtttgtttttatctagagcttttatgtgacagtttctttaaaatacttatatacctaccataatcttctttaaattcttaattctagtacattcctaaggtatttctcattctaatctttgtaaccagtttctcctcctttaacaaaattagtccatactaaaaaaatattgctttcttgttgggactatcctgtctctggctttcttcaaggccttctatgggttgaaacttctctgttcagacttgtcaaactagtttcatttcaactacttgtaatttgtttccttatttctttgagccgtagacttctaatacatctagagatgtcatatagttgattagaaagttgagttcagtgggtgcagacctgcaagatcatattcttcctcctgtacatgatgtatcggacagtgggatttggcacccgaagcagaaatctgaagccatggatgattgccgttctcattgtgttgtccctgacagtggtggcagtgaccataggtctcctggttcacttcctagtatttgaccaaaaaaaggagtactatcatggctcctttaaaattttagatccacaaatcaataacaatttcggacaaagcaacacatatcaacttaaggacttacgagagacgaccgaaaatttggtgagtcaggtggatgagatatttatagattcagcctggaagaaaaattatatcaagaaccaagtagtcagactgactccagaggaagatggtgtgaaagtagatgtcattatggtgttccagttcccctctactgaacaaagggcagtaagagagaagaaaatccaaagcatcttaaatcagaagataaggaatttaagagccttgccaataaatgcctcatcagttcaagttaatgcaatgagctcatcaacaggggagttaactgtccaagcaagttgtggtaaacgagttgttccattaaacgtcaacagaatagcatctggagtcattgcacccaaggcggcctggccttggcaagcttcccttcagtatgataacatccatcagtgtggggccaccttgattagtaacacatggcttgtcactgcagcacactgcttccagaagtataaaaatccacatcaatggactgttagttttggaacaaaaatcaaccctcccttaatgaaaagaaatgtcagaagatttattatccatgagaagtaccgctctgcagcaagagagtacgacattgctgttgtgcaggtctcttccagagtcaccttttcggatgacatacgccagatttgtttgccagaagcctctgcatccttccaaccaaatttgactgtccacatcacaggatttggagcactttactatggtggggaatcccaaaatgatctccgagaagccagagtgaaaatcataagtgatgatgtctgcaagcaaccacaggtgtatggcaatgatataaaacctggaatgttctgtgccggatatatggaaggaatttatgatgcctgcaggggtgattctgggggacctttagtcacaagggatctgaaagatacgtggtatctcattggaattgtaagctggggagataactgtggtcaaaaggacaagcctggagtctacacacaagtgacttattaccgaaactggattgcttcaaaaacaggcatctaattcacgataaaagttaaacaaagaaagctgtatgcaggtcatatatgcatgagaattcaactatttagtgggtgtagtacaacaaagtgatattaaattactggatctagtaacatgaaacacacaacgtaagttatttagaatcactttaatcaaccaataatccttagccaatttataagggacttttatttgtaaagtaatggatctggcttgaaaaatacggtagagatacttagctctttaaatcacgaatgttgaagtaccagtgagactcaatacatatttttgaagatagtccatgggatttttagaatgtcgttgtcaagggtctccttttaactgagaaactttttgaactcacaaagtgttcaagaaacccttgtataattccctacatttctctcgagctcacaaatacttttttttctttttccttattcaatcagattttccaaagtacctttccaccataagaaatgaattttctacttctacacccatttgagagacaccaataaaagaaagtcatatgtaggaaacaaagtctgatagtaaaacaagccagagatcttctaactttttttagttataaaacctctaatttttggtgacttttctacacacacacacacatacagtcacatagatattcttatcctacagatataatcagaaaaatcccgattaatgaattatatatagatagatagagtgattagttaatcaaaactatatatttgttaaaaatttgggagaaggtgatggtaatttcattagtcccaaaacaccggcataagaaatttgacatttcacagatgcacttacatattttgaccacaagggggaaattttgtgcattattattgtagggttaaatgcctgaaaaaaataagcatttactaataccttgaaaaatcaaagaacattatgttcctccgtagcaagaaaaattttatgccctcgcattgctacagccaaatagcttataaggcttatggcaatgtcccaactattgcaatcataaaaccctagttttag

SEQ ID NO: 193336 - DNA, 1350 bp, Homo sapiens
  Payload ID: 18169
  Gene Name: transmembrane protease, serine 11A
  ENST ID: ENST00000396188
  CDS Start-End: 81-1253
atctagagatgtcatatagttgattagaaagttgagttcagtgggtgcagacctgcaagatcatattcttcctcctgtacatgatgtatcggacagtgggatttggcacccgaagcagaaatctgaagccatggatgattgccgttctcattgtgttgtccctgacagtggtggcagtgaccataggtctcctggttcacttcctagtatttgaccaaaaaaaggagtactatcatggctcctttaaaattttagatccacaaatcaataacaatttcggacaaagcaacacatatcaacttaaggacttacgagagacgaccgaaaatttggtggatgagatatttatagattcagcctggaagaaaaattatatcaagaaccaagtagtcagactgactccagaggaagatggtgtgaaagtagatgtcattatggtgttccagttcccctctactgaacaaagggcagtaagagagaagaaaatccaaagcatcttaaatcagaagataaggaatttaagagccttgccaataaatgcctcatcagttcaagttaatgcaatgagctcatcaacaggggagttaactgtccaagcaagttgtggtaaacgagttgttccattaaacgtcaacagaatagcatctggagtcattgcacccaaggcggcctggccttggcaagcttcccttcagtatgataacatccatcagtgtggggccaccttgattagtaacacatggcttgtcactgcagcacactgcttccagaagtataaaaatccacatcaatggactgttagttttggaacaaaaatcaaccctcccttaatgaaaagaaatgtcagaagatttattatccatgagaagtaccgctctgcagcaagagagtacgacattgctgttgtgcaggtctcttccagagtcaccttttcggatgacatacgccagatttgtttgccagaagcctctgcatccttccaaccaaatttgactgtccacatcacaggatttggagcactttactatggtggggaatcccaaaatgatctccgagaagccagagtgaaaatcataagtgatgatgtctgcaagcaaccacaggtgtatggcaatgatataaaacctggaatgttctgtgccggatatatggaaggaatttatgatgcctgcaggggtgattctgggacctttagtcacaagggatctgaaagatacgtggtatctcattggaattgtaagctggggagataactgtggtcaaaaggacaagcctggagtctacacacaagtgacttattaccgaaactggattgcttcaaaaacaggcatctaattcacgataaaagtt

SEQ ID NO: 193337 - DNA, 3247 bp, Homo sapiens
  Payload ID: 18169
  Gene Name: transmembrane protease, serine 11A
  Uniprot ID: Q6ZMR5
  ENST ID: ENST00000508048
  CDS Start-End: 34-1290
cagacctgcaagatcatattcttcctcctgtacatgatgtatcggacagtgggatttggcacccgaagcagaaatctgaagccatggatgattgccgttctcattgtgttgtccctgacagtggtggcagtgaccataggtctcctggttcacttcctagtatttgaccaaaaaaaggagtactatcatggctcctttaaaattttagatccacaaatcaataacaatttcggacaaagcaacacatatcaacttaaggacttacgagagacgaccgaaaatttggtggatgagatatttatagattcagcctggaagaaaaattatatcaagaaccaagtagtcagactgactccagaggaagatggtgtgaaagtagatgtcattatggtgttccagttcccctctactgaacaaagggcagtaagagagaagaaaatccaaagcatcttaaatcagaagataaggaatttaagagccttgccaataaatgcctcatcagttcaagttaatgcaatgagctcatcaacaggggagttaactgtccaagcaagttgtggtaaacgagttgttccattaaacgtcaacagaatagcatctggagtcattgcacccaaggcggcctggccttggcaagcttcccttcagtatgataacatccatcagtgtggggccaccttgattagtaacacatggcttgtcactgcagcacactgcttccagaagtataaaaatccacatcaatggactgttagttttggaacaaaaatcaaccctcccttaatgaaaagaaatgtcagaagatttattatccatgagaagtaccgctctgcagcaagagagtacgacattgctgttgtgcaggtctcttccagagtcaccttttcggatgacatacgccagatttgtttgccagaagcctctgcatccttccaaccaaatttgactgtccacatcacaggatttggagcactttactatggtggggaatcccaaaatgatctccgagaagccagagtgaaaatcataagtgatgatgtctgcaagcaaccacaggtgtatggcaatgatataaaacctggaatgttctgtgccggatatatggaaggaatttatgatgcctgcaggggtgattctgggggacctttagtcacaagggatctgaaagatacgtggtatctcattggaattgtaagctggggagataactgtggtcaaaaggacaagcctggagtctacacacaagtgacttattaccgaaactggattgcttcaaaaacaggcatctaattcacgataaaagttaaacaaagaaagctgtatgcaggtcatatatgcatgagaattcaactatttagtgggtgtagtacaacaaagtgatattaaattactggatctagtaacatgaaacacacaacgtaagttatttagaatcactttaatcaaccaataatccttagccaatttataagggacttttatttgtaaagtaatggatctggcttgaaaaatacggtagagatacttagctctttaaatcacgaatgttgaagtaccagtgagactcaatacatatttttgaagatagtccatgggatttttagaatgtcgttgtcaagggtctccttttaactgagaaactttttgaactcacaaagtgttcaagaaacccttgtataattccctacatttctctcgagctcacaaatacttttttttctttttccttattcaatcagattttccaaagtacctttccaccataagaaatgaattttctacttctacacccatttgagagacaccaataaaagaaagtcatatgtaggaaacaaagtctgatagtaaaacaagccagagatcttctaactttttttagttataaaacctctaatttttggtgacttttctacacacacacacacatacagtcacatagatattcttatcctacagatataatcagaaaaatcccgattaatgaattatatatagatagatagagtgattagttaatcaaaactatatatttgttaaaaatttgggagaaggtgatggtaatttcattagtcccaaaacaccggcataagaaatttgacatttcacagatgcacttacatattttgaccacaagggggaaattttgtgcattattattgtagggttaaatgcctgaaaaaaataagcatttactaataccttgaaaaatcaaagaacattatgttcctccgtagcaagaaaaattttatgccctcgcattgctacagccaaatagcttataaggcttatggcaatgtcccaactattgcaatcataaaaccctagttttagaaaaatttgaaaataaatataaaatttgagcacctactgcatataacacatggggctataacatataacatatagtatgttttctcttttggaccactttgttatatgtggtccacaagagaaaacatactccatcagcaacgtgtctcctgaagtcattaggagagtaaggctcatgtatttcgtaatacaattaaattaaggctttatggaagcaattattctgcttggcaatgcctgtgaaatattatggtctgcaggctggggagtcatttactcatttagcccaaatataagacaaatcattggaacgatgaacttgctttataataatttccctcacatgctattgagaaggcatgaaaataatcctaaaatatctaaaagagatatgcagttcactcataaaacacttgattcataatttagactcatagaattttaaagctgagaagagattgcatgtcacataggccaatatacttatgttatgtttaagaatatgagtatattcttaactatttttattgaattcttaactatttttattgaatcatcagatctgtaaaattttaagtgagagctattgaacctgtattaagatagaaaactcttaagataagaattttaaatgacgagattcatttaggcagctggctgccaattctctgaattcacttcaagacaaagtttcttcttcatatataaatatacataggcatataaattattctatattatggtggtaaaacttaatgctgactttggatgttcagattcaggaaatgatcttagaattatgaactttgtatttttaaactatttggtgcagcatttcattttgggtcacatgtaagcagatattgatatgtcatttttaatctaataaagttggtgatcagagcattctacaaac

SEQ ID NO: 193338 - DNA, 1190 bp, Homo sapiens
  Payload ID: 18169
  Gene Name: transmembrane protease, serine 11A
  ENST ID: ENST00000513536
  CDS Start-End: 1-1158
ggatttggcacccgaagcagaaatctgaagccatggatgattgccgttctcattgtgttgtccctgacagtggtggcagtgaccataggtctcctggttcacttcctagtatttgatccacaaatcaataacaatttcggacaaagcaacacatatcaacttaaggacttacgagagacgaccgaaaatttggtggatgagatatttatagattcagcctggaagaaaaattatatcaagaaccaagtagtcagactgactccagaggaagatggtgtgaaagtagatgtcattatggtgttccagttcccctctactgaacaaagggcagtaagagagaagaaaatccaaagcatcttaaatcagaagataaggaatttaagagccttgccaataaatgcctcatcagttcaagttaatggttgtggtaaacgagttgttccattaaacgtcaacagaatagcatctggagtcattgcacccaaggcggcctggccttggcaagcttcccttcagtatgataacatccatcagtgtggggccaccttgattagtaacacatggcttgtcactgcagcacactgcttccagaagtataaaaatccacatcaatggactgttagttttggaacaaaaatcaaccctcccttaatgaaaagaaatgtcagaagatttattatccatgagaagtaccgctctgcagcaagagagtacgacattgctgttgtgcaggtctcttccagagtcaccttttcggatgacatacgccagatttgtttgccagaagcctctgcatccttccaaccaaatttgactgtccacatcacaggatttggagcactttactatggtggggaatcccaaaatgatctccgagaagccagagtgaaaatcataagtgatgatgtctgcaagcaaccacaggtgtatggcaatgatataaaacctggaatgttctgtgccggatatatggaaggaatttatgatgcctgcaggggtgattctgggggacctttagtcacaagggatctgaaagatacgtggtatctcattggaattgtaagctggggagataactgtggtcaaaaggacaagcctggagtctacacacaagtgacttattaccgaaactggattgcttcaaaaacaggcatctaattcacgataaaagttaaacaaagaaagctgta

SEQ ID NO: 193339 - DNA, 2671 bp, Homo sapiens
  Payload ID: 18170
  Gene Name: transmembrane protease, serine 11B
  Uniprot ID: Q86T26
  ENST ID: ENST00000332644
  CDS Start-End: 163-1413
aaaaaccaagctccaacactggatgtagcacataagtcaaaagctgcgtcagaaggttctaacttttgtcatcactattaccagcattgtcatcgttatcgttatcttcgtcatcatcattaccaccgttatacctgatactgccataacaatcagaacattatgtacaggcacggcatatcttcccaaagatcttggccactatggactacgatctttatttttcttggagtggcggcaatcttgggagtaaccattggtcttcttgttcattttctggcagttgagaagacttactattatcaaggtgattttcatatttctggagtcacatacaatgataattgtgaaaacgcagcttcacaagccagcacaaatctaagcaaagatattgagactaagatgttaaatgcatttcaaaattccagtatatataaggaatatgtcaaatctgaggtcatcaaacttctgcctaatgccaatggttcaaatgtgcagttacagctgaaattcaagtttcctccagcagaaggagttagcatgaggactaaaatcaaggctaaattacatcagatgttgaaaaacaacatggcatcctggaatgcagttcctgcttccattaaactcatggaaatcagcaaggctgcttctgaaatgcttaccaacaactgttgtgggagacaagtagccaacagtatcataactggcaacaaaattgtgaatggaaaaagctccctggagggggcatggccatggcaggccagcatgcaatggaaaggccgtcactactgtggagcctctctgatcagcagcaggtggctattatctgcagctcactgctttgctaagaaaaataattcaaaagattggactgtcaactttggaattgtagtaaataaaccatatatgacacggaaagtccaaaacattatttttcatgaaaattatagcagtcctgggcttcatgatgatattgcccttgtgcagcttgctgaagaagtttcttttacagagtacattcgtaagatttgtcttcctgaagccaaaatgaagctctcagaaaatgacaatgttgtagttacaggttggggaacactttatatgaatggttcatttccagtgatacttcaagaagactttttgaagattattgacaacaaaatttgcaatgcctcatatgcatactctggctttgtgactgatacaatgttatgtgctggatttatgtcaggagaagctgatgcatgtcagaatgattctggtggaccactagcttaccctgattccagaaatatctggcatcttgttggaatagtaagctggggtgatggatgtggtaaaaagaataagccaggtgtctatactcgagtgacttcttatcgcaattggattacatccaagactggactctgaaaaaaaaggaattatacaaaggaacataaagaccactgtaggctatccttatctgtggctttgggatctttttattttgattgttggtaaactaatcattttattatatataaaaatataaatgtctttattaatattttattatatctaaaacactgtccatgcatttattaatcttttaaattaatgtaagagataggaagaggccaggtgtagtggctcatgcctgtaatcctagcactttgagaggccgagataggcggattgcttgagcccaggagtttgagggcagcctgggaaacatggctaaatccgtgttcaaaaaatacaaaaattagctaggcatggtggcgtgcacctatagtcccagctattcaggaggctgaggtgggaggattgcttgagcccagcaggttgaggctgtggtgatttgtgattgcgccaccactgcactccagcctgggcaacagagtgagaccctgtctcaaaaaaaaaaaaaaaaaaaggagagaagaaaataaagaaggctaatatataatttttcttaatagctgagttgtgattcattttaccattatattcagaattgaccttaatttgttttccagaatcaaaagaaaataaaatataaattttgaaactatgagaacatatataggggatttatcaaatgagttactttttattatatcaattataatttcattttattaactggaataagtgcgaaagtgtacattactttttaacttatatgtgaaatgattcatgtacctcacaaaatcatgcaatcttgcagtgaagaaggagtatcagagctccagctacactgagtctttcaatttacagatcaagaaactgaagaccagagaagagaaatgatttggttaaagtcactctccatcatctgtgataagttgacaaatttatccttacacaaatttgtcctcattgagttgacatccaaaatttgtcaggaattaaagaatgacttttgagtggcaattatttatataacattttccattgtcttcatattcaccttttgtcatttgtttgctttctcttgcagcaaaaataatatgaggtcatcaagggcagagaactgtgtggcatctccttatagtaaaagtgcaatcatatggatggctaactttgtaatctctacaaataatttaccttatgtaattttccaaatgtaaaagtcaccaaaaacttaaaggcattaaaataaactaaaaaagtactcatttcttca

SEQ ID NO: 193340 - DNA, 2817 bp, Homo sapiens
  Payload ID: 18171
  Gene Name: transmembrane protease, serine 11D
  Uniprot ID: O60235
  ENST ID: ENST00000283916
  CDS Start-End: 100-1356
actatagatcacacgtaatacatgagagtcattcatttgagtgggaatctcaaagcagttgagtaggcagaaaaaagaacctcttcattaaggattaaaatgtataggccagcacgtgtaacttcgacttcaagatttctgaatccatatgtagtatgtttcattgtcgtcgcaggggtagtgatcctggcagtcaccatagctctacttgtttactttttagcttttgatcaaaaatcttacttttataggagcagttttcaactcctaaatgttgaatataatagtcagttaaattcaccagctacacaggaatacaggactttgagtggaagaattgaatctctgattactaaaacattcaaagaatcaaatttaagaaatcagttcatcagagctcatgttgccaaactgaggcaagatggtagtggtgtgagagcggatgttgtcatgaaatttcaattcactagaaataacaatggagcatcaatgaaaagcagaattgagtctgttttacgacaaatgctgaataactctggaaacctggaaataaacccttcaactgagataacatcacttactgaccaggctgcagcaaattggcttattaatgaatgtggggccggtccagacctaataacattgtctgagcagagaatccttggaggcactgaggctgaggagggaagctggccgtggcaagtcagtctgcggctcaataatgcccaccactgtggaggcagcctgatcaataacatgtggatcctgacagcagctcactgcttcagaagcaactctaatcctcgtgactggattgccacgtctggtatttccacaacatttcctaaactaagaatgagagtaagaaatattttaattcataacaattataaatctgcaactcatgaaaatgacattgcacttgtgagacttgagaacagtgtcacctttaccaaagatatccatagtgtgtgtctcccagctgctacccagaatattccacctggctctactgcttatgtaacaggatggggcgctcaagaatatgctggccacacagttccagagctaaggcaaggacaggtcagaataataagtaatgatgtatgtaatgcaccacatagttataatggagccatcttgtctggaatgctgtgtgctggagtacctcaaggtggagtggacgcatgtcagggtgactctggtggcccactagtacaagaagactcacggcggctttggtttattgtggggatagtaagctggggagatcagtgtggcctgccggataagccaggagtgtatactcgagtgacagcctaccttgactggattaggcaacaaactgggatctagtgcaacaagtgcatccctgttgcaaagtctgtatgcaggtgtgcctgtcttaaattccaaagctttacatttcaactgaaaaagaaactagaaatgtcctaatttaacatcttgttacataaatatggtttaacaaacactgtttaacctttctttattattaaaggttttctattttctccagagaactatatgaatgttgcatagtactgtggctgtgtaacagaagaaacacactaaactaattacaaagttaacaatttcattacagttgtgctaaatgcccgtagtgagaagaacaggaaccttgagcatgtatagtagaggaacctgcacaggtctgatgggtcagaggggtcttctctgggtttcactgaggatgagaagtaagcaaactgtggaaacatgcaaaggaaaaagtgatagaataatattcaagacaaaaagaacagtatgaggcaagagaaataatatgtatttaaaatttttggttactcaatatcttatacttagtatgagtcctaaaattaaaaatgtgaaactgttgtactatacgtataacctaaccttaattattctgtaagaacatgcttccataggaaatagtggataattttcagctatttaaggcaaaagctaaaatagttcactcctcaactgagacccaaagaattatagatatttttcatgatgacccatgaaaaatatcactcatctacataaaggagagactatatctattttatagagaagctaagaaatatacctacacaaacttgtcaggtgctttacaactacatagtactttttaacaacaaaataataattttaagaatgaaaaatttaatcatcgggaagaacgtcccactacagacttcctatcactggcagttatatttttgagcgtaaaagggtcgtcaaacgctaaatctaagtaacgaattgaaagtttaaagagggggaagagttggtttgcaaaggaaaagtttaaatagcttaatatcaatagaatgatcctgaagacagaaaaaactttgtcactcttcctctctcattttctttctctctctctccccttctcatacacatgcctcccccaccaaagaatataatgtaaattaaatccactaaaatgtaatggcatgaaaatctctgtagtctgaatcactaatattcctgagtttttatgagctcctagtacagctaaagtttgcctatgcatgatcatctatgcgtcagagcttcctccttctacaagctaactccctgcatctgggcatcaggactgctccatacatttgctgaaaacttcttgtatttcctgatgtaaaattgtgcaaacacctacaataaagccatctacttttagggaaagggagttgaaaatgcaaccaactcttggcgaactgtacaaacaaatctttgctatactttatttcaaataaattctttttaaaataa

SEQ ID NO: 193341 - DNA, 194 bp, Homo sapiens
  Payload ID: 18171
  Gene Name: transmembrane protease, serine 11D
  ENST ID: ENST00000514868
  CDS Start-End: 1-194
caatgaaaagcagaattgagtctgttttacgacaaatgctgaataactctggaaacctggaaataaacccttcaactgagataacatcacttactgaccaggctgcagcaaattggcttattaatggccacacagttccagagctaaggcaaggacaggtcagaataataagtaatgatgtatgtaatgcacca

SEQ ID NO: 193342 - DNA, 2136 bp, Homo sapiens
  Payload ID: 18172
  Gene Name: transmembrane protease, serine 11E
  Uniprot ID: Q9UL52
  ENST ID: ENST00000305363
  CDS Start-End: 65-1336
agctggattcacacacttggatgtagacctcgaccttcacaggactcttcattgctggttggcaatgatgtatcggccagatgtggtgagggctaggaaaagagtttgttgggaaccctgggttatcggcctcgtcatcttcatatccctgattgtcctggcagtgtgcattggactcactgttcattatgtgagatataatcaaaagaagacctacaattactatagcacattgtcatttacaactgacaaactatatgctgagtttggcagagaggcttctaacaattttacagaaatgagccagagacttgaatcaatggtgaaaaatgcattttataaatctccattaagggaagaatttgtcaagtctcaggttatcaagttcagtcaacagaagcatggagtgttggctcatatgctgttgatttgtagatttcactctactgaggatcctgaaactgtagataaaattgttcaacttgttttacatgaaaagctgcaagatgctgtaggaccccctaaagtagatcctcactcagttaaaattaaaaaaatcaacaagacagaaacagacagctatctaaaccattgctgcggaacacgaagaagtaaaactctaggtcagagtctcaggatcgttggtgggacagaagtagaagagggtgaatggccctggcaggctagcctgcagtgggatgggagtcatcgctgtggagcaaccttaattaatgccacatggcttgtgagtgctgctcactgttttacaacatataagaaccctgccagatggactgcttcctttggagtaacaataaaaccttcgaaaatgaaacggggtctccggagaataattgtccatgaaaaatacaaacacccatcacatgactatgatatttctcttgcagagctttctagccctgttccctacacaaatgcagtacatagagtttgtctccctgatgcatcctatgagtttcaaccaggtgatgtgatgtttgtgacaggatttggagcactgaaaaatgatggttacagtcaaaatcatcttcgacaagcacaggtgactctcatagacgctacaacttgcaatgaacctcaagcttacaatgacgccataactcctagaatgttatgtgctggctccttagaaggaaaaacagatgcatgccagggtgactctggaggaccactggttagttcagatgctagagatatctggtaccttgctggaatagtgagctggggagatgaatgtgcgaaacccaacaagcctggtgtttatactagagttacggccttgcgggactggattacttcaaaaactggtatctaagagagaaaagcctcatggaacagataacatttttttttgttttttgggtgtggaggccatttttagagatacagaattggagaagacttgcaaaacagctagatttgactgatctcaataaactgtttgcttgatgcatgtattttcttcccagctctgttccgcacataagcatcctgcttctgccagatcaactctgtcatctgtgagcaatagttgaaactttatgtacatagagaaatagataatacaatattacattacagcctgtattcatttgttctctagaagttttgtcagaattttgacttgttgacataaatttgtaatgcatatatacaatttgaagcactccttttcttcagttcctcagctcctctcatttcagcaaatatccattttcaaggtgcagaacaaggagtgaaagaaaatataagaagaaaaaaatcccctacattttattggcacagaaaagtattaggtgtttttcttagtggaatattagaaatgatcatattcattatgaaaggtcaagcaaagacagcagaataccaatcacttcatcatttaggaagtatgggaactaagttaaggaaatccagaaagaagccaagatatatccttattttcatttccaaacaactactatgataaatgtgaagaagattctgtttttttgtgacctataataattatacaaacttcatgcaatgtacttgttctaagcaaattaaagcaaatatttatttaacattgttactgaggatgtcaacatataacaataaaatataaatcaccca

SEQ ID NO: 193343 - DNA, 794 bp, Homo sapiens
  Payload ID: 18172
  Gene Name: transmembrane protease, serine 11E
  ENST ID: ENST00000510647
  CDS Start-End: 1-376
gccagatgtggtgagggctaggaaaagagtttgttgggaaccctgggttatcggcctcgtcatcttcatatccctgattgtcctggcagtgtgcattggactcactgttcattatgtgagatataatcaaaagaagacctacaattactatagcacattgtcatttacaactgacaaactatatgctgagtttggcagagaggcttctaacaattttacagaaatgagccagagacttgaatcaatggtgaaaaatgcattttataaatctccattaagggaagaatttgtcaagtctcaggttatcaagttcagaaatcaacaagacagaaacagacagctatctaaaccattgctgcggaacacgaagaagtaaaactctaggtcagagtctcaggatcgttggtgggacagaagtagaagagggtgaatggccctggcaggctagcctgcagtgggatgggagtcatcgctgtggagcaaccttaattaatgccacatggcttgtgagtgctgctcactgttttacaacatataagaaccctgccagatggactgcttcctttggagtaacaataaaaccttcgaaaatgaaacggggtctccggagaataattgtccatgaaaaatacaaacacccatcacatgactatgatatttctcttgcagagctttctagccctgttccctacacaaatgcagtacatagagtttgtctccctgatgcatcctatgagtttcaaccaggtgatgtgatgtttgtgacaggatttggagcactgaaaaatgatggt

SEQ ID NO: 193344 - DNA, 2136 bp, Homo sapiens
  Payload ID: 18172
  Gene Name: transmembrane protease, serine 11E
  ENST ID: ENST00000621758
  CDS Start-End: 65-1336
agctggattcacacacttggatgtagacctcgaccttcacaggactcttcattgctggttggcaatgatgtatcggccagatgtggtgagggctaggaaaagagtttgttgggaaccctgggttatcggcctcgtcatcttcatatccctgattgtcctggcagtgtgcattggactcactgttcattatgtgagatataatcaaaagaagacctacaattactatagcacattgtcatttacaactgacaaactatatgctgagtttggcagagaggcttctaacaattttacagaaatgagccagagacttgaatcaatggtgaaaaatgcattttataaatctccattaagggaagaatttgtcaagtctcaggttatcaagttcagtcaacagaagcatggagtgttggctcatatgctgttgatttgtagatttcactctactgaggatcctgaaactgtagataaaattgttcaacttgttttacatgaaaagctgcaagatgctgtaggaccccctaaagtagatcctcagtcagttaaaattaaaaaaatcaacaagacagaaacagacagctatctaaaccattgctgcggaacacgaagaagtaaaactctaggtcagagtctcaggatcgttggtgggacagaagtagaagagggtgaatggccctggcaggctagcctgcagtgggatgggagtcatcgctgtggagcaaccttaattaatgccacatggcttgtgagtgctgctcactgttttacaacatataagaaccctgccagatggactgcttcctttggagtaacaataaaaccttcgaaaatgaaacggggtctccggagaataattgtccatgaaaaatacaaacacccatcacatgactatgatatttctcttgcagagctttctagccctgttccctacacaaatgcagtacatagagtttgtctccctgatgcatcctatgagtttcaaccaggtgatgtgatgtttgtgacaggatttggagcactgaaaaatgatggttacagtcaaaatcatcttcgacaagcacaggtgactctcatagacgctacaacttgcaatgaacctcaagcttacaatgacgccataactcctagaatgttatgtgctggctccttagaaggaaaaacagatgcatgccagggtgactctggaggaccactggttagttcagatgctagagatatctggtaccttgctggaatagtgagctggggagatgaatgtgcgaaacccaacaagcctggtgtttatactagagttacggccttgcgggactggattacttcaaaaactggtatctaagagagaaaagcctcatggaacagataacatttttttttgttttttgggtgtggaggccatttttagagatacagaattggagaagacttgcaaaacagctagatttgactgatctcaataaactgtttgcttgatgcatgtattttcttcccagctctgttccgcacataagcatcctgcttctgccagatcaactctgtcatctgtgagcaatagttgaaactttatgtacatagagaaatagataatacaatattacattacagcctgtattcatttgttctctagaagttttgtcagaattttgacttgttgacataaatttgtaatgcatatatacaatttgaagcactccttttcttcagttcctcagctcctctcatttcagcaaatatccattttcaaggtgcagaacaaggagtgaaagaaaatataagaagaaaaaaatcccctacattttattggcacagaaaagtattaggtgtttttcttagtggaatattagaaatgatcatattcattatgaaaggtcaagcaaagacagcagaataccaatcacttcatcatttaggaagtatgggaactaagttaaggaaatccagaaagaagccaagatatatccttattttcatttccaaacaactactatgataaatgtgaagaagattctgtttttttgtgacctataataattatacaaacttcatgcaatgtacttgttctaagcaaattaaagcaaatatttatttaacattgttactgaggatgtcaacatataacaataaaatataaatcaccca

SEQ ID NO: 193345 - DNA, 794 bp, Homo sapiens; identical to SEQ ID NO: 193343
  Payload ID: 18172
  Gene Name: transmembrane protease, serine 11E
  ENST ID: ENST00000625246
  CDS Start-End: 1-376

SEQ ID NO: 193346 - DNA, 2088 bp, Homo sapiens
  Payload ID: 18173
  Gene Name: transmembrane protease, serine 11F
  Uniprot ID: Q6ZWK6
  ENST ID: ENST00000356291
  CDS Start-End: 61-1377
cctaacctgctgatacagatcagatggtgactgaatagaagctgccccagtcctgggttcatgatgtacgcacctgttgaattttcagaagctgaattctcacgagctgaatatcaaagaaagcagcaattttgggactcagtacggctagctcttttcacattagcaattgtagcaatcataggaattgcaattggtattgttactcattttgttgttgaggatgataagtctttctattaccttgcctcttttaaagtcacaaatatcaaatataaagaaaattatggcataagatcttcaagagagtttatagaaaggagtcatcagattgaaagaatgatgtctaggatatttcgacattcttctgtaggcggtcgatttatcaaatctcatgttatcaaattaagtccagatgaacaaggtgtggatattcttatagtgctcatatttcgatacccatctactgatagtgctgaacaaatcaagaaaaaaattgaaaaggctttatatcaaagtttgaagaccaaacaattgtctttgaccataaacaaaccatcatttagactcacacctattgacagcaaaaagatgaggaatcttctcaacagtcgctgtggaataaggatgacatcttcaaacatgccattaccagcatcctcttctactcaaagaattgtccaaggaagggaaacagctatggaaggggaatggccatggcaggccagcctccagctcatagggtcaggccatcagtgtggagccagcctcatcagtaacacatggctgctcacagcagctcactgcttttggaaaaataaagacccaactcaatggattgctacttttggtgcaactataacaccacccgcagtgaaacgaaatgtgaggaaaattattcttcatgagaattaccatagagaaacaaatgaaaatgacattgctttggttcagctctctactggagttgagttttcaaatatagtccagagagtttgcctcccagactcatctataaagttgccacctaaaacaagtgtgttcgtcacaggatttggatccattgtagatgatggacctatacaaaatacacttcggcaagccagagtggaaaccataagcactgatgtgtgtaacagaaaggatgtgtatgatggcctgataactccaggaatgttatgtgctggattcatggaaggaaaaatagatgcatgtaagggagattctggtggacctctggtttatgataatcatgacatctggtacattgtaggtatagtaagttggggacaatcatgtgcacttcccaaaaaacctggagtctacaccagagtaactaagtatcgagattggattgcctcaaagactggtatgtagtgtggattgcccatgagttatacacatggcacacagagctgatactcctgcgtattttgtattgtttaaattcatttactttggattagtgcttttgctagatgtcaagaagcccttcagacccagacaaatctaatatcctgaggtggcctttacatacgtaggaccaaaccctctctaccatgagggaagaagacacagcaaatgacagacagcacctattccttactcacaagggaaactgcttgtgatacttcctaataagataaataagtggtttccctcaattgaagacaggaacatcattttccacaggatatgaagagctgccagtaatgccaaaatcttacctcatataatacctggagcatgtgagattcttctagtgaaaaagaacagtcttccctgaagactcagggcttcaacattctagaactgataagtggaccttcagtgtgcaagaatggagaagcatgggatttgcattatgacttgaactgggcttatatctaataatacagagcactatctctaacctcaacagttgacattttaaaagtttttaaatgtatctgaacttgctgttaacacagtgttataactcaagcactagcttcaggaagcatgttgtgttgttaagaagcttttctgatttattctttaacagcatcttgccatctatatgttagtagcagttggcccagaaaggac

SEQ ID NO: 193347 - DNA, 2175 bp, Homo sapiens
  Payload ID: 18174
  Gene Name: transmembrane protease, serine 13
  Uniprot ID: Q9BYE2
  ENST ID: ENST00000430170
  CDS Start-End: 89-1780
ttaccctacatgcctgagaagccagggaccaagatggatcttctcctcgacatcagctaagcctggaggactcttcccctcagagaccatggagagggacagccacgggaatgcatctccagcaagaacaccttcagctggagcatctccagcccaggcatctccagctgggacacctccaggccgggcatctccagcccaggcatctccagcccaggcatctccagctgggacacctccgggccgggcatctccagcccaggcatctccagctggtacacctccaggccgggcatctccaggccgggcatctccagcccaggcatctccagcccaggcatctccagcccgggcatctccggctctggcatcactttccaggtcctcatccggcaggtcatcatccgccaggtcagcctcggtgacaacctccccaaccagagtgtaccttgttagagcaacaccagtgggggctgtacccatccgatcatctcctgccaggtcagcaccagcaaccagggccaccagggagagcccaggtacgagcctgcccaagttcacctggcgggagggccagaagcagctaccgctcatcgggtgcgtgctcctcctcattgccctggtggtttcgctcatcatcctcttccagttctggcagggccacacagggatcaggtacaaggagcagagggagagctgtcccaagcacgctgttcgctgtgacggggtggtggactgcaagctgaagagtgacgagctgggctgcgtgaggtttgactgggacaagtctctgcttaaaatctactctgggtcctcccatcagtggcttcccatctgtagcagcaactggaatgactcctactcagagaagacctgccagcagctgggtttcgagagtgctcaccggacaaccgaggttgcccacagggattttgccaacagcttctcaatcttgagatacaactccaccatccaggaaagcctccacaggtctgaatgcccttcccagcggtatatctctctccagtgttcccactgcggactgagggccatgaccgggcggatcgtgggaggggcgctggcctcggatagcaagtggccttggcaagtgagtctgcacttcggcaccacccacatctgtggaggcacgctcattgacgcccagtgggtgctcactgccgcccactgcttcttcgtgacccgggagaaggtcctggagggctggaaggtgtacgcgggcaccagcaacctgcaccagttgcctgaggcagcctccattgccgagatcatcatcaacagcaattacaccgatgaggaggacgactatgacatcgccctcatgcggctgtccaagcccctgaccctgtccgctcacatccaccctgcttgcctccccatgcatggacagacctttagcctcaatgagacctgctggatcacaggctttggcaagaccagggagacagatgacaagacatcccccttcctccgggaggtgcaggtcaatctcatcgacttcaagaaatgcaatgactacttggtctatgacagttaccttaccccaaggatgatgtgtgctggggaccttcgtgggggcagagactcctgccagggagacagcggggggcctcttgtctgtgagcagaacaaccgctggtacctggcaggtgtcaccagctggggcacaggctgtggccagagaaacaaacctggtgtgtacaccaaagtgacagaagttcttccctggatttacagcaagatggagagctcagcgggttgaaaaagggtggacctacaggccaggcaggcagttgctgggcagatgttctcccagaagtatttttttgtgtaaggttgcaatggactttgaaaacgtttcagtttctgcagaggattttgtgatagtttttgttatcaagcatttatgcatgggaatccgctcttcatggcctttcccagctctgtttgttttagtctttttgattttctttttgttgttgttgttgtctttttttaaaaacacaagtgactccattttaactctgacaactttcacagctgtcaccagaatgctccctgagaactaccattctttccctttcccacttaaaatatttcatcagaacctcactactatcataaaagagtataaagtaataaaataataaaaagtta

SEQ ID NO: 193348 - DNA, 2361 bp, Homo sapiens
  Payload ID: 18174
  Gene Name: transmembrane protease, serine 13
  ENST ID: ENST00000445164
  CDS Start-End: 75-1835
tgagaagccagggaccaagatggatcttctcctcgacatcagctaagcctggaggactcttcccctcagagaccatggagagggacagccacgggaatgcatctccagcaagaacaccttcagctggagcatctccagcccaggcatctccagctgggacacctccaggccgggcatctccagcccaggcatctccagcccaggcatctccagctgggacacctccgggccgggcatctccagcccaggcatctccagctggtacacctccaggccgggcatctccaggccgggcatctccagcccaggcatctccagcccaggcatctccagcccgggcatctccggctctggcatcactttccaggtcctcatccggcaggtcatcatccgccaggtcagcctcggtgacaacctccccaaccagagtgtaccttgttagagcaacaccagtgggggctgtacccatccgatcatctcctgccaggtcagcaccagcaaccagggccaccagggagagcccaggtacgagcctgcccaagttcacctggcgggagggccagaagcagctaccgctcatcgggtgcgtgctcctcctcattgccctggtggtttcgctcatcatcctcttccagttctggcagggccacacagggatcaggtacaaggagcagagggagagctgtcccaagcacgctgttcgctgtgacggggtggtggactgcaagctgaagagtgacgagctgggctgcgtgaggtttgactgggacaagtctctgcttaaaatctactctgggtcctcccatcagtggcttcccatctgtagcagcaactggaatgactcctactcagagaagacctgccagcagctgggtttcgagagtgctcaccggacaaccgaggttgcccacagggattttgccaacagcttctcaatcttgagatacaactccaccatccaggaaagcctccacaggtctgaatgcccttcccagcggtatatctctctccagtgttcccactgcggactgagggccatgaccgggcggatcgtgggaggggcgctggcctcggatagcaagtggccttggcaagtgagtctgcacttcggcaccacccacatctgtggaggcacgctcattgacgcccagtgggtgctcactgccgcccactgcttcttcgtgacccgggagaaggtcctggagggctggaaggtgtacgcgggcaccagcaacctgcaccagttgcctgaggcagcctccattgccgagatcatcatcaacagcaattacaccgatgaggaggacgactatgacatcgccctcatgcggctgtccaagcccctgaccctgtccgctcacatccaccctgcttgcctccccatgcatggacagacctttagcctcaatgagacctgctggatcacaggctttggcaagaccagggagacagatgacaagacatcccccttcctccgggaggtgcaggtcaatctcatcgacttcaagaaatgcaatgactacttggtctatgacagttaccttaccccaaggatgatgtgtgctggggaccttcgtgggggcagagactcctgccagggagacagcggggggcctcttgtctgtgagcagaacaaccgctggtacctggcaggtgtcaccagctggggcacaggctgtggccagagaaacaaacctggtgtgtacaccaaagtgacagaagttcttccctggatttacagcaagatggaggtaagatccctgcagcaggacactgcacccagcaggctgggaacttcctcaggtggggaccctggaggagcacccaggttgtaggcagaggtcccctcagcgtccccatattcggggggtgttctggacagggtcaaatgtgatgcctggggtcaatcccagctgtctgtgtttctttccctgcttttcttccctcagaacagagctcagcgggttgaaaaagggtggacctacaggccaggcaggcagttgctgggcagatgttctcccagaagtatttttttgtgtaaggttgcaatggactttgaaaacgtttcagtttctgcagaggattttgtgatagtttttgttatcaagcatttatgcatgggaatccgctcttcatggcctttcccagctctgtttgttttagtctttttgattttctttttgttgttgttgttgtctttttttaaaaacacaagtgactccattttaactctgacaactttcacagctgtcaccagaatgctccctgagaactaccattctttccctttcccacttaaaatatttcatcagaacctcactactatcataaaagagtataaagtaataaaataataaaaag

SEQ ID NO: 193349 - DNA, 1950 bp, Homo sapiens
  Payload ID: 18174
  Gene Name: transmembrane protease, serine 13
  ENST ID: ENST00000524993
  CDS Start-End: 59-1762
aagatggatcttctcctcgacatcagctaagcctggaggactcttcccctcagagaccatggagagggacagccacgggaatgcatctccagcaagaacaccttcagctggagcatctccagcccaggcatctccagctgggacacctccaggccgggcatctccagcccaggcatctccagcccaggcatctccagctgggacacctccgggccgggcatctccagcccaggcatctccagctggtacacctccaggccgggcatctccaggccgggcatctccagcccaggcatctccagcccaggcatctccagcccgggcatctccggctctggcatcactttccaggtcctcatccggcaggtcatcatccgccaggtcagcctcggtgacaacctccccaaccagagtgtaccttgttagagcaacaccagtgggggctgtacccatccgatcatctcctgccaggtcagcaccagcaaccagggccaccagggagagcccaggtacgagcctgcccaagttcacctggcgggagggccagaagcagctaccgctcatcgggtgcgtgctcctcctcattgccctggtggtttcgctcatcatcctcttccagttctggcagggccacacagggatcaggtacaaggagcagagggagagctgtcccaagcacgctgttcgctgtgacggggtggtggactgcaagctgaagagtgacgagctgggctgcgtgaggtttgactgggacaagtctctgcttaaaatctactctgggtcctcccatcagtggcttcccatctgtagcagcaactggaatgactcctactcagagaagacctgccagcagctgggtttcgagagtgctcaccggacaaccgaggttgcccacagggattttgccaacagcttctcaatcttgagatacaactccaccatccaggaaagcctccacaggtctgaatgcccttcccagcggtatatctctctccagtgttcccactgcggactgagggccatgaccgggcggatcgtgggaggggcgctggcctcggatagcaagtggccttggcaagtgagtctgcacttcggcaccacccacatctgtggaggcacgctcattgacgcccagtgggtgctcactgccgcccactgcttcttcgtgacccgggagaaggtcctggagggctggaaggtgtacgcgggcaccagcaacctgcaccagttgcctgaggcagcctccattgccgagatcatcatcaacagcaattacaccgatgaggaggacgactatgacatcgccctcatgcggctgtccaagcccctgaccctgtccgctcacatccaccctgcttgcctccccatgcatggacagacctttagcctcaatgagacctgctggatcacaggctttggcaagaccagggagacagatgacaagacatcccccttcctccgggaggtgcaggtcaatctcatcgacttcaagaaatgcaatgactacttggtctatgacagttaccttaccccaaggatgatgtgtgctggggaccttcgtgggggcagagactcctgccagggagacagcggggggcctcttgtctgtgagcagaacaaccgctggtacctggcaggtgtcaccagctggggcacaggctgtggccagagaaacaaacctggtgtgtacaccaaagtgacagaagttcttccctggatttacagcaagatggagagcgaggtgcgattcagaaaatcctaaccagctggcctgctgctctgcacagcaccggctgctgtgaagactctggccatggtgactggccatgtgtggcatcatctgggctaatggccaccgggcaccatcggactcccacctccactgtctgctgcctctgtgtgtgtgtgtgtgtgtgtgtgtgtgtgtgcatatgtgtgcattgccactct

SEQ ID NO: 193350 - DNA, 3269 bp, Homo sapiens
  Payload ID: 18174
  Gene Name: transmembrane protease, serine 13
  Uniprot ID: Q9BYE2
  ENST ID: ENST00000528626
  CDS Start-End: 75-1673
tgagaagccagggaccaagatggatcttctcctcgacatcagctaagcctggaggactcttcccctcagagaccatggagagggacagccacgggaatgcatctccagcaagaacaccttcagctggagcatctccagcccaggcatctccagctgggacacctccaggccgggcatctccagcccaggcatctccagcccaggcatctccagctgggacacctccgggccgggcatctccagcccaggcatctccagctggtacacctccaggccgggcatctccaggccgggcatctccagcccaggcatctccagcccaggcatctccagcccgggcatctccggctctggcatcactttccaggtcctcatccggcaggtcatcatccgccaggtcagcctcggtgacaacctccccaaccagagtgtaccttgttagagcaacaccagtgggggctgtacccatccgatcatctcctgccaggtcagcaccagcaaccagggccaccagggagagcccagtccagttctggcagggccacacagggatcaggtacaaggagcagagggagagctgtcccaagcacgctgttcgctgtgacggggtggtggactgcaagctgaagagtgacgagctgggctgcgtgaggtttgactgggacaagtctctgcttaaaatctactctgggtcctcccatcagtggcttcccatctgtagcagcaactggaatgactcctactcagagaagacctgccagcagctgggtttcgagagtgctcaccggacaaccgaggttgcccacagggattttgccaacagcttctcaatcttgagatacaactccaccatccaggaaagcctccacaggtctgaatgcccttcccagcggtatatctctctccagtgttcccactgcggactgagggccatgaccgggcggatcgtgggaggggcgctggcctcggatagcaagtggccttggcaagtgagtctgcacttcggcaccacccacatctgtggaggcacgctcattgacgcccagtgggtgctcactgccgcccactgcttcttcgtgacccgggagaaggtcctggagggctggaaggtgtacgcgggcaccagcaacctgcaccagttgcctgaggcagcctccattgccgagatcatcatcaacagcaattacaccgatgaggaggacgactatgacatcgccctcatgcggctgtccaagcccctgaccctgtccgctcacatccaccctgcttgcctccccatgcatggacagacctttagcctcaatgagacctgctggatcacaggctttggcaagaccagggagacagatgacaagacatcccccttcctccgggaggtgcaggtcaatctcatcgacttcaagaaatgcaatgactacttggtctatgacagttaccttaccccaaggatgatgtgtgctggggaccttcgtgggggcagagactcctgccagggagacagcggggggcctcttgtctgtgagcagaacaaccgctggtacctggcaggtgtcaccagctggggcacaggctgtggccagagaaacaaacctggtgtgtacaccaaagtgacagaagttcttccctggatttacagcaagatggagagcgaggtgcgattcagaaaatcctaaccagctggcctgctgctctgcacagcaccggctgctgtgaagactctggccatggtgactggccatgtgtggcatcatctgggctaatggccaccgggcaccatcggactcccacctccactgtctgctgcctctgtgtgtgtgtgtgtgtgtgtgtgtgtgtgtgcatatgtgtgcattgccactctcccaagtttttcagaaaccagcagagctgtcaactcttctcaaaatcccaggctggaaattacctggagacaagagttgagtaccgtggatgttcctacaggagtgtccatagatggatggaggaggtggagcccagagcccaaggaagagctgggaattcttgcttctctgaccctcacttacagactagcccagtgtgggcagatgccagcggcccaggtggcgccattgctgtcctgggatggatcgtgggttttggtggatgcagcttcccagggcctggaccgtcttcggtgaaaagctgctcccgttggctttatgagcatcaagtcctcacccagaccccctgctggtgccgtggatgtcaccagtcggactgtgctgtggctaaccaggctgacaactgagatgaggattcactgtactcatttggtcacaagctgctggggcgggttttattttattttatttttatatttaagaaatgaaaatacgggtatttttaaagattctccaaaaagtccagaagccttgacagctggcatcaatcagcccaagacccccaggggattcatgggaaatgtcgtattttagagtcctacagaatatttctggcctcaaggaactggatgaagagactggacaaagtccccaggatgggcatcccccaagtcactacagcatctggagcccctaggagatactcagggaagcaaatccttgtttgggctggcaagcaaatccgacacgacgaggtccacaaactgtttctgcatcccagggctctgacgaaggcgttaagaaacagatgctgttcccgcgtaggctcccaggggccccagggaggtccaggtggactgcctctctcattcccagtagctgtcctgggactttgggatttcttctcagctttctccacctttcagtttctcagttgtttcagaaacatagcaatgacataaaaactgctatggagagaaagctaacatggtcccatgccttccaggcagccctgctgaaggatctaagttggccctgttcctgcaaatcatcaacgtgcctggactcgccagctaaaagcctgggccttccccagccttttttctggggcacctattcctctgccagtcctgctcccctcaccttccttgggcccgtcagagtcttttgtggtgctgtgcttctcagaggcaggatccaagcagatcagcccagcctagcccagctcaggcaggccatggccgctcaagggaaagactgccccagaagagcaagctggagaggctgggcaggggctgatggggctgggtacactggggaatgttagcaagactgggaaggaggccacattcctgtctgcagcagccgccagcgatggtcttcagcaataaaagttgtgtgacctga

SEQ ID NO: 193351 - DNA, 578 bp, Homo sapiens
  Payload ID: 18174
  Gene Name: transmembrane protease, serine 13
  ENST ID: ENST00000528135
  CDS Start-End: 124-246
tttggtgggggctggcccttggccctccaactcctttaccctacatgcctgagaagccagggaccaagatggatcttctcctcgacatcagctaagcctggaggactcttcccctcagagaccatggagagggacagccacgggtccagttctggcagggccacacagggatcaggtacaaggagcagagggagagctgtcccaagcacgctgttcgctgtgacggggtggtggactgcaagctgaagagtgacgagctgggctgcgtgaggtttgactgggacaagtctctgcttaaaatctactctgggtcctcccatcagtggcttcccatctgtagcagcaactggaatgactcctactcagagaagacctgccagcagctgggtttcgagaggtctgaatgcccttcccagcggtatatctctctccagtgttcccgtaagatgttcttcttcttggattgtggccagtgtcgtgtgggagtaaagggcagaggggcagcactcctccaagggaggtgtttggcacaggggttcaagtcaggaacagtgtcttagccagcaggcctgcttcag

SEQ ID NO: 193352 - DNA, 2592 bp, Homo sapiens
  Payload ID: 18174
  Gene Name: transmembrane protease, serine 13
  Uniprot ID: Q9BYE2
  ENST ID: ENST00000526090
  CDS Start-End: 153-1628
cacacgtcccaaccggcttccccgccccatttggtgggggctggcccttggccctccaactcctttaccctacatgcctgagaagccagggaccaagatggatcttctcctcgacatcagctaagcctggaggactcttcccctcagagaccatggagagggacagccacgggaatgcatctccagcaagaacaccttcagctggagcatctccagcccaggcatctccagctgggacacctccaggccgggcatctccagcccaggcatctccagcccaggcatctccagctgggacacctccgggccgggcatctccagcccaggcatctccagctggtacacctccaggccgggcatctccaggccgggcatctccagcccaggcatctccagcccaggcatctccagcccgggcatctccggctctggcatcactttccaggtcctcatccggcaggtcatcatccgccaggtcagcctcggtgacaacctccccaaccagagtgtaccttgttagagcaacaccagtgggggctgtacccatccgatcatctcctgccaggtcagcaccagcaaccagggccaccagggagagcccaggtacgagcctgcccaagttcacctggcgggagggccagaagcagctaccgctcatcgggtgcgtgctcctcctcattgccctggtggtttcgctcatcatcctcttccagttctggcagggccacacagggatcaggtacaaggagcagagggagagctgtcccaagcacgctgttcgctgtgacggggtggtggactgcaagctgaagagtgacgagctgggctgcgtgaggtttgactgggacaagtctctgcttaaaatctactctgggtcctcccatcagtggcttcccatctgtagcagcaactggaatgactcctactcagagaagacctgccagcagctgggtttcgagagtgctcaccggacaaccgaggttgcccacagggattttgccaacagcttctcaatcttgagatacaactccaccatccaggaaagcctccacaggtctgaatgcccttcccagcggtatatctctctccagtgttcccactgcggactgagggccatgaccgggcggatcgtgggaggggcgctggcctcggatagcaagtggccttggcaagtgagtctgcacttcggcaccacccacatctgtggaggcacgctcattgacgcccagtgggtgctcactgccgcccactgcttcttcgtgacccgggagaaggtcctggagggctggaaggtgtacgcgggcaccagcaacctgcaccagttgcctgaggcagcctccattgccgagatcatcatcaacagcaattacaccgatgaggaggacgactatgacatcgccctcatgcggctgtccaagcccctgaccctgtccggtgagggaatctgcactccccgctctcctgccccccagccccagcaccctctgcagccctcgcacttgtcagcatctgtcaactcatatccgggccccaaagcttctgcagggcagaagtcaaagactcttaaagatccttacatggaacacttctgttttataattagggaaactgaagcccaagggttataaataagtttgctccaaatgacacatctcacattacaaattgatgacggagtcagggcttgggtactgatcttaatcaatagattgaattctttcactggtattaactgagcacctaggggccaaacgctatggtaggcatttcacacatatgatttcatttactcttcacaaccaaccctgtggagcaggcactattattaacttcatttgacatatgaggaaatggagctttacagagagataattacctgaggccacaagtaataggtggtagctctgggattggaaccaggtcgatctgattcccaagcagtgctctccccacctggctctagactggcaaattgcttaccctgcagtcgagaacttaagctgagtacacattcaaacaactaattgctacaacgttgttgctaaggaccaaaggaggctacacaaaggaaatgctgcagaggttctcagaagatcactgtggacaggggacgtcaaagaagacttcattcattcattcattcattcactcatcattcatccattcactcatttgttcacttatcaaatactatatggccagccctatagtacagttgcaaatagaaataaaatacaccaagacgaccagtagaggccaattatacgatgttttcggggagcagggagctatggtggcataggcgggagcaactaatcatcctggcaggctaggggaagctcagcagaggaaggatagccaaggtgggtcccgaaaagattggagaagacaggtaatgggggctcagggaggaccctgaagaatggagccagagccctctggcataagcatctgtaaaggtgggagagggaggaggagtaccgggatttctggaagcctcggaggactctctggttagtccagccattctcgtgctctgagcctgtgagctggtgtttcctcgcacattaattatggaggcggtgtctatca

SEQ ID NO: 193353 - DNA, 3266 bp, Homo sapiens
  Payload ID: 18174
  Gene Name: transmembrane protease, serine 13
  ENST ID: ENST00000614424
  CDS Start-End: 75-1763
tgagaagccagggaccaagatggatcttctcctcgacatcagctaagcctggaggactcttcccctcagagaccatggagagggacagccacgggaatgcatctccagcaagaacaccttcagctggagcatctccagcccaggcatctccagctgggacacctccaggccgggcatctccagcccaggcatctccagcccaggcatctccagctgggacacctccgggccgggcatctccagcccaggcatctccagctggtacacctccaggccgggcatctccaggccgggcatctccactccaggcatctccagcccgggcatctccggctctggcatcactttccaggtcctcatccggcaggtcatcatccgccaggtcagcctcggtgacaacctccccaaccagagtgtaccttgttagagcaacaccagtgggggctgtacccatccgatcatctcctgccaggtcagcaccagcaaccagggccaccagggagagcccaggtacgagcctgcccaagttcacctggcgggagggccagaagcagctaccgctcatcgggtgcgtgctcctcctcattgccctggtggtttcgctcatcatcctcttccagttctggcagggccacacagggatcaggtacaaggagcagagggagagctgtcccaagcacgctgttcgctgtgacggggtggtggactgcaagctgaagagtgacgagctgggctgcgtgaggtttgactgggacaagtctctgcttaaaatctactctgggtcctcccatcagtggcttcccatctgtagcagcaactggaatgactcctactcagagaagacctgccagcagctgggtttcgagagtgctcaccggacaaccgaggttgcccacagggattttgccaacagcttctcaatcttgagatacaactccaccatccaggaaagcctccacaggtctgaatgcccttcccagcggtatatctctctccagtgttcccactgcggactgagggccatgaccgggcggatcgtgggaggggcgctggcctcggatagcaagtggccttggcaagtgagtctgcacttcggcaccacccacatctgtggaggcacgctcattgacgcccagtgggtgctcactgccgcccactgcttcttcgtgacccgggagaaggtcctggagggctggaaggtgtacgcgggcaccagcaacctgcaccagttgcctgaggcagcctccattgccgagatcatcatcaacagcaattacaccgatgaggaggacgactatgacatcgccctcatgcggctgtccaagcccctgaccctgtccgctcacatccaccctgcttgcctccccatgcatggacagacctttagcctcaatgagacctgctggatcacaggctttggcaagaccagggagacagatgacaagacatcccccttcctccgggaggtgcaggtcaatctcatcgacttcaagaaatgcaatgactacttggtctatgacagttaccttaccccaaggatgatgtgtgctggggaccttcgtgggggcagagactcctgccagggagacagcggggggcctcttgtctgtgagcagaacaaccgctggtacctggcaggtgtcaccagctggggcacaggctgtggccagagaaacaaacctggtgtgtacaccaaagtgacagaagttcttccctggatttacagcaagatggagagcgaggtgcgattcagaaaatcctaaccagctggcctgctgctctgcacagcaccggctgctgtgaagactctggccatggtgactggccatgtgtggcatcatctgggctaatggccaccgggcaccatcggactcccacctccactgtctgctgcctctgtgtgtgtgtgtgtgtgtgtgtgtgtgtgtgcatatgtgtgcattgccactctcccaagtttttcagaaaccagcagagctgtcaactcttctcaaaatcccaggctggaaattacctggagacaagagttgagtaccgtggatgttcctacaggagtgtccatagatggatggaggaggtggagcccagagcccaaggaagagctgggaattcttgcttctctgaccctcacttacagactagcccagtgtgggcagatgccagcggcccaggtggcgccattgctgtcctgggatggatcgtgggttttggtggatgcagcttcccagggcctggaccgtcttcggtgaaaagctgctcccgttggctttatgagcatcaagtcctcacccagaccccctgctggtgccgtggatgtcaccagtcggactgtgctgtggctaaccaggctgacaactgagatgaggattcactgtactcatttggtcacaagctgctggggcgggttttattttattttatttttatatttaagaaatgaaaatacgggtatttttaaagattctccaaaaagtccagaagccttgacagctggcatcaatcagcccaagacccccaggggattcatgggaaatgtcgtattttagagtcctacagaatatttctggcctcaaggaactggatgaagagactggacaaagtccccaggatgggcatcccccaagtcactacagcatctggagcccctaggagatactcagggaagcaaatccttgtttgggctggcaagcaaatccgacacgacgaggtccacaaactgtttctgcatcccagggctctgacgaaggcgttaagaaacagatgctgttcccgcgtaggctcccaggggccccagggaggtccaggtggactgcctctctcattcccagtagctgtcctgggactttgggatttcttctcagctttctccacctttcagtttctcagttgtttcagaaacatagcaatgacataaaaactgctatggagagaaagctaacatggtcccatgccttccaggcagccctgctgaaggatctaagttggccctgttcctgcaaatcatcaacgtgcctggactcgccagctaaaagcctgggccttccccagccttttttctggggcacctattcctctgccagtcctgctcccctcaccttccttgggcccgtcagagtcttttgtggtgctgtgcttctcagaggcaggatccaagcagatcagcccagcctagcccagctcaggcaggccatggccgctcaagggaaagactgccccagaagagcaagctggagaggctgggcaggggctgatggggctgggtacac

SEQ ID NO: 193354 - DNA, 3947 bp, Homo sapiens
  Payload ID: 18175
  Gene Name: transmembrane protease, serine 15
  Uniprot ID: P98073
  ENST ID: ENST00000284885
  CDS Start-End: 35-3094
cagttcttaaattagcaagccttcaaaaccaaaaatggggtcgaaaagaggcatatcttctaggcatcattctctcagctcctatgaaatcatgtttgcagctctctttgccatattggtagtgctctgtgctggattaattgcagtatcctgcctgacaatcaaggaatcccaacgaggtgcagcacttggacagagtcatgaagccagagcgacatttaaaataacatccggagttacatataatcctaatttgcaagacaaactctcagtggatttcaaagttcttgcttttgaccttcagcaaatgatagatgagatctttctatcaagcaatctgaagaatgaatataagaactcaagagttttacaatttgaaaatggcagcattatagtcgtatttgaccttttctttgcccagtgggtgtcagatgaaaatgtaaaagaagaactgattcaaggccttgaagcaaataaatccagccaactggtcactttccatattgatttgaacagcgttgatatcctagacaagctaacaaccaccagtcatctggcaactccaggaaatgtctcaatagagtgcctgcctggttcaagtccttgtactgatgctctaacgtgtataaaagctgatttattttgtgatggagaagtaaactgtccagatggttctgacgaagacaataaaatgtgtgccacagtttgtgatggaagatttttgttaactggatcatctgggtctttccaggctactcattatccaaaaccttctgaaacaagtgttgtctgccagtggatcatacgtgtaaaccaaggactttccattaaactgagcttcgatgattttaatacatattatacagatatattagatatttatgaaggtgtaggatcaagcaagattttaagagcttctatttgggaaactaatcctggcacaataagaattttttccaaccaagttactgccacctttcttatagaatctgatgaaagtgattatgttggctttaatgcaacatatactgcatttaacagcagtgagcttaataattatgagaaaattaattgtaactttgaggatggcttttgtttctgggtccaggatctaaatgatgataatgaatgggaaaggattcagggaagcaccttttctccttttactggacccaattttgaccacacttttggcaatgcttcaggattttacatttctaccccaactggaccaggagggagacaagaacgagtggggcttttaagcctccctttggaccccactttggagccagcttgccttagtttctggtatcatatgtatggtgaaaatgtccataaattaagcattaatatcagcaatgaccaaaatatggagaagacagttttccaaaaggaaggaaattatggagacaattggaattatggacaagtaaccctaaatgaaacagttaaatttaaggttgcttttaatgcttttaaaaacaagatcctgagtgatattgcgttggatgacattagcctaacatatgggatttgcaatgggagtctttatccagaaccaactttggtgccaactcctccaccagaacttcctacggactgtggaggaccttttgagctgtgggagccaaatacaacattcagttctacgaactttccaaacagctaccctaatctggctttctgtgtttggattttaaatgcacaaaaaggaaagaatatacaacttcattttcaagaatttgacttagaaaatattaacgatgtagttgaaataagagatggtgaagaagctgattccttgctcttagctgtgtacacagggcctggcccagtaaaggatgtgttctctaccaccaacagaatgactgtgcttctcatcactaacgatgtgttggcaagaggagggtttaaagcaaactttactactggctatcacttggggattccagagccatgcaaggcagaccattttcaatgtaaaaatggagagtgtgttccactggtgaatctctgtgacggtcatctgcactgtgaggatggctcagatgaagcagattgtgtgcgttttttcaatggcacaacgaacaacaatggtttagtgcggttcagaatccagagcatatggcatacagcttgtgctgagaactggaccacccagatttcaaatgatgtttgtcaactgctgggactagggagtggaaactcatcaaagccaatcttccctaccgatggtggaccatttgtcaaattaaacacagcacctgatggccacttaatactaacacccagtcaacagtgtttacaggattccttgattcggttacagtgtaaccataaatcttgtggaaaaaaactggcagctcaagacatcaccccaaagattgttggaggaagtaatgccaaagaaggggcctggccctgggttgtgggtctgtattatggcggccgactgctctgcggcgcatctctcgtcagcagtgactggctggtgtccgccgcacactgcgtgtatgggagaaacttagagccatccaagtggacagcaatcctaggcctgcatatgaaatcaaatctgacctctcctcaaacagtccctcgattaatagatgaaattgtcataaaccctcattacaataggcgaagaaaggacaacgacattgccatgatgcatctggaatttaaagtgaattacacagattacatacaacctatttgtttaccggaagaaaatcaagtttttcctccaggaagaaattgttctattgctggttgggggacggttgtatatcaaggtactactgcaaacatattgcaagaagctgatgttcctcttctatcaaatgagagatgccaacagcagatgccagaatataacattactgaaaatatgatatgtgcaggctatgaagaaggaggaatagattcttgtcagggggattcaggaggaccattaatgtgccaagaaaacaacaggtggttccttgctggtgtgacctcatttggatacaagtgtgccctgcctaatcgccccggagtgtatgccagggtctcaaggtttaccgaatggatacaaagttttctacattagcgcatttcttaaactaaacaggaaagtcgcattattttcccattctactctagaaagcatggaaattaagtgtttcgtacaaaaattttaaaaagttaccaaaggtttttattcttacctatgtcaatgaaatgctagggggccagggaaacaaaattttaaaaataataaaattcaccatagcaatacagaataactttaaaataccattaaatacatttgtatttcattgtgaacaggtatttcttcacagatctcatttttaaaattcttaatgattatttttattacttactgttgtttaaagggatgttattttaaagcatataccatacacttaagaaatttgagcagaatttaaaaaagaaagaaaataaattgtttttcccaaagtatgtcactgttggaaataaactgccataaattttctagttccagtttagtttgctgctattagcagaaactcaattgtttctctgtcttttctatcaaaattttcaacatatgcataaccttagtattttcccaaccaatagaaactatttattgtaagcttatgtcacaggcctggactaaattgattttacgttcctcttaaataagttaattaaataaaagataaattaactgatatagtcattgtatattagataaattttacctatttatttcaagcaagtatttttaagtctcaagaaaataatcagacataccaaagaaatgcacctattgcaaatcctggtcttggtttatgtgtgttacagtggatatttctaatatatgaaaacttatttagacacagctgaatcacccatgagaaggtcaaatatgtgtaataaatgaatttgcttca

SEQ ID NO: 193355 - DNA, 754 bp, Homo sapiens
  Payload ID: 18175
  Gene Name: transmembrane protease, serine 15
  ENST ID: ENST00000422787
  CDS Start-End: 72-754
gcctgtcaccatgtaagaagtgaatttgctcctcgttcgccttctgccatgattgtgaggcctctccagccatgtggaactgtgcagcacttggacagagtcatgaagccagagcgacatttaaaataacatccggagttacatataatcctaatttgcaagacaaactctcagtggatttcaaagttcttgcttttgaccttcagcaaatgatagatgagatctttctatcaagcaatctgaagaatgaatataagaactcaagagttttacaatttgaaaatggcagcattatagtcgtatttgaccttttctttgcccagtgggtgtcagatgaaaatgtaaaagaagaactgattcaaggccttgaagcaaataaatccagccaactggtcactttccatattgatttgaacagcgttgatatcctagcatctttggagaatttttctacagtaagccctgcaacaacttcagacaagctaacaaccaccagtcatctggcaactccaggaaatgtctcaatagagtgcctgcctggttcaagtccttgtactgatgctctaacgtgtataaaagctgatttattttgtgatggagaagtaaactgtccagatggttctgacgaagacaataaaatgtgtgccacagtttgtgatggaagatttttgttaactggatcatctgggtctttccaggctactcattatccaaaaccttctgaaacaagtgttgtctgccagtggatcatacg

SEQ ID NO: 193356 - DNA, 452 bp, Homo sapiens
  Payload ID: 18175
  Gene Name: transmembrane protease, serine 15
  ENST ID: ENST00000474775
  CDS Start-End: 438-452
ttgaaggtgactgaatagaacaatagatagatctcacatgagtgagaggaattctacagcaggtagtctttgcctttgaactgcagcatgaactctcctctgggtctcccacctgccagcccaccctgcagagtttgcatttgctagcctccacaatcggaaatggcagcattatagtcgtatttgaccttttctttgcccagtgggtgtcagatgaaaatgtaaaagaagaactgattcaaggccttgaagcaaataaatccagccaactggtcactttccatattgatttgaacagcgttgatatcctaggaaatgtctcaatagagtgcctgcctggttcaagtccttgtactgatgctctaacgtgtataaaagctgatttattttgtgatggagaagtaaactgtccagatggttctgacgaagacaataaaatgtgtgccacagtt

SEQ ID NO: 193357 - DNA, 3205 bp, Homo sapiens
  Payload ID: 18176
  Gene Name: transmembrane protease, serine 2
  Uniprot ID: O15393
  ENST ID: ENST00000332149
  CDS Start-End: 136-1614
cgagtaggcgcgagctaagcaggaggcggaggcggaggcggagggcgaggggcggggagcgccgcctggagcgcggcaggtcatattgaacattccagatacctatcattactcgatgctgttgataacagcaagatggctttgaactcagggtcaccaccagctattggaccttactatgaaaaccatggataccaaccggaaaacccctatcccgcacagcccactgtggtccccactgtctacgaggtgcatccggctcagtactacccgtcccccgtgccccagtacgccccgagggtcctgacgcaggcttccaaccccgtcgtctgcacgcagcccaaatccccatccgggacagtgtgcacctcaaagactaagaaagcactgtgcatcaccttgaccctggggaccttcctcgtgggagctgcgctggccgctggcctactctggaagttcatgggcagcaagtgctccaactctgggatagagtgcgactcctcaggtacctgcatcaacccctctaactggtgtgatggcgtgtcacactgccccggcggggaggacgagaatcggtgtgttcgcctctacggaccaaacttcatccttcaggtgtactcatctcagaggaagtcctggcaccctgtgtgccaagacgactggaacgagaactacgggcgggcggcctgcagggacatgggctataagaataatttttactctagccaaggaatagtggatgacagcggatccaccagctttatgaaactgaacacaagtgccggcaatgtcgatatctataaaaaactgtaccacagtgatgcctgttcttcaaaagcagtggtttctttacgctgtatagcctgcggggtcaacttgaactcaagccgccagagcaggattgtgggcggcgagagcgcgctcccgggggcctggccctggcaggtcagcctgcacgtccagaacgtccacgtgtgcggaggctccatcatcacccccgagtggatcgtgacagccgcccactgcgtggaaaaacctcttaacaatccatggcattggacggcatttgcggggattttgagacaatctttcatgttctatggagccggataccaagtagaaaaagtgatttctcatccaaattatgactccaagaccaagaacaatgacattgcgctgatgaagctgcagaagcctctgactttcaacgacctagtgaaaccagtgtgtctgcccaacccaggcatgatgctgcagccagaacagctctgctggatttccgggtggggggccaccgaggagaaagggaagacctcagaagtgctgaacgctgccaaggtgcttctcattgagacacagagatgcaacagcagatatgtctatgacaacctgatcacaccagccatgatctgtgccggcttcctgcaggggaacgtcgattcttgccagggtgacagtggagggcctctggtcacttcgaagaacaatatctggtggctgataggggatacaagctggggttctggctgtgccaaagcttacagaccaggagtgtacgggaatgtgatggtattcacggactggatttatcgacaaatgagggcagacggctaatccacatggtcttcgtccttgacgtcgttttacaagaaaacaatggggctggttttgcttccccgtgcatgatttactcttagagatgattcagaggtcacttcatttttattaaacagtgaacttgtctggctttggcactctctgccattctgtgcaggctgcagtggctcccctgcccagcctgctctccctaaccccttgtccgcaaggggtgatggccggctggttgtgggcactggcggtcaagtgtggaggagaggggtggaggctgccccattgagatcttcctgctgagtcctttccaggggccaattttggatgagcatggagctgtcacctctcagctgctggatgacttgagatgaaaaaggagagacatggaaagggagacagccaggtggcacctgcagcggctgccctctggggccacttggtagtgtccccagcctacctctccacaaggggattttgctgatgggttcttagagccttagcagccctggatggtggccagaaataaagggaccagcccttcatgggtggtgacgtggtagtcacttgtaaggggaacagaaacatttttgttcttatggggtgagaatatagacagtgcccttggtgcgagggaagcaattgaaaaggaacttgccctgagcactcctggtgcaggtctccacctgcacattgggtggggctcctgggagggagactcagccttcctcctcatcctccctgaccctgctcctagcaccctggagagtgcacatgccccttggtcctggcagggcgccaagtctggcaccatgttggcctcttcaggcctgctagtcactggaaattgaggtccatgggggaaatcaaggatgctcagtttaaggtacactgtttccatgttatgtttctacacattgctacctcagtgctcctggaaacttagcttttgatgtctccaagtagtccaccttcatttaactctttgaaactgtatcatctttgccaagtaagagtggtggcctatttcagctgctttgacaaaatgactggctcctgacttaacgttctataaatgaatgtgctgaagcaaagtgcccatggtggcggcgaagaagagaaagatgtgttttgttttggactctctgtggtcccttccaatgctgtgggtttccaaccaggggaagggtcccttttgcattgccaagtgccataaccatgagcactactctaccatggttctgcctcctggccaagcaggctggtttgcaagaatgaaatgaatgattctacagctaggacttaaccttgaaatggaaagtcatgcaatcccatttgcaggatctgtctgtgcacatgcctctgtagagagcagcattcccagggaccttggaaacagttggcactgtaaggtgcttgctccccaagacacatcctaaaaggtgttgtaatggtgaaaacgtcttccttctttattgccccttcttatttatgtgaacaactgtttgtctttttttgtatcttttttaaactgtaaagttcaattgtgaaaatgaatatcatgcaaataaattatgcaatttttttttcaaagtaa

SEQ ID NO: 193358 - DNA, 3240 bp, Homo sapiens
  Payload ID: 18176
  Gene Name: transmembrane protease, serine 2
  Uniprot ID: O15393
  ENST ID: ENST00000398585
  CDS Start-End: 62-1651
accagggtcccggctcggggtccgggctggggaggggaacctgggcgcctgggacccgccgatgccccctgccccgcccggaggtgaaagcgggtgtgaggagcgcggcgcggcaggtcatattgaacattccagatacctatcattactcgatgctgttgataacagcaagatggctttgaactcagggtcaccaccagctattggaccttactatgaaaaccatggataccaaccggaaaacccctatcccgcacagcccactgtggtccccactgtctacgaggtgcatccggctcagtactacccgtcccccgtgccccagtacgccccgagggtcctgacgcaggcttccaaccccgtcgtctgcacgcagcccaaatccccatccgggacagtgtgcacctcaaagactaagaaagcactgtgcatcaccttgaccctggggaccttcctcgtgggagctgcgctggccgctggcctactctggaagttcatgggcagcaagtgctccaactctgggatagagtgcgactcctcaggtacctgcatcaacccctctaactggtgtgatggcgtgtcacactgccccggcggggaggacgagaatcggtgtgttcgcctctacggaccaaacttcatccttcaggtgtactcatctcagaggaagtcctggcaccctgtgtgccaagacgactggaacgagaactacgggcgggcggcctgcagggacatgggctataagaataatttttactctagccaaggaatagtggatgacagcggatccaccagctttatgaaactgaacacaagtgccggcaatgtcgatatctataaaaaactgtaccacagtgatgcctgttcttcaaaagcagtggtttctttacgctgtatagcctgcggggtcaacttgaactcaagccgccagagcaggattgtgggcggcgagagcgcgctcccgggggcctggccctggcaggtcagcctgcacgtccagaacgtccacgtgtgcggaggctccatcatcacccccgagtggatcgtgacagccgcccactgcgtggaaaaacctcttaacaatccatggcattggacggcatttgcggggattttgagacaatctttcatgttctatggagccggataccaagtagaaaaagtgatttctcatccaaattatgactccaagaccaagaacaatgacattgcgctgatgaagctgcagaagcctctgactttcaacgacctagtgaaaccagtgtgtctgcccaacccaggcatgatgctgcagccagaacagctctgctggatttccgggtggggggccaccgaggagaaagggaagacctcagaagtgctgaacgctgccaaggtgcttctcattgagacacagagatgcaacagcagatatgtctatgacaacctgatcacaccagccatgatctgtgccggcttcctgcaggggaacgtcgattcttgccagggtgacagtggagggcctctggtcacttcgaagaacaatatctggtggctgataggggatacaagctggggttctggctgtgccaaagcttacagaccaggagtgtacgggaatgtgatggtattcacggactggatttatcgacaaatgagggcagacggctaatccacatggtcttcgtccttgacgtcgttttacaagaaaacaatggggctggttttgcttccccgtgcatgatttactcttagagatgattcagaggtcacttcatttttattaaacagtgaacttgtctggctttggcactctctgccattctgtgcaggctgcagtggctcccctgcccagcctgctctccctaaccccttgtccgcaaggggtgatggccggctggttgtgggcactggcggtcaagtgtggaggagaggggtggaggctgccccattgagatcttcctgctgagtcctttccaggggccaattttggatgagcatggagctgtcacctctcagctgctggatgacttgagatgaaaaaggagagacatggaaagggagacagccaggtggcacctgcagcggctgccctctggggccacttggtagtgtccccagcctacctctccacaaggggattttgctgatgggttcttagagccttagcagccctggatggtggccagaaataaagggaccagcccttcatgggtggtgacgtggtagtcacttgtaaggggaacagaaacatttttgttcttatggggtgagaatatagacagtgcccttggtgcgagggaagcaattgaaaaggaacttgccctgagcactcctggtgcaggtctccacctgcacattgggtggggctcctgggagggagactcagccttcctcctcatcctccctgaccctgctcctagcaccctggagagtgcacatgccccttggtcctggcagggcgccaagtctggcaccatgttggcctcttcaggcctgctagtcactggaaattgaggtccatgggggaaatcaaggatgctcagtttaaggtacactgtttccatgttatgtttctacacattgctacctcagtgctcctggaaacttagcttttgatgtctccaagtagtccaccttcatttaactctttgaaactgtatcatctttgccaagtaagagtggtggcctatttcagctgctttgacaaaatgactggctcctgacttaacgttctataaatgaatgtgctgaagcaaagtgcccatggtggcggcgaagaagagaaagatgtgttttgttttggactctctgtggtcccttccaatgctgtgggtttccaaccaggggaagggtcccttttgcattgccaagtgccataaccatgagcactactctaccatggttctgcctcctggccaagcaggctggtttgcaagaatgaaatgaatgattctacagctaggacttaaccttgaaatggaaagtcatgcaatcccatttgcaggatctgtctgtgcacatgcctctgtagagagcagcattcccagggaccttggaaacagttggcactgtaaggtgcttgctccccaagacacatcctaaaaggtgttgtaatggtgaaaacgtcttccttctttattgccccttcttatttatgtgaacaactgtttgtctttttttgtatcttttttaaactgtaaagttcaattgtgaaaatgaatatcatgcaaataaattatgcaatttttttttcaaagt

SEQ ID NO: 193359 - DNA, 1901 bp, Homo sapiens
  Payload ID: 18176
  Gene Name: transmembrane protease, serine 2
  ENST ID: ENST00000454499
  CDS Start-End: 435-1901
agcccaccagaggcaaaaagaggacagtctcacggtccccaagcccagagaccactgggaggggagcaagtggggtctggaccaccgaccttagcttcacctcaacccccaagaacacctgccccgttggaggcagactggagctggctgtggattttatttctcaggagaaggaggtgggagctggagagagtgacccgtgcatctttccagcttttccttggccacctgggtggcatgggagctgggagtcagagttctgctgagctgtaggaccaaaggccactggctccgctgcacctgcggactgagacacccacctgctgagtgagacccagcctctgcgtgcttaggggtcccctgctacagggcattgaggtcatattgaacattccagatacctatcattactcgatgctgttgataacagcaagatggctttgaactcagggtcaccaccagctattggaccttactatgaaaaccatggataccaaccggaaaacccctatcccgcacagcccactgtggtccccactgtctacgaggtgcatccggctcagtactacccgtcccccgtgccccagtacgccccgagggtcctgacgcaggcttccaaccccgtcgtctgcacgcagcccaaatccccatccgggacagtgtgcacctcaaagactaagaaagcactgtgcatcaccttgaccctggggaccttcctcgtgggagctgcgctggccgctggcctactctggaagttcatgggcagcaagtgctccaactctgggatagagtgcgactcctcaggtacctgcatcaacccctctaactggtgtgatggcgtgtcacactgccccggcggggaggacgagaatcggtgtgttcgcctctacggaccaaacttcatccttcaggtgtactcatctcagaggaagtcctggcaccctgtgtgccaagacgactggaacgagaactacgggcgggcggcctgcagggacatgggctataagaataatttttactctagccaaggaatagtggatgacagcggatccaccagctttatgaaactgaacacaagtgccggcaatgtcgatatctataaaaaactgtaccacagtgatgcctgttcttcaaaagcagtggtttctttacgctgtatagcctgcggggtcaacttgaactcaagccgccagagcaggattgtgggcggcgagagcgcgctcccgggggcctggccctggcaggtcagcctgcacgtccagaacgtccacgtgtgcggaggctccatcatcacccccgagtggatcgtgacagccgcccactgcgtggaaaaacctcttaacaatccatggcattggacggcatttgcggggattttgagacaatctttcatgttctatggagccggataccaagtagaaaaagtgatttctcatccaaattatgactccaagaccaagaacaatgacattgcgctgatgaagctgcagaagcctctgactttcaacgacctagtgaaaccagtgtgtctgcccaacccaggcatgatgctgcagccagaacagctctgctggatttccgggtggggggccaccgaggagaaagggaagacctcagaagtgctgaacgctgccaaggtgcttctcattgagacacagagatgcaacagcagatatgtctatgacaacctgatcacaccagccatgatctgtgccggcttcctgcaggggaacgtcgattcttgccagggtgacagtggagggcctctggtcacttcgaagaacaatatctggtggctgataggggatacaagctggggttctggctgtgccaaagcttacagaccaggagtgtacgggaatgtgatggtattcacggactggatttatcgacaaatgagg

SEQ ID NO: 193360 - DNA, 1701 bp, Homo sapiens
  Payload ID: 18176
  Gene Name: transmembrane protease, serine 2
  Uniprot ID: O15393
  ENST ID: ENST00000458356
  CDS Start-End: 90-1568
gtgaaagcgggtgtgaggagcgcggcgcggcaggtcatattgaacattccagatacctatcattactcgatgctgttgataacagcaagatggctttgaactcagggtcaccaccagctattggaccttactatgaaaaccatggataccaaccggaaaacccctatcccgcacagcccactgtggtccccactgtctacgaggtgcatccggctcagtactacccgtcccccgtgccccagtacgccccgagggtcctgacgcaggcttccaaccccgtcgtctgcacgcagcccaaatccccatccgggacagtgtgcacctcaaagactaagaaagcactgtgcatcaccttgaccctggggaccttcctcgtgggagctgcgctggccgctggcctactctggaagttcatgggcagcaagtgctccaactctgggatagagtgcgactcctcaggtacctgcatcaacccctctaactggtgtgatggcgtgtcacactgccccggcggggaggacgagaatcggtgtgttcgcctctacggaccaaacttcatccttcaggtgtactcatctcagaggaagtcctggcaccctgtgtgccaagacgactggaacgagaactacgggcgggcggcctgcagggacatgggctataagaataatttttactctagccaaggaatagtggatgacagcggatccaccagctttatgaaactgaacacaagtgccggcaatgtcgatatctataaaaaactgtaccacagtgatgcctgttcttcaaaagcagtggtttctttacgctgtatagcctgcggggtcaacttgaactcaagccgccagagcaggattgtgggcggcgagagcgcgctcccgggggcctggccctggcaggtcagcctgcacgtccagaacgtccacgtgtgcggaggctccatcatcacccccgagtggatcgtgacagccgcccactgcgtggaaaaacctcttaacaatccatggcattggacggcatttgcggggattttgagacaatctttcatgttctatggagccggataccaagtagaaaaagtgatttctcatccaaattatgactccaagaccaagaacaatgacattgcgctgatgaagctgcagaagcctctgactttcaacgacctagtgaaaccagtgtgtctgcccaacccaggcatgatgctgcagccagaacagctctgctggatttccgggtggggggccaccgaggagaaagggaagacctcagaagtgctgaacgctgccaaggtgcttctcattgagacacagagatgcaacagcagatatgtctatgacaacctgatcacaccagccatgatctgtgccggcttcctgcaggggaacgtcgattcttgccagggtgacagtggagggcctctggtcacttcgaagaacaatatctggtggctgataggggatacaagctggggttctggctgtgccaaagcttacagaccaggagtgtacgggaatgtgatggtattcacggactggatttatcgacaaatgagggcagacggctaatccacatggtcttcgtccttgacgtcgttttacaagaaaacaatggggctggttttgcttccccgtgcatgatttactcttagagatgattcagaggtcacttcatttttattaaacagtgaacttgtctggc

SEQ ID NO: 193361 - DNA, 454 bp, Homo sapiens
  Payload ID: 18176
  Gene Name: transmembrane protease, serine 2
  ENST ID: ENST00000455813
  CDS Start-End: 217-454
ctggctcctgagctgctgctgtgaagggaggacctggtgggctaggtaaccgggagctcccccagaaagtcactggaggttgctcaggacttccccacctttactgagtgcttttgaagaagtaggacctgccctgctccgctacagaactactggacaggtcatattgaacattccagatacctatcattactcgatgctgttgataacagcaagatggctttgaactcagggtcaccaccagctattggaccttactatgaaaaccatggataccaaccggaaaacccctatcccgcacagcccactgtggtccccactgtctacgaggtgcatccggctcagtactacccgtcccccgtgccccagtacgccccgagggtcctgacgcaggcttccaaccccgtcgtctgcacgcagcccaaatccccatccgggacagtgtgcacctcaa

SEQ ID NO: 193362 - DNA, 726 bp, Homo sapiens
  Payload ID: 18176
  Gene Name: transmembrane protease, serine 2
  ENST ID: ENST00000424093
  CDS Start-End: 69-726
ggagcgcggcaggtcatattgaacattccagatacctatcattactcgatgctgttgataacagcaagatggctttgaactcagggtcaccaccagctattggaccttactatgaaaaccatggataccaaccggaaaacccctatcccgcacagcccactgtggtccccactgtctacgaggtgcatccggctcagtactacccgtcccccgtgccccagtacgccccgagggtcctgacgcaggcttccaaccccgtcgtctgcacgcagcccaaatccccatccgggacagtgtgcacctcaaagactaagaaagcactgtgcatcaccttgaccctggggaccttcctcgtgggagctgcgctggccgctggcctactctggaagttcattcgcctctacggaccaaacttcatccttcaggtgtactcatctcagaggaagtcctggcaccctgtgtgccaagacgactggaacgagaactacgggcgggcggcctgcagggacatgggctataagaataatttttactctagccaaggaatagtggatgacagcggatccaccagctttatgaaactgaacacaagtgccggcaatgtcgatatctataaaaaactgtaccacagtgatgcctgttcttcaaaagcagtggtttctttacgctgtatagcctgcggggtcaacttgaactcaagccgccagagcaggattgtgggcggcg

SEQ ID NO: 193363 - DNA, 3193 bp, Homo sapiens
  Payload ID: 18177
  Gene Name: transmembrane protease, serine 3
  Uniprot ID: P57727
  ENST ID: ENST00000291532
  CDS Start-End: 957-2321
ttctgcttttaatgatggcagctccagaaatggtgagtaaaatgggtgtgaggagagaagatgcttctcaacacttctcagtgttgtacagcttgccaaccacagcctgtttgggaggggatgttctcacccaggttccatctttcagaagccatttgcccacttattctttttatatggataaacgatgtaatttgctacatgctgataataaacagaggtatcagcaagaatgaaagccagaaaatggcccaacatgaacttcttgcttttctaagttactctttcaagctcttcttgcgatagaaatgaaatgaacatttttggcacagaactcttgtttagattttactatgatcttgggaaacacgggttgcttcaaatggcttactagatccctttggaatttcaaacgttacaacaggtagtcacaaagggaatgaaagcggatgatctgagtgtctgtgctgatgtgcctgctggagcccctgtggattttagcccttggaggaagcaggttcccagagcagccatgcctgatatctgggagagggaactagaatttaattgggaatcttctgctatttccctgcttcctccgccctctcagagttacagggaatgacttagaaaggtctctggtctccttggcattgtgataggtggaattctttcgtaggaaacacagccccggggttattttgatgcaagccgttggtccaaagccactccccactttgctatgtgggggaaggaccgggcaccggacggctcgggtactttcgttcttaattaggtcatgcccgtgtgagccaggaaagggctgtgtttatgggaagccagtaacactgtggcctactatctcttccgtggtgccatctacatttttgggactcgggaattatgaggtagaggtggaggcggagccggatgtcagaggtcctgaaatagtcaccatgggggaaaatgatccgcctgctgttgaagcccccttctcattccgatcgctttttggccttgatgatttgaaaataagtcctgttgcaccagatgcagatgctgttgctgcacagatcctgtcactgctgccattgaagttttttccaatcatcgtcattgggatcattgcattgatattagcactggccattggtctgggcatccacttcgactgctcagggaagtacagatgtcgctcatcctttaagtgtatcgagctgatagctcgatgtgacggagtctcggattgcaaagacggggaggacgagtaccgctgtgtccgggtgggtggtcagaatgccgtgctccaggtgttcacagctgcttcgtggaagaccatgtgctccgatgactggaagggtcactacgcaaatgttgcctgtgcccaactgggtttcccaagctatgtgagttcagataacctcagagtgagctcgctggaggggcagttccgggaggagtttgtgtccatcgatcacctcttgccagatgacaaggtgactgcattacaccactcagtatatgtgagggagggatgtgcctctggccacgtggttaccttgcagtgcacagcctgtggtcatagaaggggctacagctcacgcatcgtgggtggaaacatgtccttgctctcgcagtggccctggcaggccagccttcagttccagggctaccacctgtgcgggggctctgtcatcacgcccctgtggatcatcactgctgcacactgtgtttatgacttgtacctccccaagtcatggaccatccaggtgggtctagtttccctgttggacaatccagccccatcccacttggtggagaagattgtctaccacagcaagtacaagccaaagaggctgggcaatgacatcgcccttatgaagctggccgggccactcacgttcaatgaaatgatccagcctgtgtgcctgcccaactctgaagagaacttccccgatggaaaagtgtgctggacgtcaggatggggggccacagaggatggagcaggtgacgcctcccctgtcctgaaccacgcggccgtccctttgatttccaacaagatctgcaaccacagggacgtgtacggtggcatcatctccccctccatgctctgcgcgggctacctgacgggtggcgtggacagctgccagggggacagcggggggcccctggtgtgtcaagagaggaggctgtggaagttagtgggagcgaccagctttggcatcggctgcgcagaggtgaacaagcctggggtgtacacccgtgtcacctccttcctggactggatccacgagcagatggagagagacctaaaaacctgaagaggaaggggacaagtagccacctgagttcctgaggtgatgaagacagcccgatcctcccctggactcccgtgtaggaacctgcacacgagcagacacccttggagctctgagttccggcaccagtagcaggcccgaaagaggcacccttccatctgattccagcacaaccttcaagctgctttttgttttttgtttttttgagatggagtctcgctctgttgcccaggctggagtgcagtggcgaaatccctgctcactgcagcctccgcttccctggttcaagcgattctcttgcctcagcttccccagtagctgggaccacaggtgcccgccaccacacccaactaatttttgtatttttagtagagacagggtttcaccatgttggccaggctgctctcaaacccctgacctcaaatgatgtgcctgcttcagcctcccacagtgctgggattacaggcatgggccaccacgcctagcctcacgctcctttctgatcttcactaagaacaaaagaagcagcaacttgcaagggcggcctttcccactggtccatctggttttctctccaggggtcttgcaaaattcctgacgagataagcagttatgtgacctcacgtgcaaagccaccaacagccactcagaaaagacgcaccagcccagaagtgcagaactgcagtcactgcacgttttcatctctagggaccagaaccaaacccaccctttctacttccaagacttattttcacatgtggggaggttaatctaggaatgactcgtttaaggcctattttcatgatttctttgtagcatttggtgcttgacgtattattgtcctttgattccaaataatatgtttccttccctca

SEQ ID NO: 193364 - DNA, 1342 bp, Homo sapiens
  Payload ID: 18177
  Gene Name: transmembrane protease, serine 3
  Uniprot ID: P57727
  ENST ID: ENST00000398397
  CDS Start-End: 202-1236
accgggcaccggacggctcgggtactttcgttcttaattaggtcatgcccgtgtgagccaggaaagggctgtgtttatgggaagccagtaacactgtggcctactatctcttccgtggtgccatctacatttttgggactcgggaattatgaggtagaggtggaggcggagccggatgtcagaggtcctgaaatagtcaccatgggggaaaatgatccgcctgctgttgaagcccccttctcattccgatcgctttttggccttgatgatttgaaaataagtcctgttgcaccagatgcagatgctgttgctgcacagatcctgtcactgctgccattgaagttttttccaatcatcgtcattgggatcattgcattgatattagcactggccattggtctgggcatccacttcgactgctcagggaagtacagatgtcgctcatcctttaagtgtatcgagctgatagctcgatgtgacggagtctcggattgcaaagacggggaggacgagtaccgctgtgtccgggtgggtggtcagaatgccgtgctccaggtgttcacagctgcttcgtggaagaccatgtgctccgatgactggaagggtcactacgcaaatgttgcctgtgcccaactgggtttcccaagctatgtgagttcagataacctcagagtgagctcgctggaggggcagttccgggaggagtttgtgtccatcgatcacctcttgccagatgacaaggtgactgcattacaccactcagtatatgtgagggagggatgtgcctctggccacgtggttaccttgcagtgcacagcctgtggtcatagaaggggctacagctcacgcatcgtgggtggaaacatgtccttgctctcgcagtggccctggcaggccagccttcagttccagggctaccacctgtgcgggggctctgtcatcacgcccctgtggatcatcactgctgcacactgtgtttatgacttgtacctccccaagtcatggaccatccaggtgggtctagtttccctgttggacaatccagccccatcccacttggtggagaagattgtctaccacagcaagtacaagccaaagaggctgggcaatgacatcgcccttatgaagctggccgggccactcacgttcaatggtacatctgggtctctatgtggttctgcagctcttcctttgtttcaagaggatttgcaattgctcattgaagcattcttatgatggctgctttataatccttgtcagatattaataattccaactcctgattcatgttggtgttggcatcagttgattatcttttctcattaaaattgtgatgctccta

SEQ ID NO: 193365 - DNA, 2754 bp, Homo sapiens
  Payload ID: 18177
  Gene Name: transmembrane protease, serine 3
  ENST ID: ENST00000398405
  CDS Start-End: 527-1882
atgtgagtaccgaaactacttatgcttatggtaggtgtaccacacgcacagggaaagaattgcgtttatgtgggacaggtgaaaacaatcgcaaaaaagcaatggaaagggctttgagagtaatttatcttctgaacaatagcaatatggcaacttctaaatggtgagagggagtccctctaaagcaatcgatttgaagattggttggacaaacaatgggaaagtcattgtcttagcagaattaagttcatactttttttttttttttttttttgctaattctagaagcttttctgttatctgctgtagctcagacgaaaatgcattctcaccagatgactgtttttggttaatcgatactgaatgcgctttgtgtggactgtcgaatttcaaagatttaccgtatgaccaagatgcacctgatgctacaagtataaataggggaacaaatgctttctgttcttcctcggctaaggaggtagaggtggaggcggagccggatgtcagaggtcctgaaatagtcaccatgggggaaaatgatccgcctgctgttgaagcccccttctcattccgatcgctttttggccttgatgatttgaaaataagtcctgttgcaccagatgctgttgctgcacagatcctgtcactgctgccattgaagttttttccaatcatcgtcattgggatcattgcattgatattagcactggccattggtctgggcatccacttcgactgctcagggaagtacagatgtcgctcatcctttaagtgtatcgagctgatagctcgatgtgacggagtctcggattgcaaagacggggaggacgagtaccgctgtgtccgggtgggtggtcagaatgccgtgctccaggtgttcacagctgcttcgtggaagaccatgtgctccgatgactggaagggtcactacgcaaatgttgcctgtgcccaactgggtttcccaagctatgtgagttcagataacctcagagtgagctcgctggaggggcagttccgggaggagtttgtgtccatcgatcacctcttgccagatgacaaggtgactgcattacaccactcagtatatgtgagggagggatgtgcctctggccacgtggttaccttgcagtgcacagcctgtggtcatagaaggggctacagctcacgcatcgtgggtggaaacatgtccttgctctcgcagtggccctggcaggccagccttcagttccagggctaccacctgtgcgggggctctgtcatcacgcccctgtggatcatcactgctgcacactgtgtttatgacttgtacctccccaagtcatggaccatccaggtgggtctagtttccctgttggacaatccagccccatcccacttggtggagaagattgtctaccacagcaagtacaagccaaagaggctgggcaatgacatcgcccttatgaagctggccgggccactcacgttcaatgaaatgatccagcctgtgtgcctgcccaactctgaagagaacttccccgatggaaaagtgtgctggacgtcaggatggggggccacagaggatggaggtgacgcctcccctgtcctgaaccacgcggccgtccctttgatttccaacaagatctgcaaccacagggacgtgtacggtggcatcatctccccctccatgctctgcgcgggctacctgacgggtggcgtggacagctgccagggggacagcggggggcccctggtgtgtcaagagaggaggctgtggaagttagtgggagcgaccagctttggcatcggctgcgcagaggtgaacaagcctggggtgtacacccgtgtcacctccttcctggactggatccacgagcagatggagagagacctaaaaacctgaagaggaaggggacaagtagccacctgagttcctgaggtgatgaagacagcccgatcctcccctggactcccgtgtaggaacctgcacacgagcagacacccttggagctctgagttccggcaccagtagcaggcccgaaagaggcacccttccatctgattccagcacaaccttcaagctgctttttgttttttgtttttttgagatggagtctcgctctgttgcccaggctggagtgcagtggcgaaatccctgctcactgcagcctccgcttccctggttcaagcgattctcttgcctcagcttccccagtagctgggaccacaggtgcccgccaccacacccaactaatttttgtatttttagtagagacagggtttcaccatgttggccaggctgctctcaaacccctgacctcaaatgatgtgcctgcttcagcctcccacagtgctgggattacaggcatgggccaccacgcctagcctcacgctcctttctgatcttcactaagaacaaaagaagcagcaacttgcaagggcggcctttcccactggtccatctggttttctctccaggggtcttgcaaaattcctgacgagataagcagttatgtgacctcacgtgcaaagccaccaacagccactcagaaaagacgcaccagcccagaagtgcagaactgcagtcactgcacgttttcatctctagggaccagaaccaaacccaccctttctacttccaagacttattttcacatgtggggaggttaatctaggaatgactcgtttaaggcctattttcatgatttctttgtagcatttggtgcttgacgtattattgtcctttgattccaaataatatgtttccttccctca

SEQ ID NO: 193366 - DNA, 2403 bp, Homo sapiens
  Payload ID: 18177
  Gene Name: transmembrane protease, serine 3
  Uniprot ID: P57727
  ENST ID: ENST00000433957
  CDS Start-End: 170-1531
cttaattaggtcatgcccgtgtgagccaggaaagggctgtgtttatgggaagccagtaacactgtggcctactatctcttccgtggtgccatctacatttttgggactcgggaattatgaggtagaggtggaggcggagccggatgtcagaggtcctgaaatagtcaccatgggggaaaatgatccgcctgctgttgaagcccccttctcattccgatcgctttttggccttgatgatttgaaaataagtcctgttgcaccagatgcagatgctgttgctgcacagatcctgtcactgctgccattgaagttttttccaatcatcgtcattgggatcattgcattgatattagcactggccattggtctgggcatccacttcgactgctcagggaagtacagatgtcgctcatcctttaagtgtatcgagctgatagctcgatgtgacggagtctcggattgcaaagacggggaggacgagtaccgctgtgtccgggtgggtggtcagaatgccgtgctccaggtgttcacagctgcttcgtggaagaccatgtgctccgatgactggaagggtcactacgcaaatgttgcctgtgcccaactgggtttcccaagctatgtgagttcagataacctcagagtgagctcgctggaggggcagttccgggaggagtttgtgtccatcgatcacctcttgccagatgacaaggtgactgcattacaccactcagtatatgtgagggagggatgtgcctctggccacgtggttaccttgcagtgcacagcctgtggtcatagaaggggctacagctcacgcatcgtgggtggaaacatgtccttgctctcgcagtggccctggcaggccagccttcagttccagggctaccacctgtgcgggggctctgtcatcacgcccctgtggatcatcactgctgcacactgtgtttatgacttgtacctccccaagtcatggaccatccaggtgggtctagtttccctgttggacaatccagccccatcccacttggtggagaagattgtctaccacagcaagtacaagccaaagaggctgggcaatgacatcgcccttatgaagctggccgggccactcacgttcaatgaaatgatccagcctgtgtgcctgcccaactctgaagagaacttccccgatggaaaagtgtgctggacgtcaggatggggggccacagaggatggaggtgacgcctcccctgtcctgaaccacgcggccgtccctttgatttccaacaagatctgcaaccacagggacgtgtacggtggcatcatctccccctccatgctctgcgcgggctacctgacgggtggcgtggacagctgccagggggacagcggggggcccctggtgtgtcaagagaggaggctgtggaagttagtgggagcgaccagctttggcatcggctgcgcagaggtgaacaagcctggggtgtacacccgtgtcacctccttcctggactggatccacgagcagatggagagagacctaaaaacctgaagaggaaggggacaagtagccacctgagttcctgaggtgatgaagacagcccgatcctcccctggactcccgtgtaggaacctgcacacgagcagacacccttggagctctgagttccggcaccagtagcaggcccgaaagaggcacccttccatctgattccagcacaaccttcaagctgctttttgttttttgtttttttgagatggagtctcgctctgttgcccaggctggagtgcagtggcgaaatccctgctcactgcagcctccgcttccctggttcaagcgattctcttgcctcagcttccccagtagctgggaccacaggtgcccgccaccacacccaactaatttttgtatttttagtagagacagggtttcaccatgttggccaggctgctctcaaacccctgacctcaaatgatgtgcctgcttcagcctcccacagtgctgggattacaggcatgggccaccacgcctagcctcacgctcctttctgatcttcactaagaacaaaagaagcagcaacttgcaagggcggcctttcccactggtccatctggttttctctccaggggtcttgcaaaattcctgacgagataagcagttatgtgacctcacgtgcaaagccaccaacagccactcagaaaagacgcaccagcccagaagtgcagaactgcagtcactgcacgttttcatctctagggaccagaaccaaacccaccctttctacttccaagacttattttcacatgtggggaggttaatctaggaatgactcgtttaaggcctattttcatgatttctttgtagcatttggtgcttgacgtattattgtcctttgattccaaataatatgtttccttccctca

SEQ ID NO: 193367 - DNA, 2074 bp, Homo sapiens
  Payload ID: 18178
  Gene Name: transmembrane protease, serine 4
  Uniprot ID: Q9NRS4
  ENST ID: ENST00000437212
  CDS Start-End: 215-1528
acacagagagaggcagcagcttgctcagcggacaaggatgctgggcgtgagggaccaaggcctgccctgcactcgggcctcctccagccagtgctgaccagggacttctgacctgctggccagccaggacctgtgtggggaggccctcctgctgccttggggtgacaatctcagctccaggctacagggagaccgggaggatcacagagccagcatgttacaggatcctgacagtgatcaacctctgaacagcctcgatgtcaaacccctgcgcaaaccccgtatccccatggagaccttcagaaaggtggggatccccatcatcatagcactactgagcctggcgagtatcatcattgtggttgtcctcatcaaggtgattctggataaatactacttcctctgcgggcagcctctccacttcatcccgaggaagcagctgtgtgacggagagctggactgtcccttgggggaggacgaggagcactgtgtcaagagcttccccgaagggcctgcagtggcagtccgcctctccaaggaccgatccacactgcaggtgctggactcggccacagggaactggttctctgcctgtttcgacaacttcacagaagctctcgctgagacagcctgtaggcagatgggctacagcagcaaacccactttcagagctgtggagattggcccagaccaggatctggatgttgttgaaatcacagaaaacagccaggagcttcgcatgcggaactcaagtgggccctgtctctcaggctccctggtctccctgcactgtcttgcctgtgggaagagcctgaagaccccccgtgtggtgggtgtggaggaggcctctgtggattcttggccttggcaggtcagcatccagtacgacaaacagcacgtctgtggagggagcatcctggacccccactgggtcctcacggcagcccactgcttcaggaaacataccgatgtgttcaactggaaggtgcgggcaggctcagacaaactgggcagcttcccatccctggctgtggccaagatcatcatcattgaattcaaccccatgtaccccaaagacaatgacatcgccctcatgaagctgcagttcccactcactttctcaggcacagtcaggcccatctgtctgcccttctttgatgaggagctcactccagccaccccactctggatcattggatggggctttacgaagcagaatggagggaagatgtctgacatactgctgcaggcgtcagtccaggtcattgacagcacacggtgcaatgcagacgatgcgtaccagggggaagtcaccgagaagatgatgtgtgcaggcatcccggaagggggtgtggacacctgccagggtgacagtggtgggcccctgatgtaccaatctgaccagtggcatgtggtgggcatcgttagttggggctatggctgcgggggcccgagcaccccaggagtatacaccaaggtctcagcctatctcaactggatctacaatgtctggaaggctgagctgtaatgctgctgcccctttgcagtgctgggagccgcttccttcctgccctgcccacctggggatcccccaaagtcagacacagagcaagagtccccttgggtacacccctctgcccacagcctcagcatttcttggagcagcaaagggcctcaattcctataagagaccctcgcagcccagaggcgcccagaggaagtcagcagccctagctcggccacacttggtgctcccagcatcccagggagagacacagcccactgaacaaggtctcaggggtattgctaagccaagaaggaactttcccacactactgaatggaagcaggctgtcttgtaaaagcccagatcactgtgggctggagaggagaaggaaagggtctgcgccagccctgtccgtcttcacccatccccaagcctactagagcaagaaaccagttgtaatataaaatgcactgccctactgttggtatgactaccgttacctactgttgtcattgttattacagctatggccactattattaaagagctgtgtaacatctctggcata

SEQ ID NO: 193368 - DNA, 725 bp, Homo sapiens
  Payload ID: 18178
  Gene Name: transmembrane protease, serine 4
  ENST ID: ENST00000524218
  CDS Start-End: 1-188
ggaaggtgcgggcaggctcagacaaactgggcagcttcccatccctggctgtggccaagatcatcatcattgaattcaaccccatgtaccccaaagacaatgacatcgccctcatgaagctgcagttcccactcactttctcagcctatctcaactggatctacaatgtctggaaggctgagctgtaatgctgctgcccctttgcagtgctgggagccgcttccttcctgccctgcccacctggggatcccccaaagtcagacacagagcaagagtccccttgggtacacccctctgcccacagcctcagcatttcttggagcagcaaagggcctcaattcctataagagaccctcgcagcccagaggcgcccagaggaagtcagcagccctagctcggccacacttggtgctcccagcatcccagggagagacacagcccactgaacaaggtctcaggggtattgctaagccaagaaggaactttcccacactactgaatggaagcaggctgtcttgtaaaagcccagatcactgtgggctggagaggagaaggaaagggtctgcgccagccctgtccgtcttcacccatccccaagcctactagagcaagaaaccagttgtaatataaaatgcactgccctactgttggtatgactaccgttacctactgttgtcattgttattacagctatggccactattattaaagagctgtgtaacatc

SEQ ID NO: 193369 - DNA, 692 bp, Homo sapiens
  Payload ID: 18178
  Gene Name: transmembrane protease, serine 4
  ENST ID: ENST00000522151
  CDS Start-End: 174-692
tgggcgtgagggaccaaggcctgccctgcactcgggcctcctccagccagtgctgaccagggacttctgacctgctggccagccaggacctgtgtggggaggccctcctgctgccttggggtgacaatctcagctccaggctacagggagaccgggaggatcacagagccagcatggatcctgacagtgatcaacctctgaacagcctcgatgtcaaacccctgcgcaaaccccgtatccccatggagaccttcagaaaggtggggatccccatcatcatagcactactgagcctggcgagtatcatcattgtggttgtcctcatccgcctctccaaggaccgatccacactgcaggtgctggactcggccacagggaactggttctctgcctgtttcgacaacttcacagaagctctcgctgagacagcctgtaggcagatgggctacagcagcaaacccactttcagagctgtggagattggcccagaccaggatctggatgttgttgaaatcacagaaaacagccaggagcttcgcatgcggaactcaagtgggccctgtctctcaggctccctggtctccctgcactgtcttgcctgtgggaagagcctgaagaccccccgtgtggtgggtgtggaggaggcctctgtggattcttggccttggcaggtcagcatccagtacgacaaa

SEQ ID NO: 193370 - DNA, 1634 bp, Homo sapiens
  Payload ID: 18178
  Gene Name: transmembrane protease, serine 4
  ENST ID: ENST00000522307
  CDS Start-End: 584-1456
tcactcctggaatacacagagagaggcagcagcttgctcagcggacaaggatgctgggcgtgagggaccaaggcctgccctgcactcgggcctcctccagccagtgctgaccagggacttctgacctgctggccagccaggacctgtgtggggaggccctcctgctgccttggggtgacaatctcagctccaggctacagggagaccgggaggatcacagagccagcatggatcctgacagtgatcaacctctgaacagcctcgatgtcaaacccctgcgcaaaccccgtatccccatggagaccttcagaaagtcaaggtgattctggataaatactacttcctctgcgggcagcctctccacttcatcccgaggaagcagctgtgtgacggagagctggactgtcccttgggggaggacgaggagcactgtgtcaagagcttccccgaagggcctgcagtggcagtccgcctctccaaggaccgatccacactgcaggtgctggactcggccacagggaactggttctctgcctgtttcgacaacttcacagaagctctcgctgagacagcctgtaggcagatgggctacagcagagctgtggagattggcccagaccaggatctggatgttgttgaaatcacagaaaacagccaggagcttcgcatgcggaactcaagtgggccctgtctctcaggctccctggtctccctgcactgtcttgcctgtgggaagagcctgaagaccccccgtgtggtgggtgtggaggaggcctctgtggattcttggccttggcaggtcagcatccagtacgacaaacagcacgtctgtggagggagcatcctggacccccactgggtcctcacggcagcccactgcttcaggaaacataccgatgtgttcaactggaaggtgcgggcaggctcagacaaactgggcagcttcccatccctggctgtggccaagatcatcatcattgaattcaaccccatgtaccccaaagacaatgacatcgccctcatgaagctgcagttcccactcactttctcaggcacagtcaggcccatctgtctgcccttctttgatgaggagctcactccagccaccccactctggatcattggatggggctttacgaagcagaatggagggaagatgtctgacatactgctgcaggcgtcagtccaggtcattgacagcacacggtgcaatgcagacgatgcgtaccagggggaagtcaccgagaagatgatgtgtgcaggcatcccggaagggggtgtggacacctgccagggtgacagtggtgggcccctgatgtaccaatctgaccagtggcatgtggtgggcatcgttagttggggctatggctgcgggggcccgagcaccccaggagtatacaccaaggtctcagcctatctcaactggatctacaatgtctggaaggctgagctgtaatgctgctgcccctttgcagtgctgggagccgcttccttcctgccctgcccacctggggatcccccaaagtcagacacagagcaagagtccccttgggtacacccctctgcccacagcctcagcatttcttggagcagcaaagggcctcaattcctataagagaccctcgcagcccaga

SEQ ID NO: 193371 - DNA, 1689 bp, Homo sapiens
  Payload ID: 18178
  Gene Name: transmembrane protease, serine 4
  Uniprot ID: Q9NRS4
  ENST ID: ENST00000523251
  CDS Start-End: 227-1420
cactcctggaatacacagagagaggcagcagcttgctcagcggacaaggatgctgggcgtgagggaccaaggcctgccctgcactcgggcctcctccagccagtgctgaccagggacttctgacctgctggccagccaggacctgtgtggggaggccctcctgctgccttggggtgacaatctcagctccaggctacagggagaccgggaggatcacagagccagcatggatcctgacagtgatcaacctctgaacagcctcgtcaaggtgattctggataaatactacttcctctgcgggcagcctctccacttcatcccgaggaagcagctgtgtgacggagagctggactgtcccttgggggaggacgaggagcactgtgtcaagagcttccccgaagggcctgcagtggcagtccgcctctccaaggaccgatccacactgcaggtgctggactcggccacagggaactggttctctgcctgtttcgacaacttcacagaagctctcgctgagacagcctgtaggcagatgggctacagcagcaaacccactttcagagctgtggagattggcccagaccaggatctggatgttgttgaaatcacagaaaacagccaggagcttcgcatgcggaactcaagtgggccctgtctctcaggctccctggtctccctgcactgtcttgcctgtgggaagagcctgaagaccccccgtgtggtgggtgtggaggaggcctctgtggattcttggccttggcaggtcagcatccagtacgacaaacagcacgtctgtggagggagcatcctggacccccactgggtcctcacggcagcccactgcttcaggaaacataccgatgtgttcaactggaaggtgcgggcaggctcagacaaactgggcagcttcccatccctggctgtggccaagatcatcatcattgaattcaaccccatgtaccccaaagacaatgacatcgccctcatgaagctgcagttcccactcactttctcaggcacagtcaggcccatctgtctgcccttctttgatgaggagctcactccagccaccccactctggatcattggatggggctttacgaagcagaatggagggaagatgtctgacatactgctgcaggcgtcagtccaggtcattgacagcacacggtgcaatgcagacgatgcgtaccagggggaagtcaccgagaagatgatgtgtgcaggcatcccggaagggggtgtggacacctgccagggtgacagtggtgggcccctgatgtaccaatctgaccagtggcatgtggtgggcatcgttagttggggctatggctgcgggggcccgagcaccccaggagtatacaccaaggtctcagcctatctcaactggatctacaatgtctggaaggctgagctgtaatgctgctgcccctttgcagtgctgggagccgcttccttcctgccctgcccacctggggatcccccaaagtcagacacagagcaagagtccccttgggtacacccctctgcccacagcctcagcatttcttggagcagcaaagggcctcaattcctataagagaccctcgcagcccagaggcgcccagaggaagtcagcagccctagctcggccacacttggtgctcccagcatcccagggagagacacagcccactgaacaaggtctca

SEQ ID NO: 193372 - DNA, 789 bp, Homo sapiens
  Payload ID: 18178
  Gene Name: transmembrane protease, serine 4
  ENST ID: ENST00000517544
  CDS Start-End: 1-445
ccccatcatcatagcactactgagcctggcgagtatcatcattgtggttgtcctcatcaaggtgattctggataaatactacttcctctgcgggcagcctctccacttcatcccgaggaagcagctgtgtgacggagagctggactgtcccttgggggaggacgaggagcactgtgtcaagagcttccccgaagggcctgcagtggcagtccgcctctccaaggaccgatccacactgcaggtgctggactcggccacagggaactggttctctgcctgtttcgacaacttcacagaagctctcgctgagacagcctgtaggcagatgggctacagcagcaaacccactttcagagctgtggagattggcccagaccaggatctggatgttgttgaaatcacagaaaacagccaggagcttcgcatgcggaactcaagtgggtaagtgaggggacaccttctggcctacagaaggcccccacatggacgctgctcttcaggttgcaaccagctcacctggaaccccaagcagccaggggaatgtaagcagacatcaggaagaactcctagccagatggatcattcaatgccaagagctatagactcacattttggagaggttttctgtgttgacttgtttttaatacaatggacagctggacaaagtgtgttgtcctactcagagccagagggatggataatgtgacctttccatcaatctggatagtaaatagtttttgctactgctgtaggttttctaataaattgcccaataggcaagattccaaa

SEQ ID NO: 193373 - DNA, 1934 bp, Homo sapiens
  Payload ID: 18178
  Gene Name: transmembrane protease, serine 4
  ENST ID: ENST00000519236
  CDS Start-End: 233-1240
cccaatcactcctggaatacacagagagaggcagcagcttgctcagcggacaaggatgctgggcgtgagggaccaaggcctgccctgcactcgggcctcctccagccagtgctgaccagggacttctgacctgctggccagccaggacctgtgtggggaggccctcctgctgccttggggtgacaatctcagctccaggctacagggagaccgggaggatcacagagccagcatggatcctgacagtgatcaacctctgaacagcctcgatgtcaaacccctgcgcaaaccccgtatccccatggagaccttcagaaaggtggggatccccatcatcatagcactactgagcctggcgagtatcatcattgtggttgtcctcatcaaggtgattctggataaatactacttcctctgcgggcagcctctccacttcatcccgaggaagcagctgtgtgacggagagctggactgtcccttgggggaggacgaggagcactgtgtcaagagcttccccgaagggcctgcagtggcagtccgcctctccaaggaccgatccacactgcaggtgctggactcggccacagggaactggttctctgcctgtttcgacaacttcacagaagctctcgctgagacagcctgtaggcagatgggctacagcagcaaacccactttcagagctgtggagattggcccagaccaggatctggatgttgttgaaatcacagaaaacagccaggagcttcgcatgcggaactcaagtgggccctgtctctcaggctccctggtctccctgcactgtcttgcctgtgggaagagcctgaagaccccccgtgtggtgggtgtggaggaggcctctgtggattcttggccttggcaggtcagcatccagtacgacaaacagcacgtctgtggagggagcatcctggacccccactgggtcctcacggcagcccactgcttcaggaaacataccgatgtgttcaactggaaggtgcgggcaggctcagacaaactgggcagcttcccatccctggctgtggccaagatcatcatcattgaattcaaccccatgtaccccaaagacaatgacatcgccctcatgaagctgcagttcccactcactttctcaggcacagtcaggcccatctgtctgcccttctttgatgaggagctcactccagccaccccactctggatcattggatggggctttacgaagcagaatggagggtgacagtggtgggcccctgatgtaccaatctgaccagtggcatgtggtgggcatcgttagttggggctatggctgcgggggcccgagcaccccaggagtatacaccaaggtctcagcctatctcaactggatctacaatgtctggaaggctgagctgtaatgctgctgcccctttgcagtgctgggagccgcttccttcctgccctgcccacctggggatcccccaaagtcagacacagagcaagagtccccttgggtacacccctctgcccacagcctcagcatttcttggagcagcaaagggcctcaattcctataagagaccctcgcagcccagaggcgcccagaggaagtcagcagccctagctcggccacacttggtgctcccagcatcccagggagagacacagcccactgaacaaggtctcaggggtattgctaagccaagaaggaactttcccacactactgaatggaagcaggctgtcttgtaaaagcccagatcactgtgggctggagaggagaaggaaagggtctgcgccagccctgtccgtcttcacccatccccaagcctactagagcaagaaaccagttgtaatataaaatgcactgccctactgttggtatgactaccgttacctactgttgtcattgttattacagctatggccactattattaaagagctgtgtaacatc

SEQ ID NO: 193374 - DNA, 2052 bp, Homo sapiens
  Payload ID: 18178
  Gene Name: transmembrane protease, serine 4
  Uniprot ID: Q9NRS4
  ENST ID: ENST00000522824
  CDS Start-End: 210-1508
gagagaggcagcagcttgctcagcggacaaggatgctgggcgtgagggaccaaggcctgccctgcactcgggcctcctccagccagtgctgaccagggacttctgacctgctggccagccaggacctgtgtggggaggccctcctgctgccttggggtgacaatctcagctccaggctacagggagaccgggaggatcacagagccagcatgttacaggatcctgacagtgatcaacctctgaacagcctcgatgtcaaacccctgcgcaaaccccgtatccccatggagaccttcagaaaggtggggatccccatcatcatagcactactgagcctggcgagtatcatcattgtggttgtcctcatcaaggtgattctggataaatactacttcctctgcgggcagcctctccacttcatcccgaggaagcagctgtgtgacggagagctggactgtcccttgggggaggacgaggagcactgtgtcaagagcttccccgaagggcctgcagtggcagtccgcctctccaaggaccgatccacactgcaggtgctggactcggccacagggaactggttctctgcctgtttcgacaacttcacagaagctctcgctgagacagcctgtaggcagatgggctacagcagagctgtggagattggcccagaccaggatctggatgttgttgaaatcacagaaaacagccaggagcttcgcatgcggaactcaagtgggccctgtctctcaggctccctggtctccctgcactgtcttgcctgtgggaagagcctgaagaccccccgtgtggtgggtgtggaggaggcctctgtggattcttggccttggcaggtcagcatccagtacgacaaacagcacgtctgtggagggagcatcctggacccccactgggtcctcacggcagcccactgcttcaggaaacataccgatgtgttcaactggaaggtgcgggcaggctcagacaaactgggcagcttcccatccctggctgtggccaagatcatcatcattgaattcaaccccatgtaccccaaagacaatgacatcgccctcatgaagctgcagttcccactcactttctcaggcacagtcaggcccatctgtctgcccttctttgatgaggagctcactccagccaccccactctggatcattggatggggctttacgaagcagaatggagggaagatgtctgacatactgctgcaggcgtcagtccaggtcattgacagcacacggtgcaatgcagacgatgcgtaccagggggaagtcaccgagaagatgatgtgtgcaggcatcccggaagggggtgtggacacctgccagggtgacagtggtgggcccctgatgtaccaatctgaccagtggcatgtggtgggcatcgttagttggggctatggctgcgggggcccgagcaccccaggagtatacaccaaggtctcagcctatctcaactggatctacaatgtctggaaggctgagctgtaatgctgctgcccctttgcagtgctgggagccgcttccttcctgccctgcccacctggggatcccccaaagtcagacacagagcaagagtccccttgggtacacccctctgcccacagcctcagcatttcttggagcagcaaagggcctcaattcctataagagaccctcgcagcccagaggcgcccagaggaagtcagcagccctagctcggccacacttggtgctcccagcatcccagggagagacacagcccactgaacaaggtctcaggggtattgctaagccaagaaggaactttcccacactactgaatggaagcaggctgtcttgtaaaagcccagatcactgtgggctggagaggagaaggaaagggtctgcgccagccctgtccgtcttcacccatccccaagcctactagagcaagaaaccagttgtaatataaaatgcactgccctactgttggtatgactaccgttacctactgttgtcattgttattacagctatggccactattattaaagagctgtgtaacatctctggca

SEQ ID NO: 193375 - DNA, 2074 bp, Homo sapiens
  Payload ID: 18178
  Gene Name: transmembrane protease, serine 4
  ENST ID: ENST00000517483
  CDS Start-End: 226-405
actcctggaatacacagagagaggcagcagcttgctcagcggacaaggatgctgggcgtgagggaccaaggcctgccctgcactcgggcctcctccagccagtgctgaccagggacttctgacctgctggccagccaggacctgtgtggggaggccctcctgctgccttggggtgacaatctcagctccaggctacagggagaccgggaggatcacagagccagcatggatcctgacagtgatcaacctctgaacagcctcggtaagttcagatgtcaaacccctgcgcaaaccccgtatccccatggagaccttcagaaaggtggggatccccatcatcatagcactactgagcctggcgagtatcatcattgtggttgtcctcatcaaggtgattctggataaatactacttcctctgcgggcagcctctccacttcatcccgaggaagcagctgtgtgacggagagctggactgtcccttgggggaggacgaggagcactgtgtcaagagcttccccgaagggcctgcagtggcagtccgcctctccaaggaccgatccacactgcaggtgctggactcggccacagggaactggttctctgcctgtttcgacaacttcacagaagctctcgctgagacagcctgtaggcagatgggctacagcagcaaacccactttcagagctgtggagattggcccagaccaggatctggatgttgttgaaatcacagaaaacagccaggagcttcgcatgcggaactcaagtgggccctgtctctcaggctccctggtctccctgcactgtcttgcctgtgggaagagcctgaagaccccccgtgtggtgggtgtggaggaggcctctgtggattcttggccttggcaggtcagcatccagtacgacaaacagcacgtctgtggagggagcatcctggacccccactgggtcctcacggcagcccactgcttcaggaaacataccgatgtgttcaactggaaggtgcgggcaggctcagacaaactgggcagcttcccatccctggctgtggccaagatcatcatcattgaattcaaccccatgtaccccaaagacaatgacatcgccctcatgaagctgcagttcccactcactttctcaggcacagtcaggcccatctgtctgcccttctttgatgaggagctcactccagccaccccactctggatcattggatggggctttacgaagcagaatggagggaagatgtctgacatactgctgcaggcgtcagtccaggtcattgacagcacacggtgcaatgcagacgatgcgtaccagggggaagtcaccgagaagatgatgtgtgcaggcatcccggaagggggtgtggacacctgccagggtgacagtggtgggcccctgatgtaccaatctgaccagtggcatgtggtgggcatcgttagttggggctatggctgcgggggcccgagcaccccaggagtatacaccaaggtctcagcctatctcaactggatctacaatgtctggaaggctgagctgtaatgctgctgcccctttgcagtgctgggagccgcttccttcctgccctgcccacctggggatcccccaaagtcagacacagagcaagagtccccttgggtacacccctctgcccacagcctcagcatttcttggagcagcaaagggcctcaattcctataagagaccctcgcagcccagaggcgcccagaggaagtcagcagccctagctcggccacacttggtgctcccagcatcccagggagagacacagcccactgaacaaggtctcaggggtattgctaagccaagaaggaactttcccacactactgaatggaagcaggctgtcttgtaaaagcccagatcactgtgggctggagaggagaaggaaagggtctgcgccagccctgtccgtcttcacccatccccaagcctactagagcaagaaaccagttgtaatataaaatgcactgccctactgttggtatgactaccgttacctactgttgtcattgttattacagctatggccactattattaaagagctgtgt

SEQ ID NO: 193376 - DNA, 5550 bp, Homo sapiens
  Payload ID: 18178
  Gene Name: transmembrane protease, serine 4
  Uniprot ID: Q9NRS4
  ENST ID: ENST00000534111
  CDS Start-End: 266-1573
gtagggctgttttaatcaagctgcccaaagtcccccaatcactcctggaatacacagagagaggcagcagcttgctcagcggacaaggatgctgggcgtgagggaccaaggcctgccctgcactcgggcctcctccagccagtgctgaccagggacttctgacctgctggccagccaggacctgtgtggggaggccctcctgctgccttggggtgacaatctcagctccaggctacagggagaccgggaggatcacagagccagcatggatcctgacagtgatcaacctctgaacagcctcgatgtcaaacccctgcgcaaaccccgtatccccatggagaccttcagaaaggtggggatccccatcatcatagcactactgagcctggcgagtatcatcattgtggttgtcctcatcaaggtgattctggataaatactacttcctctgcgggcagcctctccacttcatcccgaggaagcagctgtgtgacggagagctggactgtcccttgggggaggacgaggagcactgtgtcaagagcttccccgaagggcctgcagtggcagtccgcctctccaaggaccgatccacactgcaggtgctggactcggccacagggaactggttctctgcctgtttcgacaacttcacagaagctctcgctgagacagcctgtaggcagatgggctacagcagcaaacccactttcagagctgtggagattggcccagaccaggatctggatgttgttgaaatcacagaaaacagccaggagcttcgcatgcggaactcaagtgggccctgtctctcaggctccctggtctccctgcactgtcttgcctgtgggaagagcctgaagaccccccgtgtggtgggtgtggaggaggcctctgtggattcttggccttggcaggtcagcatccagtacgacaaacagcacgtctgtggagggagcatcctggacccccactgggtcctcacggcagcccactgcttcaggaaacataccgatgtgttcaactggaaggtgcgggcaggctcagacaaactgggcagcttcccatccctggctgtggccaagatcatcatcattgaattcaaccccatgtaccccaaagacaatgacatcgccctcatgaagctgcagttcccactcactttctcaggcacagtcaggcccatctgtctgcccttctttgatgaggagctcactccagccaccccactctggatcattggatggggctttacgaagcagaatggagggaagatgtctgacatactgctgcaggcgtcagtccaggtcattgacagcacacggtgcaatgcagacgatgcgtaccagggggaagtcaccgagaagatgatgtgtgcaggcatcccggaagggggtgtggacacctgccagggtgacagtggtgggcccctgatgtaccaatctgaccagtggcatgtggtgggcatcgttagttggggctatggctgcgggggcccgagcaccccaggagtatacaccaaggtctcagcctatctcaactggatctacaatgtctggaaggctgagctgtaatgctgctgcccctttgcagtgctgggagccgcttccttcctgccctgcccacctggggatcccccaaagtcagacacagagcaagagtccccttgggtacacccctctgcccacagcctcagcatttcttggagcagcaaagggcctcaattcctataagagaccctcgcagcccagaggcgcccagaggaagtcagcagccctagctcggccacacttggtgctcccagcatcccagggagagacacagcccactgaacaaggtctcaggggtattgctaagccaagaaggaactttcccacactactgaatggaagcaggctgtcttgtaaaagcccagatcactgtgggctggagaggagaaggaaagggtctgcgccagccctgtccgtcttcacccatccccaagcctactagagcaagaaaccagttgtaatataaaatgcactgccctactgttggtatgactaccgttacctactgttgtcattgttattacagctatggccactattattaaagagctgtgtaacatctctggcataggctagctggaatgcttgataagaactgagctgggatgattgaactttcattctttggcttggggagaaaagaagtcctggggaagcaattgagtctcaaagtagaggcaggggaaaaaagagttagggagaccagatctgctgagtggcagcaagagtgagctgcagattacagaaaccagggtgagcaagtttgagtcccacacagggccttctccctttgcctctttccctccctccctgcctgtgataatcagccaggagccagggataacctatgacttgggaaagagatgagttaggcagtcaagggtgacattcaatcagggatccacaagtggctggaaagaaatgctggtcctgtgtcctaactttttccgcctggagagccctcagtgtggcttcttacatttaaaaaacaaaaaggatcagctgccaggtgtgaggcagtccccaagctgagttgtgaggatgtaagcatgaataagtccctgcactcaaaatggtcaaagaattaaaccccatggacttttttggcatctgtatgaaagcttgggttttctgaggactgtcttgctatagttaagtcagatcctagatgaaatatacttgttcatactgtactaggttcttaggaaacaacagaattcctcaaatgccaaaaacaaagaaaatagaaacccagaaaacaaaacaaaataaaacaaaaccatcagaactgtgagtggaaactaaggtgatgatctgggagcaatacactaaaatcttgggtcgagacctatatgaaggctggcagtggagctaaacctggacacactgaagacaagggagctgaaccagggctcctacatgaagcagggataactgatggcagtaaatgtggtctcaaattgcagatggtctggaggaaaatttcccaaatttagagcctcaggattcccaaagatcctccaaatatgagctcacaatcaaagatcagagacgttgaaaaataaaaaacaccttaagtgggcagcataaaaaacagctaatttagaaccccaaaggcttcagatgtcagaatattagagacttatgataataagcaatatttgcagagtatttgtatgtgccagacactattgtaagtgcttcatcatgtactgattcatttaatactcacagaaatctgtgagatgggtattattcttatcctcactctatggattaaaaaaactaaggcacaaagtggttaagctccttgcctgagattatagactgtaagttgaacgtgagcacttggaatacagagttcatgctgtaaactaccacactatagggcctccaatatgataatttataaaatatttgaataaaaaatgaatactagttccacattttaaaatcatgtttaactgtggtcaaatgcacataacacaagttgccatcttcaccatttttaggtgtatagttcagtggtgttatgtacattcacactattgtgcagtcatcaccaccatccatctccagaacagaaactcagtacccatcaaacaactctccatttccccctcctcccaatctctggcaaccaccattgtgctttcagtctctgtgaactggattactctgggtacctcatttaagtgaagtcatgcagtattggtctttttgtacttgttttatttcacttcacattgtgtcttcaagtttcacccatgttgtagcatgtgtcagaatttcttccctttttagactaaataatattctattgtttatacgaacattcaggttacttctatcttttggctattgtgaattatgctgctgtgaacatgggtgtacaagtatctctttgaggccctgctttcaattctcttgggtatattcccagaagtggaattgctggatcatatggtaattctattttgaattttttgaggaactgatatattgctttccatagagactgcaccattttacattcccatcaacagtttgcaggagttactatttctccatatcccccctaacacttgctattttctgttaaaaatggatatcttaataatcaagcaaaaataacaggcagatttgaaaaagaactgaatacagcttttagaaataaaaactataattataaaaataaaaaactaagtggatggggtaaataacaattaaaacaccaattaagagagaacaaatgaactggaagataaattgaagaagtgactaggcttaacagcagagagagataaggagattaaaaatatgaaaacaaggccaggagcaatgaagcctagaatggtaaattctaacatatccagaatcccagaaagagagaatcaagacaatgagagagagacagtaccaaagagataagagctgagaatgttccagaattgataaaaggtgtgaatccacagaacatacaccaccatagtgtacacgcatacaaccaaggtggaaaaattagaataaatccacacctatgtacattataatgaaactgcagaacaccaaagacaaaaagaaactccttatagcagcagagagaaaacccagaccacccacagtaccacaaatctaccacaattagactgacaacaggctttcccacagcaataaaggagctagaagtcagtggaagtatatctccagcatgccaaaagataacaatcaatcagggattgtgaaccctacaaaactatctttcaagaataaaggcattttcaagaaaacaaaaacagactttaccatcaacaaaccttctctaaaagaatatataaagcatttactttaggaagaaggaaaatgatcctaaaaggaagaaccaagaagcaagtagcaatagtgaggcaattgtgaaaatgtaggtaagtctaaacacactctgtctacttcttcttcttcttcttcttcttcttcttcttattttgagactgagtcttgccctgtcacccagactggagtgcagtggcaggatcttggctcactgctatctccacctcccaggttcaagtgattcttctgcctcagcctcccgagtagctgggattacatgcacatgccaccatatccggctaatttttgaatttttagtagagatggggtttcactgtgttggccaggccggtctcaaactcccgacctcaagtgatccccccgcctcggcctcccaaagtgctgggattacaggcgtgtctacatattattaaaataacaataatatttattttgtgggttaattttttttgaaacagatattgaatttattggttggctatgagtagaaaaatacatcagtaaagaaaaaagaccctgtatataaatataatactagctagttaaaatttgaccaagaagtttccattgtgggttaatttttaaaggcctaactgaaatatggagtaaccacagcatgcagcatgtaaattaaaggggatagctgg

SEQ ID NO: 193377 - DNA, 3531 bp, Homo sapiens
  Payload ID: 18178
  Gene Name: transmembrane protease, serine 4
  Uniprot ID: Q9NRS4
  ENST ID: ENST00000618855
  CDS Start-End: 292-1605
atcattccagtttggcaacttcacttgtagggctgttttaatcaagctgcccaaagtcccccaatcactcctggaatacacagagagaggcagcagcttgctcagcggacaaggatgctgggcgtgagggaccaaggcctgccctgcactcgggcctcctccagccagtgctgaccagggacttctgacctgctggccagccaggacctgtgtggggaggccctcctgctgccttggggtgacaatctcagctccaggctacagggagaccgggaggatcacagagccagcatgttacaggatcctgacagtgatcaacctctgaacagcctcgatgtcaaacccctgcgcaaaccccgtatccccatggagaccttcagaaaggtggggatccccatcatcatagcactactgagcctggcgagtatcatcattgtggttgtcctcatcaaggtgattctggataaatactacttcctctgcgggcagcctctccacttcatcccgaggaagcagctgtgtgacggagagctggactgtcccttgggggaggacgaggagcactgtgtcaagagcttccccgaagggcctgcagtggcagtccgcctctccaaggaccgatccacactgcaggtgctggactcggccacagggaactggttctctgcctgtttcgacaacttcacagaagctctcgctgagacagcctgtaggcagatgggctacagcagcaaacccactttcagagctgtggagattggcccagaccaggatctggatgttgttgaaatcacagaaaacagccaggagcttcgcatgcggaactcaagtgggccctgtctctcaggctccctggtctccctgcactgtcttgcctgtgggaagagcctgaagaccccccgtgtggtgggtgtggaggaggcctctgtggattcttggccttggcaggtcagcatccagtacgacaaacagcacgtctgtggagggagcatcctggacccccactgggtcctcacggcagcccactgcttcaggaaacataccgatgtgttcaactggaaggtgcgggcaggctcagacaaactgggcagcttcccatccctggctgtggccaagatcatcatcattgaattcaaccccatgtaccccaaagacaatgacatcgccctcatgaagctgcagttcccactcactttctcaggcacagtcaggcccatctgtctgcccttctttgatgaggagctcactccagccaccccactctggatcattggatggggctttacgaagcagaatggagggaagatgtctgacatactgctgcaggcgtcagtccaggtcattgacagcacacggtgcaatgcagacgatgcgtaccagggggaagtcaccgagaagatgatgtgtgcaggcatcccggaagggggtgtggacacctgccagggtgacagtggtgggcccctgatgtaccaatctgaccagtggcatgtggtgggcatcgttagttggggctatggctgcgggggcccgagcaccccaggagtatacaccaaggtctcagcctatctcaactggatctacaatgtctggaaggctgagctgtaatgctgctgcccctttgcagtgctgggagccgcttccttcctgccctgcccacctggggatcccccaaagtcagacacagagcaagagtccccttgggtacacccctctgcccacagcctcagcatttcttggagcagcaaagggcctcaattcctataagagaccctcgcagcccagaggcgcccagaggaagtcagcagccctagctcggccacacttggtgctcccagcatcccagggagagacacagcccactgaacaaggtctcaggggtattgctaagccaagaaggaactttcccacactactgaatggaagcaggctgtcttgtaaaagcccagatcactgtgggctggagaggagaaggaaagggtctgcgccagccctgtccgtcttcacccatccccaagcctactagagcaagaaaccagttgtaatataaaatgcactgccctactgttggtatgactaccgttacctactgttgtcattgttattacagctatggccactattattaaagagctgtgtaacatctctggcataggctagctggaatgcttgataagaactgagctgggatgattgaactttcattctttggcttggggagaaaagaagtcctggggaagcaattgagtctcaaagtagaggcaggggaaaaaagagttagggagaccagatctgctgagtggcagcaagagtgagctgcagattacagaaaccagggtgagcaagtttgagtcccacacagggccttctccctttgcctctttccctccctccctgcctgtgataatcagccaggagccagggataacctatgacttgggaaagagatgagttaggcagtcaagggtgacattcaatcagggatccacaagtggctggaaagaaatgctggtcctgtgtcctaactttttccgcctggagagccctcagtgtggcttcttacatttaaaaaacaaaaaggatcagctgccaggtgtgaggcagtccccaagctgagttgtgaggatgtaagcatgaataagtccctgcactcaaaatggtcaaagaattaaaccccatggacttttttggcatctgtatgaaagcttgggttttctgaggactgtcttgctatagttaagtcagatcctagatgaaatatacttgttcatactgtactaggttcttaggaaacaacagaattcctcaaatgccaaaaacaaagaaaatagaaacccagaaaacaaaacaaaataaaacaaaaccatcagaactgtgagtggaaactaaggtgatgatctgggagcaatacactaaaatcttgggtcgagacctatatgaaggctggcagtggagctaaacctggacacactgaagacaagggagctgaaccagggctcctacatgaagcagggataactgatggcagtaaatgtggtctcaaattgcagatggtctggaggaaaatttcccaaatttagagcctcaggattcccaaagatcctccaaatatgagctcacaatcaaagatcagagacgttgaaaaataaaaaacaccttaagtgggcagcataaaaaacagctaatttagaaccccaaaggcttcagatgtcagaatattagagacttatgataataagcaatatttgcagagtatttgtatgtgccagacactattgtaagtgcttcatcatgtactgattcatttaatactcacagaaatctgtgagatgggtattattcttatcctcactctatggattaaaaaaactaaggcacaaagtggttaagctccttgcctgagattatagactgtaagttgaacgtgagcacttggaatacagagttcatgctgtaaactaccacactatagggcctccaatatgataatttataaaatatttgaataaaaaatgaatactagttccacatttt

SEQ ID NO: 193378 - DNA, 3417 bp, Homo sapiens
  Payload ID: 18178
  Gene Name: transmembrane protease, serine 4
  ENST ID: ENST00000616579
  CDS Start-End: 292-1491
atcattccagtttggcaacttcacttgtagggctgttttaatcaagctgcccaaagtcccccaatcactcctggaatacacagagagaggcagcagcttgctcagcggacaaggatgctgggcgtgagggaccaaggcctgccctgcactcgggcctcctccagccagtgctgaccagggacttctgacctgctggccagccaggacctgtgtggggaggccctcctgctgccttggggtgacaatctcagctccaggctacagggagaccgggaggatcacagagccagcatgttacaggatcctgacagtgatcaacctctgaacagcctcgtcaaggtgattctggataaatactacttcctctgcgggcagcctctccacttcatcccgaggaagcagctgtgtgacggagagctggactgtcccttgggggaggacgaggagcactgtgtcaagagcttccccgaagggcctgcagtggcagtccgcctctccaaggaccgatccacactgcaggtgctggactcggccacagggaactggttctctgcctgtttcgacaacttcacagaagctctcgctgagacagcctgtaggcagatgggctacagcagcaaacccactttcagagctgtggagattggcccagaccaggatctggatgttgttgaaatcacagaaaacagccaggagcttcgcatgcggaactcaagtgggccctgtctctcaggctccctggtctccctgcactgtcttgcctgtgggaagagcctgaagaccccccgtgtggtgggtgtggaggaggcctctgtggattcttggccttggcaggtcagcatccagtacgacaaacagcacgtctgtggagggagcatcctggacccccactgggtcctcacggcagcccactgcttcaggaaacataccgatgtgttcaactggaaggtgcgggcaggctcagacaaactgggcagcttcccatccctggctgtggccaagatcatcatcattgaattcaaccccatgtaccccaaagacaatgacatcgccctcatgaagctgcagttcccactcactttctcaggcacagtcaggcccatctgtctgcccttctttgatgaggagctcactccagccaccccactctggatcattggatggggctttacgaagcagaatggagggaagatgtctgacatactgctgcaggcgtcagtccaggtcattgacagcacacggtgcaatgcagacgatgcgtaccagggggaagtcaccgagaagatgatgtgtgcaggcatcccggaagggggtgtggacacctgccagggtgacagtggtgggcccctgatgtaccaatctgaccagtggcatgtggtgggcatcgttagttggggctatggctgcgggggcccgagcaccccaggagtatacaccaaggtctcagcctatctcaactggatctacaatgtctggaaggctgagctgtaatgctgctgcccctttgcagtgctgggagccgcttccttcctgccctgcccacctggggatcccccaaagtcagacacagagcaagagtccccttgggtacacccctctgcccacagcctcagcatttcttggagcagcaaagggcctcaattcctataagagaccctcgcagcccagaggcgcccagaggaagtcagcagccctagctcggccacacttggtgctcccagcatcccagggagagacacagcccactgaacaaggtctcaggggtattgctaagccaagaaggaactttcccacactactgaatggaagcaggctgtcttgtaaaagcccagatcactgtgggctggagaggagaaggaaagggtctgcgccagccctgtccgtcttcacccatccccaagcctactagagcaagaaaccagttgtaatataaaatgcactgccctactgttggtatgactaccgttacctactgttgtcattgttattacagctatggccactattattaaagagctgtgtaacatctctggcataggctagctggaatgcttgataagaactgagctgggatgattgaactttcattctttggcttggggagaaaagaagtcctggggaagcaattgagtctcaaagtagaggcaggggaaaaaagagttagggagaccagatctgctgagtggcagcaagagtgagctgcagattacagaaaccagggtgagcaagtttgagtcccacacagggccttctccctttgcctctttccctccctccctgcctgtgataatcagccaggagccagggataacctatgacttgggaaagagatgagttaggcagtcaagggtgacattcaatcagggatccacaagtggctggaaagaaatgctggtcctgtgtcctaactttttccgcctggagagccctcagtgtggcttcttacatttaaaaaacaaaaaggatcagctgccaggtgtgaggcagtccccaagctgagttgtgaggatgtaagcatgaataagtccctgcactcaaaatggtcaaagaattaaaccccatggacttttttggcatctgtatgaaagcttgggttttctgaggactgtcttgctatagttaagtcagatcctagatgaaatatacttgttcatactgtactaggttcttaggaaacaacagaattcctcaaatgccaaaaacaaagaaaatagaaacccagaaaacaaaacaaaataaaacaaaaccatcagaactgtgagtggaaactaaggtgatgatctgggagcaatacactaaaatcttgggtcgagacctatatgaaggctggcagtggagctaaacctggacacactgaagacaagggagctgaaccagggctcctacatgaagcagggataactgatggcagtaaatgtggtctcaaattgcagatggtctggaggaaaatttcccaaatttagagcctcaggattcccaaagatcctccaaatatgagctcacaatcaaagatcagagacgttgaaaaataaaaaacaccttaagtgggcagcataaaaaacagctaatttagaaccccaaaggcttcagatgtcagaatattagagacttatgataataagcaatatttgcagagtatttgtatgtgccagacactattgtaagtgcttcatcatgtactgattcatttaatactcacagaaatctgtgagatgggtattattcttatcctcactctatggattaaaaaaactaaggcacaaagtggttaagctccttgcctgagattatagactgtaagttgaacgtgagcacttggaatacagagttcatgctgtaaactaccacactatagggcctccaatatgataatttataaaatatttgaataaaaaatgaatactagttccacatttt

SEQ ID NO: 193379 - DNA, 2056 bp, Homo sapiens
  Payload ID: 18178
  Gene Name: transmembrane protease, serine 4
  ENST ID: ENST00000610964
  CDS Start-End: 251-1519
gagaggcagcagcttgctcagcggacaaggatgctgggcgtgagggaccaaggcctgccctgcactcgggcctcctccagccagtgctgaccagggacttctgacctgctggccagccaggacctgtgtggggaggccctcctgctgccttggggtgacaatctcagctccaggctacagggagaccgggaggatcacagagccagcatgttacaggatcctgacagtgatcaacctctgaacagcctcgatgtcaaacccctgcgcaaaccccgtatccccatggagaccttcagaaaggtggatccccatcatcatagcactactgagcctggcgagtatcatcattgtggttgtcctcatcaaggtgattctggataaatactacttcctctgcgggcagcctctccacttcatcccgaggaagcagctgtgtgacggagagctggactgtcccttgggggaggacgaggagcactgtgtcaagagcttccccgaagggcctgcagtggcagtccgcctctccaaggaccgatccacactgcaggtgctggactcggccacagggaactggttctctgcctgtttcgacaacttcacagaagctctcgctgagacagcctgtaggcagatgggctacagcagcaaacccactttcagagctgtggagattggcccagaccaggatctggatgttgttgaaatcacagaaaacagccaggagcttcgcatgcggaactcaagtgggccctgtctctcaggctccctggtctccctgcactgtcttgcctgtgggaagagcctgaagaccccccgtgtggtgggtgtggaggaggcctctgtggattcttggccttggcaggtcagcatccagtacgacaaacagcacgtctgtggagggagcatcctggacccccactgggtcctcacggcagcccactgcttcaggaaacataccgatgtgttcaactggaaggtgcgggcaggctcagacaaactgggcagcttcccatccctggctgtggccaagatcatcatcattgaattcaaccccatgtaccccaaagacaatgacatcgccctcatgaagctgcagttcccactcactttctcaggcacagtcaggcccatctgtctgcccttctttgatgaggagctcactccagccaccccactctggatcattggatggggctttacgaagcagaatggagggaagatgtctgacatactgctgcaggcgtcagtccaggtcattgacagcacacggtgcaatgcagacgatgcgtaccagggggaagtcaccgagaagatgatgtgtgcaggcatcccggaagggggtgtggacacctgccagggtgacagtggtgggcccctgatgtaccaatctgaccagtggcatgtggtgggcatcgttagttggggctatggctgcgggggcccgagcaccccaggagtatacaccaaggtctcagcctatctcaactggatctacaatgtctggaaggctgagctgtaatgctgctgcccctttgcagtgctgggagccgcttccttcctgccctgcccacctggggatcccccaaagtcagacacagagcaagagtccccttgggtacacccctctgcccacagcctcagcatttcttggagcagcaaagggcctcaattcctataagagaccctcgcagcccagaggcgcccagaggaagtcagcagccctagctcggccacacttggtgctcccagcatcccagggagagacacagcccactgaacaaggtctcaggggtattgctaagccaagaaggaactttcccacactactgaatggaagcaggctgtcttgtaaaagcccagatcactgtgggctggagaggagaaggaaagggtctgcgccagccctgtccgtcttcacccatccccaagcctactagagcaagaaaccagttgtaatataaaatgcactgccctactgttggtatgactaccgttacctactgttgtcattgttattacagctatggccactattattaaagagctgtgtaacatc

SEQ ID NO: 193380 - DNA, 2232 bp, Homo sapiens
  Payload ID: 18179
  Gene Name: transmembrane protease, serine 5
  Uniprot ID: Q9H3S3
  ENST ID: ENST00000299882
  CDS Start-End: 150-1523
gggatacagggaggggccatgtgcgaaccagggagacctcatcttccaaccaagcttgctgggctagctttaatcaatgctggcctgagaacaggagcggaacattgcctagtagaccctgaggctttacaacagtgccactgacccctatgagcctgatgctggatgaccaaccccctatggaggcccagtatgcagaggagggcccaggacctgggatcttcagagcagagcctggagaccagcagcatcccatttctcaggcagtgtgctggcgttccatgcgacgtggctgtgcagtgctgggagccctggggctgctggccggtgcaggtgttggctcatggctcctagtgctgtatctgtgtcctgctgcctctcagcccatttccgggaccttgcaggatgaggagataactttgagctgctcagaggccagcgctgaggaagctctgctccctgcacttcccaaaacagtatctttcagaataaacagcgaagacttcttgctggaagcgcaagtgagggatcagccacgctggctcctggtctgccatgagggctggagccccgccctggggctgcagatctgctggagccttgggcatctcagactcactcaccacaagggagtaaacctcactgacatcaaactcaacagttcccaggagtttgctcagctctctcctagactgggaggcttcctggaggaggcgtggcagcccaggaacaactgcacttctggtcaagttgtttccctcagatgctctgagtgtggagcgaggcccctggcttcccggatagttggtgggcagtctgtggctcctgggcgctggccgtggcaggccagcgtggccctgggcttccggcacacgtgtgggggctctgtgctagcgccacgctgggtggtgactgctgcacattgtatgcacagtttcaggctggcccgcctgtccagctggcgggttcatgcggggctggtcagccacagtgccgtcaggccccaccaaggggctctggtggagaggattatcccacaccccctctacagtgcccagaatcatgactacgacgtcgccctcctgaggctccagaccgctctcaacttctcagacactgtgggcgctgtgtgcctgccggccaaggaacagcattttccgaagggctcgcggtgctgggtgtctggctggggccacacccaccctagccatacttacagctcggatatgctccaggacacggtggtgcccttgttcagcactcagctctgcaacagctcttgcgtgtacagcggagccctcaccccccgcatgctttgcgctggctacctggacggaagggctgatgcatgccagggagatagcgggggccccctagtgtgcccagatggggacacatggcgcctagtgggggtggtcagctgggggcgtggctgcgcagagcccaatcacccaggtgtctacgccaaggtagctgagtttctggactggatccatgacactgctcaggactccctcctctgagtcctgctgtttcctccagtctcactgcacaccactgcctcatgcttcctggggcctccagcagctccactaatggaggagaggcagtagcctccgacacagaacgcatggacctcctactactgtgtgtgaggaacagtcactacccactggccagccacccagccaacaggtctctcctcttgggccctgatttcagagtcctctttctcactagagactcaatgacagaagagaggctgggacttggttgggcatgctgtggttgctgagggatgagggggaggagagaggtaggagctggagatgaagaggctgctagaagcagcaggaagcctgcccttctgccctctcccctccctgcccctgtgtgagtcttttgggagggtgctgggaggtgccccccgtcccacctttttcctgtgctctaggtgggctaagtgcctccctagaggactccatggctgagaggctcctgggcagatggggtcaaggctgggccagcccagatgaagcctatgggagtcaggaccctctccactctccctctccactccccttcctgttctcacctggctgtggctggccctgtgtggggtgggtacactggaaaacaagaaggttggagttggtctaggacattggttttaaatgacagttctgtgaactggtccaaggagttctgttattaaagtgatatatggtcttg

SEQ ID NO: 193381 - DNA, 2001 bp, Homo sapiens
  Payload ID: 18179
  Gene Name: transmembrane protease, serine 5
  ENST ID: ENST00000540540
  CDS Start-End: 695-1291
gggagacctcatcttccaaccaagcttgctgggctagctttaatcaatgctggcctgagaacaggagcggaacattgcctagtagaccctgaggctttacaacagtgccactgacccctatgtgctgtatctgtgtcctgctgcctctcagcccatttccgggaccttgcaggatgaggagataactttgagctgctcagaggccagcgctgaggaagctctgctccctgcacttcccaaaacagtatctttcagaataaacagcgaagacttcttgctggaagcgcaagtgagggatcagccacgctggctcctggtctgccatgagggctggagccccgccctggggctgcagatctgctggagccttgggcatctcagactcactcaccacaagggagtaaacctcactgacatcaaactcaacagttcccaggagtttgctcagctctctcctagactgggaggcttcctggaggaggcgtggcagcccaggaacaactgcacttctggtcaagttgtttccctcagatgctctgagtgtggagcgaggcccctggcttcccggatagttggtgggcagtctgtggctcctgggcgctggccgtggcaggccagcgtggccctgggcttccggcacacgtgtgggggctctgtgctagcgccacgctgggtggtgactgctgcacattgtatgcacagtttcaggctggcccgcctgtccagctggcgggttcatgcggggctggtcagccacagtgccgtcaggccccaccaaggggctctggtggagaggattatcccacaccccctctacagtgcccagaatcatgactacgacgtcgccctcctgaggctccagaccgctctcaacttctcagacactgtgggcgctgtgtgcctgccggccaaggaacagcattttccgaagggctcgcggtgctgggtgtctggctggggccacacccaccctagccatacttacagctcggatatgctccaggacacggtggtgcccttgttcagcactcagctctgcaacagctcttgcgtgtacagcggagccctcaccccccgcatgctttgcgctggctacctggacggaagggctgatgcatgccagggagatagcgggggccccctagtgtgcccagatggggacacatggcgcctagtgggggtggtcagctgggggcgtggctgcgcagagcccaatcacccaggtgtctacgccaaggtagctgagtttctggactggatccatgacactgctcaggactccctcctctgagtcctgctgtttcctccagtctcactgcacaccactgcctcatgcttcctggggcctccagcagctccactaatggaggagaggcagtagcctccgacacagaacgcatggacctcctactactgtgtgtgaggaacagtcactacccactggccagccacccagccaacaggtctctcctcttgggccctgatttcagagtcctctttctcactagagactcaatgacagaagagaggctgggacttggttgggcatgctgtggttgctgagggatgagggggaggagagaggtaggagctggagatgaagaggctgctagaagcagcaggaagcctgcccttctgccctctcccctccctgcccctgtgtgagtcttttgggagggtgctgggaggtgccccccgtcccacctttttcctgtgctctaggtgggctaagtgcctccctagaggactccatggctgagaggctcctgggcagatggggtcaaggctgggccagcccagatgaagcctatgggagtcaggaccctctccactctccctctccactccccttcctgttctcacctggctgtggctggccctgtgtggggtgggtacactggaaaacaagaaggttggagttggtctaggacattggttttaaatgacagttctgtgaactggtccaaggagttctgttattaaagtgatatatggtcttgg

SEQ ID NO: 193382 - DNA, 1811 bp, Homo sapiens
  Payload ID: 18179
  Gene Name: transmembrane protease, serine 5
  ENST ID: ENST00000536856
  CDS Start-End: 658-1101
ctttaatcaatgctggcctgagaacaggagcggaacattgcctagtagaccctgaggctttacaacagtgccactgacccctatgtgctgtatctgtgtcctgctgcctctcagcccatttccgggaccttgcaggatgaggagataactttgagctgctcagaggccagcgctgaggaagctctgctccctgcacttcccaaaacagtatctttcagaataaacagcgaagacttcttgctggaagcgcaagtgagggatcagccacgctggctcctggtctgccatgagggctggagccccgccctggggctgcagatctgctggagccttgggcatctcagactcactcaccacaagggagtaaacctcactgacatcaaactcaacagttcccaggagtttgctcagctctctcctagactgggaggcttcctggaggaggcgtggcagcccaggaacaactgcacttctggtcaagttgtttccctcagatgctctgagtgtggagcgaggcccctggcttcccggatagttggtgggcagtctgtggctcctgggcgctggccgtggcaggccagcgtggccctgggcttccggcacacgtgtgggggctctgtgctagcgccacgctgggtggtgactgctgcacattgtatgcacagtttcaggctggcccgcctgtccagctggcgggttcatgcggggctggtcagccacagtgccgtcaggccccaccaaggggctctggtggagaggattatcccacaccccctctacagtgcccagaatcatgactacgacgtcgccctcctgaggctccagaccgctctcaacttctcagacactgtgggcgctgtgtgcctgccggccaaggaacagcattttccgaagggctcgcggtgctgggtgtctggctggggccacacccaccctagccatacttacagctcggatatgctccaggacacggtggtgcccttgttcagcactcagctctgcaacagctcttgcgtgtacagcggagccctcaccccccgcatgctttgcgctggctacctggacggaagggctgatgcatgccaggactccctcctctgagtcctgctgtttcctccagtctcactgcacaccactgcctcatgcttcctggggcctccagcagctccactaatggaggagaggcagtagcctccgacacagaacgcatggacctcctactactgtgtgtgaggaacagtcactacccactggccagccacccagccaacaggtctctcctcttgggccctgatttcagagtcctctttctcactagagactcaatgacagaagagaggctgggacttggttgggcatgctgtggttgctgagggatgagggggaggagagaggtaggagctggagatgaagaggctgctagaagcagcaggaagcctgcccttctgccctctcccctccctgcccctgtgtgagtcttttgggagggtgctgggaggtgccccccgtcccacctttttcctgtgctctaggtgggctaagtgcctccctagaggactccatggctgagaggctcctgggcagatggggtcaaggctgggccagcccagatgaagcctatgggagtcaggaccctctccactctccctctccactccccttcctgttctcacctggctgtggctggccctgtgtggggtgggtacactggaaaacaagaaggttggagttggtctaggacattggttttaaatgacagttctgtgaactggtccaaggagttctgttattaaagtgatatatggtcttgg

SEQ ID NO: 193383 - DNA, 1524 bp, Homo sapiens
  Payload ID: 18179
  Gene Name: transmembrane protease, serine 5
  ENST ID: ENST00000544634
  CDS Start-End: 79-1245
aatcaatgctggcctgagaacaggagcggaacattgcctagtagaccctgaggctttacaacagtgccactgacccctatgagcctgatgctggatgaccaaccccctatggaggcccagtatgcagaggagggcccaggacctgggatcttcagagcagagcctggagaccagcagcatcccatttctcaggcagtgtgctggcgttccatgcgacgtggctgtgcagtgctgggagccctggggctgctggccggtgcaggtgttggctcatggctcctagtgctgtatctgtgtcctgctgcctctcagcccatttccgggaccttgcaggatgaggagataactttgagctgctcagaggccagcgctgaggaagctctgctccctgcacttcccaaaacagtatctttcagaataaacagcgaagacttcttgctggaagcgcaagtgagggatcagccacgctggctcctggtctgccatgagggctggagccccgccctggggctgcagatctgctggagccttgggcatctcagactcactcaccacaagggagtaaacctcactgacatcaaactcaacagttcccaggagtttgctcagctctctcctagactgggaggcttcctggaggaggcgtggcagcccagtttcaggctggcccgcctgtccagctggcgggttcatgcggggctggtcagccacagtgccgtcaggccccaccaaggggctctggtggagaggattatcccacaccccctctacagtgcccagaatcatgactacgacgtcgccctcctgaggctccagaccgctctcaacttctcagacactgtgggcgctgtgtgcctgccggccaaggaacagcattttccgaagggctcgcggtgctgggtgtctggctggggccacacccaccctagccatacttacagctcggatatgctccaggacacggtggtgcccttgttcagcactcagctctgcaacagctcttgcgtgtacagcggagccctcaccccccgcatgctttgcgctggctacctggacggaagggctgatgcatgccagggagatagcgggggccccctagtgtgcccagatggggacacatggcgcctagtgggggtggtcagctgggggcgtggctgcgcagagcccaatcacccaggtgtctacgccaaggtagctgagtttctggactggatccatgacactgctcaggactccctcctctgagtcctgctgtttcctccagtctcactgcacaccactgcctcatgcttcctggggcctccagcagctccactaatggaggagaggcagtagcctccgacacagaacgcatggacctcctactactgtgtgtgaggaacagtcactacccactggccagccacccagccaacaggtctctcctcttgggccctgatttcagagtcctctttctcactagagactcaatgacagaagagaggctgggacttggttgggcatgctgtggttgctgagggatga

SEQ ID NO: 193384 - DNA, 583 bp, Homo sapiens
  Payload ID: 18179
  Gene Name: transmembrane protease, serine 5
  ENST ID: ENST00000538091
  CDS Start-End: 85-219
agctttaatcaatgctggcctgagaacaggagcggaacattgcctagtagaccctgaggctttacaacagtgccactgacccctatgagcctgatgctggatgaccaaccccctatggaggcccagtatgcagaggagggcccaggacctgggatcttcagagcagagcctggagaccagcagcatcccagtaggccagactgggccataggggaatgacagggtggggacagtggagggcaatcatcctacattccccggatcctccttggggtcagccccacatgattgatgtttctcaggcagtgtgctggcgttccatgcgacgtggctgtgcagtgctgggagccctggggctgctggccggtgcaggtgttggctcatggctcctagtgctgtatctgtgtcctgctgcctctcagcccatttccgggaccttgcaggatgaggagataactttgagctgctcagaggccagcgctgaggaagctctgctccctgcacttcccaaaacaggtgggctgcacccctaaggctacgggcctccctccccagcagggacctgtcacagctgagggcaaga

SEQ ID NO: 193385 - DNA, 2163 bp, Homo sapiens
  Payload ID: 18179
  Gene Name: transmembrane protease, serine 5
  ENST ID: ENST00000545579
  CDS Start-End: 254-1600
ccagggagacctcatcttccaaccaagcttgctgggctagctttaatcaatgctggcctgagaacaggagcggaacattgcctagtagaccctgaggctttacaacagtgccactgacccctatgagcctgatgctggatgaccaaccccctatggaggcccagtatgcagaggagggcccaggacctgggatcttcagagcagagcctggagaccagcagcatcccagtaggccagactgggccataggggaatgacagggtggggacagtggagggcaatcatcctacattccccggatcctccttggggtcagccccacatgattgatgtttctcaggcagtgtgctggcgttccatgcgacgtggctgtgcagtgctgggagccctggggctgctggccggtgcaggtgttggctcatggctcctagtgctgtatctgtgtcctgctgcctctcagcccatttccgggaccttgcaggatgaggagataactttgagctgctcagaggccagcgctgaggaagctctgctccctgcacttcccaaaacagtatctttcagaataaacagcgaagacttcttgctggaagcgcaagtgagggatcagccacgctggctcctggtctgccatgagggctggagccccgccctggggctgcagatctgctggagccttgggcatctcagactcactcaccacaagggagtaaacctcactgacatcaaactcaacagttcccaggagtttgctcagctctctcctagactgggaggcttcctggaggaggcgtggcagcccaggaacaactgcacttctggtcaagttgtttccctcagatgctctgagtgtggagcgaggcccctggcttcccggatagttggtgggcagtctgtggctcctgggcgctggccgtggcaggccagcgtggccctgggcttccggcacacgtgtgggggctctgtgctagcgccacgctgggtggtgactgctgcacattgtatgcacagtttcaggctggcccgcctgtccagctggcgggttcatgcggggctggtcagccacagtgccgtcaggccccaccaaggggctctggtggagaggattatcccacaccccctctacagtgcccagaatcatgactacgacgtcgccctcctgaggctccagaccgctctcaacttctcagacactgtgggcgctgtgtgcctgccggccaaggaacagcattttccgaagggctcgcggtgctgggtgtctggctggggccacacccaccctagccatacttacagctcggatatgctccaggacacggtggtgcccttgttcagcactcagctctgcaacagctcttgcgtgtacagcggagccctcaccccccgcatgctttgcgctggctacctggacggaagggctgatgcatgccagggagatagcgggggccccctagtgtgcccagatggggacacatggcgcctagtgggggtggtcagctgggggcgtggctgcgcagagcccaatcacccaggtgtctacgccaaggtagctgagtttctggactggatccatgacactgctcaggactccctcctctgagtcctgctgtttcctccagtctcactgcacaccactgcctcatgcttcctggggcctccagcagctccactaatggaggagaggcagtagcctccgacacagaacgcatggacctcctactactgtgtgtgaggaacagtcactacccactggccagccacccagccaacaggtctctcctcttgggccctgatttcagagtcctctttctcactagagactcaatgacagaagagaggctgggacttggttgggcatgctgtggttgctgagggatgagggggaggagagaggtaggagctggagatgaagaggctgctagaagcagcaggaagcctgcccttctgccctctcccctccctgcccctgtgtgagtcttttgggagggtgctgggaggtgccccccgtcccacctttttcctgtgctctaggtgggctaagtgcctccctagaggactccatggctgagaggctcctgggcagatggggtcaaggctgggccagcccagatgaagcctatgggagtcaggaccctctccactctccctctccactccccttcc

SEQ ID NO: 193386 - DNA, 581 bp, Homo sapiens
  Payload ID: 18179
  Gene Name: transmembrane protease, serine 5
  ENST ID: ENST00000539732
  CDS Start-End: 531-581
aatcaatgctggcctgagaacaggagcggaacattgcctagtagaccctgaggctttacaacagtgccactgacccctatgtatctttcagaataaacagcgaagacttcttgctggaagcgcaagtgagggatcagccacgctggctcctggtctgccatgagggctggagccccgccctggggctgcagatctgctggagccttgggcatctcagactcactcaccacaagggagtaaacctcactgacatcaaactcaacagttcccaggagtttgctcagctctctcctagactgggaggcttcctggaggaggcgtggcagcccaggaacaactgcacttctggtcaagttgtttccctcagatgctctgagtgtggagcgaggcccctggcttcccggatagttggtgggcagtctgtggctcctgggcgctggccgtggcaggccagcgtggccctgggcttccggcacacgtgtgggggctctgtgctagcgccacgctgggtggtgactgctgcacattgtatgcacagtttcaggctggcccgcctgtccagctggcgggttcatgcgggg

SEQ ID NO: 193387 - DNA, 584 bp, Homo sapiens
  Payload ID: 18179
  Gene Name: transmembrane protease, serine 5
  ENST ID: ENST00000538770
  CDS Start-End: 553-584
aatcaatgctggcctgagaacaggagcggaacattgcctagtagaccctgaggctttacaacagtgccactgacccctatgtatctttcagaataaacagcgaagacttcttgctggaagcgcaagtgagggatcagccacgctggctcctggtctgccatgagggctggagccccgccctggggctgcagatctgctggagccttgggcatctcagactcactcaccacaagggagtaaacctcactgacatcaaactcaacagttcccaggagtttgctcagctctctcctagactgggaggcttcctggaggaggcgtggcagcccaggtaggactactgaggctgttaggaacaactgcacttctggtcaagttgtttccctcagatgctctgagtgtggagcgaggcccctggcttcccggatagttggtgggcagtctgtggctcctgggcgctggccgtggcaggccagcgtggccctgggcttccggcacacgtgtgggggctctgtgctagcgccacgctgggtggtgactgctgcacattgtatgcacagtttcaggctggcccgcctgtccag

SEQ ID NO: 193388 - DNA, 1956 bp, Homo sapiens
  Payload ID: 18179
  Gene Name: transmembrane protease, serine 5
  ENST ID: ENST00000538955
  CDS Start-End: 152-1393
ccagggagacctcatcttccaaccaagcttgctgggctagctttaatcaatgctggcctgagaacaggagcggaacattgcctagtagaccctgaggctttacaacagtgccactgacccctatgtttctcaggcagtgtgctggcgttccatgcgacgtggctgtgcagtgctgggagccctggggctgctggccggtgcaggtgttggctcatggctcctagtgctgtatctgtgtcctgctgcctctcagcccatttccgggaccttgcaggatgaggagataactttgagctgctcagaggccagcgctgaggaagctctgctccctgcacttcccaaaacagtatctttcagaataaacagcgaagacttcttgctggaagcgcaagtgagggatcagccacgctggctcctggtctgccatgagggctggagccccgccctggggctgcagatctgctggagccttgggcatctcagactcactcaccacaagggagtaaacctcactgacatcaaactcaacagttcccaggagtttgctcagctctctcctagactgggaggcttcctggaggaggcgtggcagcccaggaacaactgcacttctggtcaagttgtttccctcagatgctctgagtgtggagcgaggcccctggcttcccggatagttggtgggcagtctgtggctcctgggcgctggccgtggcaggccagcgtggccctgggcttccggcacacgtgtgggggctctgtgctagcgccacgctgggtggtgactgctgcacattgtatgcacagtttcaggctggcccgcctgtccagctggcgggttcatgcggggctggtcagccacagtgccgtcaggccccaccaaggggctctggtggagaggattatcccacaccccctctacagtgcccagaatcatgactacgacgtcgccctcctgaggctccagaccgctctcaacttctcagacactgtgggcgctgtgtgcctgccggccaaggaacagcattttccgaagggctcgcggtgctgggtgtctggctggggccacacccaccctagccatacttacagctcggatatgctccaggacacggtggtgcccttgttcagcactcagctctgcaacagctcttgcgtgtacagcggagccctcaccccccgcatgctttgcgctggctacctggacggaagggctgatgcatgccagggagatagcgggggccccctagtgtgcccagatggggacacatggcgcctagtgggggtggtcagctgggggcgtggctgcgcagagcccaatcacccaggtgtctacgccaaggtagctgagtttctggactggatccatgacactgctcaggactccctcctctgagtcctgctgtttcctccagtctcactgcacaccactgcctcatgcttcctggggcctccagcagctccactaatggaggagaggcagtagcctccgacacagaacgcatggacctcctactactgtgtgtgaggaacagtcactacccactggccagccacccagccaacaggtctctcctcttgggccctgatttcagagtcctctttctcactagagactcaatgacagaagagaggctgggacttggttgggcatgctgtggttgctgagggatgagggggaggagagaggtaggagctggagatgaagaggctgctagaagcagcaggaagcctgcccttctgccctctcccctccctgcccctgtgtgagtcttttgggagggtgctgggaggtgccccccgtcccacctttttcctgtgctctaggtgggctaagtgcctccctagaggactccatggctgagaggctcctgggcagatggggtcaaggctgggccagcccagatgaagcctatgggagtcaggaccctctccactctccctctccactccccttcc

SEQ ID NO: 193389 - DNA, 1320 bp, Homo sapiens
  Payload ID: 18179
  Gene Name: transmembrane protease, serine 5
  ENST ID: ENST00000544476
  CDS Start-End: 114-1148
agctttaatcaatgctggcctgagaacaggagcggaacattgcctagtagaccctgaggctttacaacagtgccactgacccctatgtttctcaggcagtgtgctggcgttccatgcgacgtggctgtgcagtgctgggagccctggggctgctggccggtgcaggtgttggctcatggctcctagtgctgtatctgtgtcctgctgcctctcagcccatttccgggaccttgcaggatgaggagataactttgagctgctcagaggccagcgctgaggaagctctgctccctgcacttcccaaaacagtatctttcagaataaacagcgaagacttcttgctggaagcgcaagtgagggatcagccacgctggctcctggtctgccatgagggctggagccccgccctggggctgcagatctgctggagccttgggcatctcagactcactcaccacaagggagtaaacctcactgacatcaaactcaacagttcccaggagtttgctcagctctctcctagactgggaggcttcctggaggaggcgtggcagcccagtttcaggctggcccgcctgtccagctggcgggttcatgcggggctggtcagccacagtgccgtcaggccccaccaaggggctctggtggagaggattatcccacaccccctctacagtgcccagaatcatgactacgacgtcgccctcctgaggctccagaccgctctcaacttctcagacactgtgggcgctgtgtgcctgccggccaaggaacagcattttccgaagggctcgcggtgctgggtgtctggctggggccacacccaccctagccatacttacagctcggatatgctccaggacacggtggtgcccttgttcagcactcagctctgcaacagctcttgcgtgtacagcggagccctcaccccccgcatgctttgcgctggctacctggacggaagggctgatgcatgccagggagatagcgggggccccctagtgtgcccagatggggacacatggcgcctagtgggggtggtcagctgggggcgtggctgcgcagagcccaatcacccaggtgtctacgccaaggtagctgagtttctggactggatccatgacactgctcaggactccctcctctgagtcctgctgtttcctccagtctcactgcacaccactgcctcatgcttcctggggcctccagcagctccactaatggaggagaggcagtagcctccgacacagaacgcatggacctcctactactgtgtgtgaggaacagtcactacccactggccagccacccagccaacag

SEQ ID NO: 193390 - DNA, 3197 bp, Homo sapiens
  Payload ID: 18180
  Gene Name: transmembrane protease, serine 6
  Uniprot ID: Q8IU80
  ENST ID: ENST00000346753
  CDS Start-End: 118-2553
gttcttgagccagacccagtccagctctggtgcctgccctctggtgcgagctgacctgagatgcacttccctcctctgtgagctgtctcggcacccacttgcagtcactgccgcctgatgttgttactcttccactccaaaaggatgcccgtggccgaggccccccaggtggctggcgggcagggggacggaggtgatggcgaggaagcggagccggaggggatgttcaaggcctgtgaggactccaagagaaaagcccggggctacctccgcctggtgcccctgtttgtgctgctggccctgctcgtgctggcttcggcgggggtgctactctggtatttcctagggtacaaggcggaggtgatggtcagccaggtgtactcaggcagtctgcgtgtactcaatcgccacttctcccaggatcttacccgccgggaatctagtgccttccgcagtgaaaccgccaaagcccagaagatgctcaaggagctcatcaccagcacccgcctgggaacttactacaactccagctccgtctattcctttggggagggacccctcacctgcttcttctggttcattctccaaatccccgagcaccgccggctgatgctgagccccgaggtggtgcaggcactgctggtggaggagctgctgtccacagtcaacagctcggctgccgtcccctacagggccgagtacgaagtggaccccgagggcctagtgatcctggaagccagtgtgaaagacatagctgcattgaattccacgctgggttgttaccgctacagctacgtgggccagggccaggtcctccggctgaaggggcctgaccacctggcctccagctgcctgtggcacctgcagggccccaaggacctcatgctcaaactccggctggagtggacgctggcagagtgccgggaccgactggccatgtatgacgtggccgggcccctggagaagaggctcatcacctcggtgtacggctgcagccgccaggagcccgtggtggaggttctggcgtcgggggccatcatggcggtcgtctggaagaagggcctgcacagctactacgaccccttcgtgctctccgtgcagccggtggtcttccaggcctgtgaagtgaacctgacgctggacaacaggctcgactcccagggcgtcctcagcaccccgtacttccccagctactactcgccccaaacccactgctcctggcacctcacggtgccctctctggactacggcttggccctctggtttgatgcctatgcactgaggaggcagaagtatgatttgccgtgcacccagggccagtggacgatccagaacaggaggctgtgtggcttgcgcatcctgcagccctacgccgagaggatccccgtggtggccacggccgggatcaccatcaacttcacctcccagatctccctcaccgggcccggtgtgcgggtgcactatggcttgtacaaccagtcggacccctgccctggagagttcctctgttctgtgaatggactctgtgtccctgcctgtgatggggtcaaggactgccccaacggcctggatgagagaaactgcgtttgcagagccacattccagtgcaaagaggacagcacatgcatctcactgcccaaggtctgtgatgggcagcctgattgtctcaacggcagcgacgaagagcagtgccaggaaggggtgccatgtgggacattcaccttccagtgtgaggaccggagctgcgtgaagaagcccaacccgcagtgtgatgggcggcccgactgcagggacggctcggatgaggagcactgtgactgtggcctccagggcccctccagccgcattgttggtggagctgtgtcctccgagggtgagtggccatggcaggccagcctccaggttcggggtcgacacatctgtgggggggccctcatcgctgaccgctgggtgataacagctgcccactgcttccaggaggacagcatggcctccacggtgctgtggaccgtgttcctgggcaaggtgtggcagaactcgcgctggcctggagaggtgtccttcaaggtgagccgcctgctcctgcacccgtaccacgaagaggacagccatgactacgacgtggcgctgctgcagctcgaccacccggtggtgcgctcggccgccgtgcgccccgtctgcctgcccgcgcgctcccacttcttcgagcccggcctgcactgctggattacgggctggggcgccttgcgcgagggcggccccatcagcaacgctctgcagaaagtggatgtgcagttgatcccacaggacctgtgcagcgaggtctatcgctaccaggtgacgccacgcatgctgtgtgccggctaccgcaagggcaagaaggatgcctgtcagggtgactcaggtggtccgctggtgtgcaaggcactcagtggccgctggttcctggcggggctggtcagctggggcctgggctgtggccggcctaactacttcggcgtctacacccgcatcacaggtgtgatcagctggatccagcaagtggtgacctgaggaactgcccccctgcaaagcagggcccacctcctggactcagagagcccagggcaactgccaagcagggggacaagtattctggcggggggtgggggagagagcaggccctgtggtggcaggaggtggcatcttgtctcgtccctgatgtctgctccagtgatggcaggaggatggagaagtgccagcagctgggggtcaagacgtcccctgaggacccaggcccacacccagcccttctgcctcccaattctctctcctccgtccccttcctccactgctgcctaatgcaaggcagtggctcagcagcaagaatgctggttctacatcccgaggagtgtctgaggtgcgccccactctgtacagaggctgtttgggcagccttgcctccagagagcagattccagcttcggaagcccctggtctaacttgggatctgggaatggaaggtgctcccatcggaggggaccctcagagccctggagactgccaggtgggcctgctgccactgtaagccaaaaggtggggaagtcctgactccagggtccttgccccacccctgcctgccacctgggccctcacagcccagaccctcactgggaggtgagctcagctgccctttggaataaagctgcctgatccaa

SEQ ID NO: 193391 - DNA, 3260 bp, Homo sapiens
  Payload ID: 18180
  Gene Name: transmembrane protease, serine 6
  Uniprot ID: Q8IU80
  ENST ID: ENST00000381792
  CDS Start-End: 142-2616
cttgagccagacccagtccagctctggtgcctgccctctggtgcgagctgacctgagatgcacttccctcctctgtgagctgtctcggcacccacttgcagtcactgccgcctgatgttgttactcttccactccaaaaggatgcccgtggccgaggccccccaggtggctggcgggcagggggacggaggtgatggcgaggaagcggagccggaggggatgttcaaggcctgtgaggactccaagagaaaagcccggggctacctccgcctggtgcccctgtttgtgctgctggccctgctcgtgctggcttcggcgggggtgctactctggtatttcctagggtacaaggcggaggtgatggtcagccaggtgtactcaggcagtctgcgtgtactcaatcgccacttctcccaggatcttacccgccgggaatctagtgccttccgcagtgaaaccgccaaagcccagaagatgctcaaggagctcatcaccagcacccgcctgggaacttactacaactccagctccgtctattcctttggggagggacccctcacctgcttcttctggttcattctccaaatccccgagcaccgccggctgatgctgagccccgaggtggtgcaggcactgctggtggaggagctgctgtccacagtcaacagctcggctgccgtcccctacagggccgagtacgaagtggaccccgagggcctagtgatcctggaagccagtgtgaaagacatagctgcattgaattccacgctgggttgttaccgctacagctacgtgggccagggccaggtcctccggctgaaggggcctgaccacctggcctccagctgcctgtggcacctgcagggccccaaggacctcatgctcaaactccggctggagtggacgctggcagagtgccgggaccgactggccatgtatgacgtggccgggcccctggagaagaggctcatcacctcggtgtacggctgcagccgccaggagcccgtggtggaggttctggcgtcgggggccatcatggcggtcgtctggaagaagggcctgcacagctactacgaccccttcgtgctctccgtgcagccggtggtcttccaggcctgtgaagtgaacctgacgctggacaacaggctcgactcccagggcgtcctcagcaccccgtacttccccagctactactcgccccaaacccactgctcctggcacctcacggtgccctctctggactacggcttggccctctggtttgatgcctatgcactgaggaggcagaagtatgatttgccgtgcacccagggccagtggacgatccagaacaggaggctgtgtggcttgcgcatcctgcagccctacgccgagaggatccccgtggtggccacggccgggatcaccatcaacttcacctcccagatctccctcaccgggcccggtgtgcgggtgcactatggcttgtacaaccagtcggacccctgccctggagagttcctctgttctgtgaatggactctgtgtccctgcctgtgatggggtcaaggactgccccaacggcctggatgagagaaactgcgtttgcagagccacattccagtgcaaagaggacagcacatgcatctcactgcccaaggtctgtgatgggcagcctgattgtctcaacggcagcgacgaagagcagtgccaggaaggggtgccatgtgggacattcaccttccagtgtgaggaccggagctgcgtgaagaagcccaacccgcagtgtgatgggcggcccgactgcagggacggctcggatgaggagcactgtgactgtggcctccagggcccctccagccgcattgttggtggagctgtgtcctccgagggtgagtggccatggcaggccagcctccaggttcggggtcgacacatctgtgggggggccctcatcgctgaccgctgggtgataacagctgcccactgcttccaggaggacagcatggcctccacggtgctgtggaccgtgttcctgggcaaggtgtggcagaactcgcgctggcctggagaggtgtccttcaaggtgagccgcctgctcctgcacccgtaccacgaagaggacagccatgactacgacgtggcgctgctgcagctcgaccacccggtggtgcgctcggccgccgtgcgccccgtctgcctgcccgcgcgctcccacttcttcgagcccggcctgcactgctggattacgggctggggcgccttgcgcgagggcgccctacgggcggatgctgtggccctattttatggatggagaaaccaaggctcagagacatgttgctgccccatcagcaacgctctgcagaaagtggatgtgcagttgatcccacaggacctgtgcagcgaggtctatcgctaccaggtgacgccacgcatgctgtgtgccggctaccgcaagggcaagaaggatgcctgtcagggtgactcaggtggtccgctggtgtgcaaggcactcagtggccgctggttcctggcggggctggtcagctggggcctgggctgtggccggcctaactacttcggcgtctacacccgcatcacaggtgtgatcagctggatccagcaagtggtgacctgaggaactgcccccctgcaaagcagggcccacctcctggactcagagagcccagggcaactgccaagcagggggacaagtattctggcggggggtgggggagagagcaggccctgtggtggcaggaggtggcatcttgtctcgtccctgatgtctgctccagtgatggcaggaggatggagaagtgccagcagctgggggtcaagacgtcccctgaggacccaggcccacacccagcccttctgcctcccaattctctctcctccgtccccttcctccactgctgcctaatgcaaggcagtggctcagcagcaagaatgctggttctacatcccgaggagtgtctgaggtgcgccccactctgtacagaggctgtttgggcagccttgcctccagagagcagattccagcttcggaagcccctggtctaacttgggatctgggaatggaaggtgctcccatcggaggggaccctcagagccctggagactgccaggtgggcctgctgccactgtaagccaaaaggtggggaagtcctgactccagggtccttgccccacccctgcctgccacctgggccctcacagcccagaccctcactgggaggtgagctcagctgccctttggaataaagctgcctgatccaa

SEQ ID NO: 193392 - DNA, 3178 bp, Homo sapiens
  Payload ID: 18180
  Gene Name: transmembrane protease, serine 6
  Uniprot ID: Q8IU80
  ENST ID: ENST00000406856
  CDS Start-End: 63-2537
ggacaaacagaggctcctgaggcctgtgtgcaggcccggcacctatctgccgctcccaaaggatgcccgtggccgaggccccccaggtggctggcgggcagggggacggaggtgatggcgaggaagcggagccggaggggatgttcaaggcctgtgaggactccaagagaaaagcccggggctacctccgcctggtgcccctgtttgtgctgctggccctgctcgtgctggcttcggcgggggtgctactctggtatttcctagggtacaaggcggaggtgatggtcagccaggtgtactcaggcagtctgcgtgtactcaatcgccacttctcccaggatcttacccgccgggaatctagtgccttccgcagtgaaaccgccaaagcccagaagatgctcaaggagctcatcaccagcacccgcctgggaacttactacaactccagctccgtctattcctttggggagggacccctcacctgcttcttctggttcattctccaaatccccgagcaccgccggctgatgctgagccccgaggtggtgcaggcactgctggtggaggagctgctgtccacagtcaacagctcggctgccgtcccctacagggccgagtacgaagtggaccccgagggcctagtgatcctggaagccagtgtgaaagacatagctgcattgaattccacgctgggttgttaccgctacagctacgtgggccagggccaggtcctccggctgaaggggcctgaccacctggcctccagctgcctgtggcacctgcagggccccaaggacctcatgctcaaactccggctggagtggacgctggcagagtgccgggaccgactggccatgtatgacgtggccgggcccctggagaagaggctcatcacctcggtgtacggctgcagccgccaggagcccgtggtggaggttctggcgtcgggggccatcatggcggtcgtctggaagaagggcctgcacagctactacgaccccttcgtgctctccgtgcagccggtggtcttccaggcctgtgaagtgaacctgacgctggacaacaggctcgactcccagggcgtcctcagcaccccgtacttccccagctactactcgccccaaacccactgctcctggcacctcacggtgccctctctggactacggcttggccctctggtttgatgcctatgcactgaggaggcagaagtatgatttgccgtgcacccagggccagtggacgatccagaacaggaggctgtgtggcttgcgcatcctgcagccctacgccgagaggatccccgtggtggccacggccgggatcaccatcaacttcacctcccagatctccctcaccgggcccggtgtgcgggtgcactatggcttgtacaaccagtcggacccctgccctggagagttcctctgttctgtgaatggactctgtgtccctgcctgtgatggggtcaaggactgccccaacggcctggatgagagaaactgcgtttgcagagccacattccagtgcaaagaggacagcacatgcatctcactgcccaaggtctgtgatgggcagcctgattgtctcaacggcagcgacgaagagcagtgccaggaaggggtgccatgtgggacattcaccttccagtgtgaggaccggagctgcgtgaagaagcccaacccgcagtgtgatgggcggcccgactgcagggacggctcggatgaggagcactgtgactgtggcctccagggcccctccagccgcattgttggtggagctgtgtcctccgagggtgagtggccatggcaggccagcctccaggttcggggtcgacacatctgtgggggggccctcatcgctgaccgctgggtgataacagctgcccactgcttccaggaggacagcatggcctccacggtgctgtggaccgtgttcctgggcaaggtgtggcagaactcgcgctggcctggagaggtgtccttcaaggtgagccgcctgctcctgcacccgtaccacgaagaggacagccatgactacgacgtggcgctgctgcagctcgaccacccggtggtgcgctcggccgccgtgcgccccgtctgcctgcccgcgcgctcccacttcttcgagcccggcctgcactgctggattacgggctggggcgccttgcgcgagggcgccctacgggcggatgctgtggccctattttatggatggagaaaccaaggctcagagacatgttgctgccccatcagcaacgctctgcagaaagtggatgtgcagttgatcccacaggacctgtgcagcgaggtctatcgctaccaggtgacgccacgcatgctgtgtgccggctaccgcaagggcaagaaggatgcctgtcagggtgactcaggtggtccgctggtgtgcaaggcactcagtggccgctggttcctggcggggctggtcagctggggcctgggctgtggccggcctaactacttcggcgtctacacccgcatcacaggtgtgatcagctggatccagcaagtggtgacctgaggaactgcccccctgcaaagcagggcccacctcctggactcagagagcccagggcaactgccaagcagggggacaagtattctggcggggggtgggggagagagcaggccctgtggtggcaggaggtggcatcttgtctcgtccctgatgtctgctccagtgatggcaggaggatggagaagtgccagcagctgggggtcaagacgtcccctgaggacccaggcccacacccagcccttctgcctcccaattctctctcctccgtccccttcctccactgctgcctaatgcaaggcagtggctcagcagcaagaatgctggttctacatcccgaggagtgtctgaggtgcgccccactctgtacagaggctgtttgggcagccttgcctccagagagcagattccagcttcggaagcccctggtctaacttgggatctgggaatggaaggtgctcccatcggaggggaccctcagagccctggagactgccaggtgggcctgctgccactgtaagccaaaaggtggggaagtcctgactccagggtccttgccccacccctgcctgccacctgggccctcacagcccagaccctcactgggaggtgagctcagctgccctttggaataaagctgcctgatc

SEQ ID NO: 193393 - DNA, 3122 bp, Homo sapiens
  Payload ID: 18180
  Gene Name: transmembrane protease, serine 6
  Uniprot ID: Q8IU80
  ENST ID: ENST00000406725
  CDS Start-End: 73-2481
gagccacctaccctgctccgaggccaggcctgcagggcctcatcggccagagggtgatcagtgagcagaaggatgcccgtggccgaggccccccaggtggctggcgggcagggggacggaggtgatggcgaggaagcggagccggaggggatgttcaaggcctgtgaggactccaagagaaaagcccggggctacctccgcctggtgcccctgtttgtgctgctggccctgctcgtgctggcttcggcgggggtgctactctggtatttcctagggtacaaggcggaggtgatggtcagccaggtgtactcaggcagtctgcgtgtactcaatcgccacttctcccaggatcttacccgccgggaatctagtgccttccgcagtgaaaccgccaaagcccagaagatgctcaaggagctcatcaccagcacccgcctgggaacttactacaactccagctccgtctattcctttggggagggacccctcacctgcttcttctggttcattctccaaatccccgagcaccgccggctgatgctgagccccgaggtggtgcaggcactgctggtggaggagctgctgtccacagtcaacagctcggctgccgtcccctacagggccgagtacgaagtggaccccgagggcctagtgatcctggaagccagtgtgaaagacatagctgcattgaattccacgctgggttgttaccgctacagctacgtgggccagggccaggtcctccggctgaaggggcctgaccacctggcctccagctgcctgtggcacctgcagggccccaaggacctcatgctcaaactccggctggagtggacgctggcagagtgccgggaccgactggccatgtatgacgtggccgggcccctggagaagaggctcatcacctcggtgtacggctgcagccgccaggagcccgtggtggaggttctggcgtcgggggccatcatggcggtcgtctggaagaagggcctgcacagctactacgaccccttcgtgctctccgtgcagccggtggtcttccaggcctgtgaagtgaacctgacgctggacaacaggctcgactcccagggcgtcctcagcaccccgtacttccccagctactactcgccccaaacccactgctcctggcacctcacggtgccctctctggactacggcttggccctctggtttgatgcctatgcactgaggaggcagaagtatgatttgccgtgcacccagggccagtggacgatccagaacaggaggctgtgtggcttgcgcatcctgcagccctacgccgagaggatccccgtggtggccacggccgggatcaccatcaacttcacctcccagatctccctcaccgggcccggtgtgcgggtgcactatggcttgtacaaccagtcggacccctgccctggagagttcctctgttctgtgaatggactctgtgtccctgcctgtgatggggtcaaggactgccccaacggcctggatgagagaaactgcgtttgcagagccacattccagtgcaaagaggacagcacatgcatctcactgcccaaggtctgtgatgggcagcctgattgtctcaacggcagcgacgaagagcagtgccaggaaggggtgccatgtgggacattcaccttccagtgtgaggaccggagctgcgtgaagaagcccaacccgcagtgtgatgggcggcccgactgcagggacggctcggatgaggagcactgtgactgtggcctccagggcccctccagccgcattgttggtggagctgtgtcctccgagggtgagtggccatggcaggccagcctccaggttcggggtcgacacatctgtgggggggccctcatcgctgaccgctgggtgataacagctgcccactgcttccaggaggacagcatggcctccacggtgctgtggaccgtgttcctgggcaaggtgtggcagaactcgcgctggcctggagaggtgtccttcaaggtgagccgcctgctcctgcacccgtaccacgaagaggacagccatgactacgacgtggcgctgctgcagctcgaccacccggtggtgcgctcggccgccgtgcgccccgtctgcctgcccgcgcgctcccacttcttcgagcccggcctgcactgctggattacgggctggggcgccttgcgcgagggcggccccatcagcaacgctctgcagaaagtggatgtgcagttgatcccacaggacctgtgcagcgaggtctatcgctaccaggtgacgccacgcatgctgtgtgccggctaccgcaagggcaagaaggatgcctgtcagggtgactcaggtggtccgctggtgtgcaaggcactcagtggccgctggttcctggcggggctggtcagctggggcctgggctgtggccggcctaactacttcggcgtctacacccgcatcacaggtgtgatcagctggatccagcaagtggtgacctgaggaactgcccccctgcaaagcagggcccacctcctggactcagagagcccagggcaactgccaagcagggggacaagtattctggcggggggtgggggagagagcaggccctgtggtggcaggaggtggcatcttgtctcgtccctgatgtctgctccagtgatggcaggaggatggagaagtgccagcagctgggggtcaagacgtcccctgaggacccaggcccacacccagcccttctgcctcccaattctctctcctccgtccccttcctccactgctgcctaatgcaaggcagtggctcagcagcaagaatgctggttctacatcccgaggagtgtctgaggtgcgccccactctgtacagaggctgtttgggcagccttgcctccagagagcagattccagcttcggaagcccctggtctaacttgggatctgggaatggaaggtgctcccatcggaggggaccctcagagccctggagactgccaggtgggcctgctgccactgtaagccaaaaggtggggaagtcctgactccagggtccttgccccacccctgcctgccacctgggccctcacagcccagaccctcactgggaggtgagctcagctgccctttggaataaagctgcctgatc

SEQ ID NO: 193394 - DNA, 446 bp, Homo sapiens
  Payload ID: 18180
  Gene Name: transmembrane protease, serine 6
  ENST ID: ENST00000429068
  CDS Start-End: 1-216
ctgacgctggacaacaggctcgactcccagggcgtcctcagcaccccgtacttccccagctactactcgccccaaacccactgctcctggcacctcacggtgccctctctggactacggcttggccctctggtttgatgcctatgcactgaggaggcagaagtatgatttgccgtgcacccagggccagtggacgatccagaacaggagagtttgaatatctaagatgccagtcttggaagatgccaaaattggaaggctctggggctctagaattcttggatttctggggtgtgtgttcccaatcaccaacacttgtaatttgcttgttggctgatcctattcaaaaggatcatccagacaaaaggtgacgaagaatgacaaggtttgcttgactcctttttgcaatttatctgggactaggattaaaagaaaggagaagaaata

SEQ ID NO: 193395 - DNA, 1695 bp, Homo sapiens
  Payload ID: 18180
  Gene Name: transmembrane protease, serine 6
  ENST ID: ENST00000442782
  CDS Start-End: 118-1503
gttcttgagccagacccagtccagctctggtgcctgccctctggtgcgagctgacctgagatgcacttccctcctctgtgagctgtctcggcacccacttgcagtcactgccgcctgatgttgttactcttccactccaaaaggatgcccgtggccgaggccccccaggtggctggcgggcagggggacggaggtgatggcgaggaagcggagccggaggggatgttcaaggcctgtgaggactccaagagaaaagcccggggctacctccgcctggtgcccctgtttgtgctgctggccctgctcgtgctggcttcggcgggggtgctactctggtatttcctagggtacaaggcggaggtgatggtcagccaggtgtactcaggcagtctgcgtgtactcaatcgccacttctcccaggatcttacccgccgggaatctagtgccttccgcagtgaaaccgccaaagcccagaagatgctcaaggagctcatcaccagcacccgcctgggaacttactacaactccagctccgtctattcctttggggagggacccctcacctgcttcttctggttcattctccaaatccccgagcaccgccggctgatgctgagccccgaggtggtgcaggcactgctggtggaggagctgctgtccacagtcaacagctcggctgccgtcccctacagggccgagtacgaagtggaccccgagggcctagtgatcctggaagccagtgtgaaagacatagctgcattgaattccacgctgggttgttaccgctacagctacgtgggccagggccaggtcctccggctgaaggggcctgaccacctggcctccagctgcctgtggcacctgcagggccccaaggacctcatgctcaaactccggctggagtggacgctggcagagtgccgggaccgactggccatgtatgacgtggccgggcccctggagaagaggctcatcacctcggtgtacggctgcagccgccaggagcccgtggtggaggttctggcgtcgggggccatcatggcggtcgtctggaagaagggcctgcacagctactacgaccccttcgtgctctccgtgcagccggtggtcttccaggcctgtgaagtgaacctgacgctggacaacaggctcgactcccagggcgtcctcagcaccccgtacttccccagctactactcgccccaaacccactgctcctggcacctcacggtgccctctctggactacggcttggccctctggtttgatgcctatgcactgaggaggcagaagtatgatttgccgtgcacccagggccagtggacgatccagaacaggaggtaccacttcctctcctccctctggcttcctttcctccctccccctccctctcttccctcctcaatagtgaccccctcattggaagcccaagtccccaatctcagaggggcagcaaggggagcgagcagaggctggggctggtgtcaggcctgttgcccttgaccttgtcctcgtcccagcctccgccctggccccggcttcccctctggctaccccagaggtctcagacacgtttggtcatcagacaccttggatgtttattctaattacagcaaaattgtctcatcttcttgggtgctgtaaccccctctggcaccctcaatccttcaataaaatgtttccagagccaaagga

SEQ ID NO: 193396 - DNA, 526 bp, Homo sapiens
  Payload ID: 18180
  Gene Name: transmembrane protease, serine 6
  ENST ID: ENST00000423761
  CDS Start-End: 102-526
aaaaggcagggaagtcctgcttccgtgccccaccggtgctcagcagaggctcccttgcaaatgcgaggctgtttccaactttggtctgtttccctggcaggatgcccgtggccgaggccccccaggtggctggcgggcagggggacggaggtgatggcgaggaagcggagccggaggggatgttcaaggcctgtgaggactccaagagaaaagcccggggctacctccgcctggtgcccctgtttgtgctgctggccctgctcgtgctggcttcggcgggggtgctactctggtatttcctagggtacaaggcggaggtgatggtcagccaggtgtactcaggcagtctgcgtgtactcaatcgccacttctcccaggatcttacccgccgggaatctagtgccttccgcagtgaaaccgccaaagcccagaagatgctcaaggagctcatcaccagcacccgcctgggaacttactacaactccagctccgtctattcctttggggagggacccctcacctgctt

SEQ ID NO: 193397 - DNA, 2616 bp, Homo sapiens
  Payload ID: 18181
  Gene Name: transmembrane protease, serine 7
  Uniprot ID: Q7RTY8
  ENST ID: ENST00000452346
  CDS Start-End: 4-2535
ataatggacaaagaaaacagcgatgtttcagccgcacctgctgacctgaaaatatccaatatctcagtccaagtggtcagtgcccaaaagaagctgccagtgagacgaccaccgttgccagggagacgactaccattgccaggaagacgaccaccacaaagacccattggcaaagccaaacccaagaagcaatccaagaaaaaagttcccttttggaatgtacaaaataaaatcattctcttcacagtatttttattcatcctagcagtcatagcctggacacttctgtggctgtatatcagtaaaacagaaagcaaagatgctttttactttgctgggatgtttcgcatcaccaacattgagtttcttcccgaataccgacaaaaggagtccagggaatttctttcagtgtcacggactgtgcagcaagtgataaacctggtttatacaacatctgccttctccaaattttatgagcagtctgttgttgcagatgtcagcagcaacaacaaaggcggcctccttgtccacttttggattgtttttgtcatgccacgtgccaaaggccacatcttctgtgaagactgtgttgccgccatcttgaaggactccatccagacaagcatcataaaccggacctctgtggggagcttgcagggactggctgtggacatggactctgtggtactaaatgctgggcttcggtcggattactcgtcaaccataggatctgacaaaggctgctctcagtacttctatgcagagcatctgtctctccactacccgctggagatttctgcagcctcagggaggctgatgtgtcacttcaagctggtggccatagtgggctacctgattcgtctctcaatcaagtccatccaaatcgaagccgacaactgtgtcactgactccctgaccatttacgactcccttttgcccatccggagcagcatcttgtacagaatttgtgaacccacaagaacattaatgtcatttgtttctacaaataatctcatgttggtgacatttaagtctcctcatatacggaggctctcaggaatccgggcatattttgaggtcattccagaacaaaagtgtgaaaacacagtgttggtcaaagacatcactggctttgaagggaaaatttcaagcccatattacccgagctactatcctccaaaatgcaagtgtacctggaaatttcagacttctctatcaactcttggcatagcactgaaattctataactattcaataaccaagaagagtatgaaaggctgtgagcatggatggtgggaaattaatgagcacatgtactgtggctcctacatggatcatcagacaatttttcgagtgcccagccctctggttcacattcagctccagtgcagttcaaggctttcagacaagccacttttggcagaatatggcagttacaacatcagtcaaccctgccctgttggatcttttagatgctcctccggtttatgtgtccctcaggcccagcgttgtgatggagtaaatgactgctttgatgaaagtgatgaactgttttgcgtgagccctcaacctgcctgcaataccagctccttcaggcagcatggccctctcatctgtgatggcttcagggactgtgagaatggccgggatgagcaaaactgcactcaaagtattccatgcaacaacagaacttttaagtgtggcaatgatatttgctttaggaaacaaaatgcaaaatgtgatgggacagtggattgtccagatggaagtgatgaagaaggctgcacctgcagcaggagttcctccgcccttcaccgcatcatcggaggcacagacaccctggaggggggttggccgtggcaggtcagcctccactttgttggatctgcctactgtggtgcctcagtcatctccagggagtggcttctttctgcagcccactgttttcatggaaacaggctgtcagatcccacaccatggactgcacacctcgggatgtatgttcaggggaatgccaagtttgtctccccggtgagaagaattgtggtccacgagtactataacagtcagacttttgattatgatattgctttgctacagctcagtattgcctggcctgagaccctgaaacagctcattcagccaatatgcattcctcccactggtcagagagttcgcagtggggagaagtgctgggtaactggctgggggcgaagacacgaagcagataataaaggctccctcgttctgcagcaagcggaggtagagctcattgatcaaacgctctgtgtttccacctacgggatcatcacttctcggatgctctgtgcaggcataatgtcaggcaagagagatgcctgcaaaggagattcgggtggacctttatcttgtcgaagaaaaagtgatggaaaatggattttgactggcattgttagctggggacatggaagtggacgaccaaactttcctggtgtttacacaagggtgtcaaactttgttccctggattcataaatatgtcccttctcttttgtaattgtaccagttgtatttttactgtgatttatgttaaaaatagatactttaaaatgatgcagtaattggctgggtgcgctgg

SEQ ID NO: 193398 - DNA, 2317 bp, Homo sapiens
  Payload ID: 18181
  Gene Name: transmembrane protease, serine 7
  Uniprot ID: Q7RTY8
  ENST ID: ENST00000419127
  CDS Start-End: 83-2236
tcatctggctgctcatctgtatcctttataataaagaaggaatagtaaaacagaaagcaaagatgctttttactttgctgggatgtttcgcatcaccaacattgagtttcttcccgaataccgacaaaaggagtccagggaatttctttcagtgtcacggactgtgcagcaagtgataaacctggtttatacaacatctgccttctccaaattttatgagcagtctgttgttgcagatgtcagcaacaacaaaggcggcctccttgtccacttttggattgtttttgtcatgccacgtgccaaaggccacatcttctgtgaagactgtgttgccgccatcttgaaggactccatccagacaagcatcataaaccggacctctgtggggagcttgcagggactggctgtggacatggactctgtggtactaaatgacaaaggctgctctcagtacttctatgcagagcatctgtctctccactacccgctggagatttctgcagcctcagggaggctgatgtgtcacttcaagctggtggccatagtgggctacctgattcgtctctcaatcaagtccatccaaatcgaagccgacaactgtgtcactgactccctgaccatttacgactcccttttgcccatccggagcagcatcttgtacagaatttgtgaacccacaagaacattaatgtcatttgtttctacaaataatctcatgttggtgacatttaagtctcctcatatacggaggctctcaggaatccgggcatattttgaggtcattccagaacaaaagtgtgaaaacacagtgttggtcaaagacatcactggctttgaagggaaaatttcaagcccatattacccgagctactatcctccaaaatgcaagtgtacctggaaatttcagacttctctatcaactcttggcatagcactgaaattctataactattcaataaccaagaagagtatgaaaggctgtgagcatggatggtgggaaattaatgagcacatgtactgtggctcctacatggatcatcagacaatttttcgagtgcccagccctctggttcacattcagctccagtgcagttcaaggctttcagacaagccacttttggcagaatatggcagttacaacatcagtcaaccctgccctgttggatcttttagatgctcctccggtttatgtgtccctcaggcccagcgttgtgatggagtaaatgactgctttgatgaaagtgatgaactgttttgcgtgagccctcaacctgcctgcaataccagctccttcaggcagcatggccctctcatctgtgatggcttcagggactgtgagaatggccgggatgagcaaaactgcactcaaagtattccatgcaacaacagaacttttaagtgtggcaatgatatttgctttaggaaacaaaatgcaaaatgtgatgggacagtggattgtccagatggaagtgatgaagaaggctgcacctgcagcaggagttcctccgcccttcaccgcatcatcggaggcacagacaccctggaggggggttggccgtggcaggtcagcctccactttgttggatctgcctactgtggtgcctcagtcatctccagggagtggcttctttctgcagcccactgttttcatggaaacaggctgtcagatcccacaccatggactgcacacctcgggatgtatgttcaggggaatgccaagtttgtctccccggtgagaagaattgtggtccacgagtactataacagtcagacttttgattatgatattgctttgctacagctcagtattgcctggcctgagaccctgaaacagctcattcagccaatatgcattcctcccactggtcagagagttcgcagtggggagaagtgctgggtaactggctgggggcgaagacacgaagcagataataaaggctccctcgttctgcagcaagcggaggtagagctcattgatcaaacgctctgtgtttccacctacgggatcatcacttctcggatgctctgtgcaggcataatgtcaggcaagagagatgcctgcaaaggagattcgggtggacctttatcttgtcgaagaaaaagtgatggaaaatggattttgactggcattgttagctggggacatggaagtggacgaccaaactttcctggtgtttacacaagggtgtcaaactttgttccctggattcataaatatgtcccttctcttttgtaattgtaccagttgtatttttactgtgatttatgttaaaaatagatactttaaaatgatgcagtaattggctgggtgcgctgg

SEQ ID NO: 193399 - DNA, 2620 bp, Homo sapiens
  Payload ID: 18181
  Gene Name: transmembrane protease, serine 7
  ENST ID: ENST00000435737
  CDS Start-End: 169-558
ttgctgggagggtggcatgctccaactccacagggacagaagctcctactctagagacccttctggacctcgctgtaggtacttcttcatctggctgctcatctgtatcctttataataaagaaggaatagtaaaacagaaagcaaagatgctttttactttgctgggatgtttcgcatcaccaacattgagtttcttcccgaataccgacaaaaggagtccagggaatttctttcagtgtcacggactgtgcagcaagtgataaacctggtttatacaacatctgccttctccaaattttatgagcagtctgttgttgcagatgtcagcaacaacaaaggcggcctccttgtccacttttggattgtttttgtcatgccacgtgccaaaggccacatcttctgtgaagactgtgttgccgccatcttgaaggactccatccagacaagcatcataaaccggacctctgtggggagcttgcagggactggctgtggacatggactctgtggtactaaatgaagtcctggggctgactctcattgtctggattgactgacatgcctattcttgaaatgacttctttgactctgattggccagcctgggttatgtgcccacctctgaaactagggacaaaggctgctctcagtacttctatgcagagcatctgtctctccactacccgctggagatttctgcagcctcagggaggctgatgtgtcacttcaagctggtggccatagtgggctacctgattcgtctctcaatcaagtccatccaaatcgaagccgacaactgtgtcactgactccctgaccatttacgactcccttttgcccatccggagcagcatcttgtacagaatttgtgaacccacaagaacattaatgtcatttgtttctacaaataatctcatgttggtgacatttaagtctcctcatatacggaggctctcaggaatccgggcatattttgaggtcattccagaacaaaagtgtgaaaacacagtgttggtcaaagacatcactggctttgaagggaaaatttcaagcccatattacccgagctactatcctccaaaatgcaagtgtacctggaaatttcagacttctctatcaactcttggcatagcactgaaattctataactattcaataaccaagaagagtatgaaaggctgtgagcatggatggtgggaaattaatgagcacatgtactgtggctcctacatggatcatcagacaatttttcgagtgcccagccctctggttcacattcagctccagtgcagttcaaggctttcagacaagccacttttggcagaatatggcagttacaacatcagtcaaccctgccctgttggatcttttagatgctcctccggtttatgtgtccctcaggcccagcgttgtgatggagtaaatgactgctttgatgaaagtgatgaactgttttgcgtgagccctcaacctgcctgcaataccagctccttcaggcagcatggccctctcatctgtgatggcttcagggactgtgagaatggccgggatgagcaaaactgcactcaaagtattccatgcaacaacagaacttttaagtgtggcaatgatatttgctttaggaaacaaaatgcaaaatgtgatgggacagtggattgtccagatggaagtgatgaagaaggctgcacctgcagcaggagttcctccgcccttcaccgcatcatcggaggcacagacaccctggaggggggttggccgtggcaggtcagcctccactttgttggatctgcctactgtggtgcctcagtcatctccagggagtggcttctttctgcagcccactgttttcatggaaacaggctgtcagatcccacaccatggactgcacacctcgggatgtatgttcaggggaatgccaagtttgtctccccggtgagaagaattgtggtccacgagtactataacagtcagacttttgattatgatattgctttgctacagctcagtattgcctggcctgagaccctgaaacagctcattcagccaatatgcattcctcccactggtcagagagttcgcagtggggagaagtgctgggtaactggctgggggcgaagacacgaagcagataataaaggctccctcgttctgcagcaagcggaggtagagctcattgatcaaacgctctgtgtttccacctacgggatcatcacttctcggatgctctgtgcaggcataatgtcaggcaagagagatgcctgcaaaggagattcgggtggacctttatcttgtcgaagaaaaagtgatggaaaatggattttgactggcattgttagctggggacatggaagtggacgaccaaactttcctggtgtttacacaagggtgtcaaactttgttccctggattcataaatatgtcccttctcttttgtaattgtaccagttgtatttttactgtgatttatgttaaaaatagatactttaaaatgatgcagtaattggctgggtgcgctggctcacacctgtaatcccagcacgttgggaggccgaggcgggcagatcacgaggtcaggaggtcaagaccatcctggctaacatggtgaaaccctgtctctactg

SEQ ID NO: 193400 - DNA, 617 bp, Homo sapiens
  Payload ID: 18181
  Gene Name: transmembrane protease, serine 7
  ENST ID: ENST00000460599
  CDS Start-End: 70-617
atgaggaaaggtggtgagagagagggcacatcaaagacaatagtgctcagagcagcttttacttattgaatgcctgctatatactggataaacctggtttatacaacatctgccttctccaaattttatgagcagtctgttgttgcagatgtcagcagcaacaacaaaggcggcctccttgtccacttttggattgtttttgtcatgccacgtgccaaaggccacatcttctgtgaagactgtgttgccgccatcttgaaggactccatccagacaagcatcataaaccggacctctgtggggagcttgcagggactggctgtggacatggactctgtggtactaaatgctgggcttcggtcggattactcgtcaaccataggatctgacaaaggctgctctcagtacttctatgcagagcatctgtctctccactacccgctggagatttctgcagcctcagggaggctgatgtgtcacttcaagctggtggccatagtgggctacctgattcgtctctcaatcaagtccatccaaatcgaagccgacaactgtgtcactgactccctgaccatttacgactcccttttgcccatccggagcagcatcttgtacag

SEQ ID NO: 193401 - DNA, 2377 bp, Homo sapiens
  Payload ID: 18181
  Gene Name: transmembrane protease, serine 7
  Uniprot ID: Q7RTY8
  ENST ID: ENST00000617607
  CDS Start-End: 39-2192
gtaaaacagaaagcaaagatgctttttactttgctgggatgtttcgcatcaccaacattgagtttcttcccgaataccgacaaaaggagtccagggaatttctttcagtgtcacggactgtgcagcaagtgataaacctggtttatacaacatctgccttctccaaattttatgagcagtctgttgttgcagatgtcagcaacaacaaaggcggcctccttgtccacttttggattgtttttgtcatgccacgtgccaaaggccacatcttctgtgaagactgtgttgccgccatcttgaaggactccatccagacaagcatcataaaccggacctctgtggggagcttgcagggactggctgtggacatggactctgtggtactaaatgacaaaggctgctctcagtacttctatgcagagcatctgtctctccactacccgctggagatttctgcagcctcagggaggctgatgtgtcacttcaagctggtggccatagtgggctacctgattcgtctctcaatcaagtccatccaaatcgaagccgacaactgtgtcactgactccctgaccatttacgactcccttttgcccatccggagcagcatcttgtacagaatttgtgaacccacaagaacattaatgtcatttgtttctacaaataatctcatgttggtgacatttaagtctcctcatatacggaggctctcaggaatccgggcatattttgaggtcattccagaacaaaagtgtgaaaacacagtgttggtcaaagacatcactggctttgaagggaaaatttcaagcccatattacccgagctactatcctccaaaatgcaagtgtacctggaaatttcagacttctctatcaactcttggcatagcactgaaattctataactattcaataaccaagaagagtatgaaaggctgtgagcatggatggtgggaaattaatgagcacatgtactgtggctcctacatggatcatcagacaatttttcgagtgcccagccctctggttcacattcagctccagtgcagttcaaggctttcagacaagccacttttggcagaatatggcagttacaacatcagtcaaccctgccctgttggatcttttagatgctcctccggtttatgtgtccctcaggcccagcgttgtgatggagtaaatgactgctttgatgaaagtgatgaactgttttgcgtgagccctcaacctgcctgcaataccagctccttcaggcagcatggccctctcatctgtgatggcttcagggactgtgagaatggccgggatgagcaaaactgcactcaaagtattccatgcaacaacagaacttttaagtgtggcaatgatatttgctttaggaaacaaaatgcaaaatgtgatgggacagtggattgtccagatggaagtgatgaagaaggctgcacctgcagcaggagttcctccgcccttcaccgcatcatcggaggcacagacaccctggaggggggttggccgtggcaggtcagcctccactttgttggatctgcctactgtggtgcctcagtcatctccagggagtggcttctttctgcagcccactgttttcatggaaacaggctgtcagatcccacaccatggactgcacacctcgggatgtatgttcaggggaatgccaagtttgtctccccggtgagaagaattgtggtccacgagtactataacagtcagacttttgattatgatattgctttgctacagctcagtattgcctggcctgagaccctgaaacagctcattcagccaatatgcattcctcccactggtcagagagttcgcagtggggagaagtgctgggtaactggctgggggcgaagacacgaagcagataataaaggctccctcgttctgcagcaagcggaggtagagctcattgatcaaacgctctgtgtttccacctacgggatcatcacttctcggatgctctgtgcaggcataatgtcaggcaagagagatgcctgcaaaggagattcgggtggacctttatcttgtcgaagaaaaagtgatggaaaatggattttgactggcattgttagctggggacatggaagtggacgaccaaactttcctggtgtttacacaagggtgtcaaactttgttccctggattcataaatatgtcccttctcttttgtaattgtaccagttgtatttttactgtgatttatgttaaaaatagatactttaaaatgatgcagtaattggctgggtgcgctggctcacacctgtaatcccagcacgttgggaggccgaggcgggcagatcacgaggtcaggaggtcaagaccatcctggctaacatggtgaaaccctgtctctactg

SEQ ID NO: 193402 - DNA, 3331 bp, Homo sapiens
  Payload ID: 18182
  Gene Name: transmembrane protease, serine 9
  Uniprot ID: Q7Z410
  ENST ID: ENST00000332578
  CDS Start-End: 1-3180
atggagcccactgtggctgacgtacacctcgtgcccaggacaaccaaggaagtccccgctctggatgccgcgtgctgtcgagcggccagcattggcgtggtggccaccagccttgtcgtcctcaccctgggagtccttttggccttcctctctacacagggcttccacgtggaccacacggccgagctgcggggaatccggtggaccagcagtttgcggcgggagacctcggactatcaccgcacgctgacgcccaccctggaggcactgctgcactttctgctgcgacccctccagacgctgagcctgggcctggaggaggagctattgcagcgagggatccgggcaaggctgcgggagcacggcatctccctggctgcctatggcacaattgtgtcggctgagctcacagggagacataagggacccttggcagaaagagacttcaaatcaggccgctgtccagggaactccttttcctgcgggaacagccagtgtgtgaccaaggtgaacccggagtgtgacgaccaggaggactgctccgatgggtccgacgaggcgcactgcgagtgtggcttgcagcctgcctggaggatggccggcaggatcgtgggcggcatggaagcatccccgggggagtttccgtggcaagccagccttcgagagaacaaggagcacttctgtggggccgccatcatcaacgccaggtggctggtgtctgctgctcactgcttcaatgagttccaagacccgacgaagtgggtggcctacgtgggtgcgacctacctcagcggctcggaggccagcaccgtgcgggcccaggtggtccagatcgtcaagcaccccctgtacaacgcggacacggccgactttgacgtggctgtgctggagctgaccagccctctgcctttcggccggcacatccagcccgtgtgcctcccggctgccacacacatcttcccacccagcaagaagtgcctgatctcaggctggggctacctcaaggaggacttcctggtcaagccagaggtgctgcagaaagccactgtggagctgctggaccaggcactgtgtgccagcttgtacggccattcactcactgacaggatggtgtgcgctggctacctggacgggaaggtggactcctgccagggtgactcaggaggacccctggtctgcgaggagccctctggccggttctttctggctggcatcgtgagctggggaatcgggtgtgcggaagcccggcgtccaggggtctatgcccgagtcaccaggctacgtgactggatcctggaggccaccaccaaagccagcatgcctctggcccccaccatggctcctgcccctgccgcccccagcacagcctggcccaccagtcctgagagccctgtggtcagcacccccaccaaatcgatgcaggccctcagtaccgtgcctcttgactgggtcaccgttcctaagctacaagaatgtggggccaggcctgcaatggagaagcccacccgggtcgtgggcgggttcggagctgcctccggggaggtgccctggcaggtcagcctgaaggaagggtcccggcacttctgcggagcaactgtggtgggggaccgctggctgctgtctgccgcccactgcttcaaccacacgaaggtggagcaggttcgggcccacctgggcactgcgtccctcctgggcctgggcgggagcccggtgaagatcgggctgcggcgggtagtgctgcaccccctctacaaccctggcatcctggacttcgacctggctgtcctggagctggccagccccctggccttcaacaaatacatccagcctgtctgcctgcccctggccatccagaagttccctgtgggccggaagtgcatgatctccggatggggaaatacgcaggaaggaaatgccaccaagcccgagctcctgcagaaggcgtccgtgggcatcatagaccagaaaacctgtagtgtgctctacaacttctccctcacagaccgcatgatctgcgcaggcttcctggaaggcaaagtcgactcctgccagggtgactctgggggccccctggcctgcgaggaggcccctggcgtgttttatctggcagggatcgtgagctggggtattggctgcgctcaggttaagaagccgggcgtgtacacgcgcatcaccaggctaaagggctggatcctggagatcatgtcctcccagccccttcccatgtctcccccctcgaccacaaggatgctggccaccaccagccccaggacgacagctggcctcacagtcccgggggccacacccagcagacccacccctggggctgccagcagggtgacgggccaacctgccaactcaaccttatctgccgtgagcaccactgctaggggacagacgccatttccagacgccccggaggccaccacacacacccagctaccagactgtggcctggcgccggccgcgctcaccaggattgtgggcggcagcgcagcgggccgtggggagtggccgtggcaggtgagcctgtggctgcggcgccgggaacaccgttgcggggccgtgctggtggcagagaggtggctgctgtcggcggcgcactgcttcgacgtctacggggaccccaagcagtgggcggccttcctaggcacgccgttcctgagcggcgcggaggggcagctggagcgcgtggcgcgcatctacaagcacccgttctacaatctctacacgctcgactacgacgtggcgctgctggagctggcggggccggtgcgtcgcagccgcctggtgcgtcccatctgcctgcccgagcccgcgccgcgacccccggacggcacgcgctgcgtcatcaccggctggggctcggtgcgcgaaggaggctccatggcgcggcagctgcagaaggcggccgtgcgcctcctcagcgagcagacctgccgccgcttctacccagtgcagatcagcagccgcatgctgtgtgccggcttcccgcagggtggcgtggacagctgctcgggtgacgctgggggacccctggcctgcagggagccctctggacggtgggtgctaactggggtcactagctggggctatggctgtggccggccccacttcccaggtgtctatacccgggtggcagctgtgagaggctggataggacagcacatccaggagtgaccaccacgtgactgcccaggccgagactctacgtgaaagcaacaggagcagcaggccacccaacaccccaccccaccgtaccctacccaaggacgggtgtgggggggctgtgggtcatggggatgcattttggtaccaccctttgttccaa

SEQ ID NO: 193403 - DNA, 2568 bp, Homo sapiens
  Payload ID: 18182
  Gene Name: transmembrane protease, serine 9
  ENST ID: ENST00000613480
  CDS Start-End: 1-2568
atggagcccactgtggctgacgtacacctcgtgcccaggacaaccaaggaagtccccgctctggatgccgcgtgctgtcgagcggccagcattggcgtggtggccaccagccttgtcgtcctcaccctgggagtccttttggccttcctctctacacagggcttccacgtggaccacacggccgagctgcggggaatccggtggaccagcagtttgcggcgggagacctcggactatcaccgcacgctgacgcccaccctggaggcactgctgcactttctgctgcgacccctccagacgctgagcctgggcctggaggaggagctattgcagcgagggatccgggcaaggctgcgggagcacggcatctccctggctgcctatggcacaattgtgtcggctgagctcacagggagacataagggacccttggcagaaagagacttcaaatcaggccgctgtccagggaactccttttcctgcgggaacagccagtgtgtgaccaaggtgaacccggagtgtgacgaccaggaggactgctccgatgggtccgacgaggcgcactgcgagtgtggcttgcagcctgcctggaggatggccggcaggatcgtgggcggcatggaagcatccccgggggagtttccgtggcaagccagccttcgagagaacaaggagcacttctgtggggccgccatcatcaacgccaggtggctggtgtctgctgctcactgcttcaatgagttccaagacccgacgaagtgggtggcctacgtgggtgcgacctacctcagcggctcggaggccagcaccgtgcgggcccaggtggtccagatcgtcaagcaccccctgtacaacgcggacacggccgactttgacgtggctgtgctggagctgaccagccctctgcctttcggccggcacatccagcccgtgtgcctcccggctgccacacacatcttcccacccagcaagaagtgcctgatctcaggctggggctacctcaaggaggacttcctggtcaagccagaggtgctgcagaaagccactgtggagctgctggaccaggcactgtgtgccagcttgtacggccattcactcactgacaggatggtgtgcgctggctacctggacgggaaggtggactcctgccagggtgactcaggaggacccctggtctgcgaggagccctctggccggttctttctggctggcatcgtgagctggggaatcgggtgtgcggaagcccggcgtccaggggtctatgcccgagtcaccaggctacgtgactggatcctggaggccaccaccaaagccagcatgcctctggcccccaccatggctcctgcccctgccgcccccagcacagcctggcccaccagtcctgagagccctgtggtcagcacccccaccaaatcgatgcaggccctcagtaccgtgcctcttgactgggtcaccgttcctaagctacaagaatgtggggccaggcctgcaatggagaagcccacccgggtcgtgggcgggttcggagctgcctccggggaggtgccctggcaggtcagcctgaaggaagggtcccggcacttctgcggagcaactgtggtgggggaccgctggctgctgtctgccgcccactgcttcaaccacacgaaggtggagcaggttcgggcccacctgggcactgcgtccctcctgggcctgggcgggagcccggtgaagatcgggctgcggcgggtagtgctgcaccccctctacaaccctggcatcctggacttcgacctggctgtcctggagctggccagccccctggccttcaacaaatacatccagcctgtctgcctgcccctggccatccagaagttccctgtgggccggaagtgcatgatctccggatggggaaatacgcaggaaggaaatgccaccaagcccgagctcctgcagaaggcgtccgtgggcatcatagaccagaaaacctgtagtgtgctctacaacttctccctcacagaccgcatgatctgcgcaggcttcctggaaggcaaagtcgactcctgccagggtgactctgggggccccctggcctgcgaggaggcccctggcgtgttttatctggcagggatcgtgagctggggtattggctgcgctcaggttaagaagccgggcgtgtacacgcgcatcaccaggctaaagggctggatcctggagatcatgtcctcccagccccttcccatgtctcccccctcgaccacaaggatgctggccaccaccagccccaggacgacagctggcctcacagtcccgggggccacacccagcagacccacccctggggctgccagcagggtgacgggccaacctgccaactcaaccttatctgccgtgagcaccactgctaggggacagacgccatttccagacgccccggaggccaccacacacacccagctaccagactgtggcctggcgccggggaacaccgttgcggggccgtgctggtggcagagaggtggctgctgtcggcggcgcactgcttcgacgtctacggggaccccaagcagtgggcggccttcctag

SEQ ID NO: 193404 - DNA, 1747 bp, Homo sapiens
  Payload ID: 18183
  Gene Name: transmembrane protein 100
  Uniprot ID: Q9NV29
  ENST ID: ENST00000424486
  CDS Start-End: 304-708
ggaacagaggtagcctgaaagaagcaggaactccaggatcccaaaccagagcagaccctatagtaaagtatttttacatcttttcctttccccagaagagatccctaacctattgttttattgacagccttgctgttagaggctctttcccagaagttggacgaagaggctcaggcgttgctgtttcttgtcttccaagtcaagtggttactctggtaatggattgcctctctccgagctttcaccctggtgagactgtccagatctagtctgtaaacccagcttagaagcactgttgtaaaaatgactgaagagcccatcaaggagatcctgggagccccaaaggctcacatggcagcgacgatggagaagagccccaagagtgaagttgtgatcaccacagtccctctggtcagtgagattcagttgatggctgctacagggggtaccgagctctcctgctaccgctgcatcatcccctttgctgtggttgtcttcatcgccggcatcgtggtcaccgcggtggcttacagcttcaattcccatgggtctattatctccatctttggcctggttgttctgtcatctggactttttttactagcctccagtgccttgtgctggaaagtgagacaaaggagcaagaaagccaagagacgggagagtcaaacagctctcgtggcaaatcagagaagcttgtttgcttgagactgaatacgaccaaatgggccattgggcctggaaaacgtgctctgactttgtcacccaattcacccagaaccatggtgggagagaacagacttggcgttggagcagactggaagaatgggggtgggagggtggaggggcttctcctttgtgaggaatgactcatgtcttctttaacgacaaacttaaccctaagggctacttctgagactgaaaaatcagctttctatttacatgaaacactttgggggtcatgggagtgcacagcattagacagtatttggttcaccctgtaaagtagccaagaaaagatgagaaaaatcaagataggcctggcacactagacatttgcctccaaaagaaataacctacagtcttaagatgtatcataaaaatgttctgccaaggatctaaattaccttgggtttcgcatatgtctatgaaattctgtgataatttttttcaatacattgattcactggcgtctgttttcattttatacttttaataactcatcactggtggtactttatcttgaaaagtaatattttttatattttaacattggacagtgttagccagttgtaatgatgtatcagaagtaaagaaaaacccattaaagttatagctaatagatgctgttgggggttaaattaatagtaaaataatccaatatagcacttttgatgatttttatataaaagtcaactgtacatttcattcagaataataaatacttattgctgctaaaacttcttaaatggttgtttctgctatagttatttctattgcagttccaaattgccatcttcccttgtctcatttgcaagttctcaattgtatttctctcaaatggacaggttccttctttactggaggatttttgtttttatcatattggtttttcattacttctgaatagtcttaattacgtttactaaattctaaaggatttctgtgctattataattaggaaatcaacgtctttggtcaggaactttataatgtgctattaaatgtatattacatttttgtggaa

SEQ ID NO: 193405 - DNA, 720 bp, Homo sapiens
  Payload ID: 18183
  Gene Name: transmembrane protein 100
  ENST ID: ENST00000571679
  CDS Start-End: 333-720
cacttcagaccacaaatccccacctcattttcaatgaattttttgctgaactgtccacctaaagtgggtaataaaaagatcccagggagcaggttgcactgtgtttaatagtaacacaataaagatttgttggctgtcattcaatggagaagaacatcatttgttgctggccacttgccttgacattgattttgtgggcagccaatgggtgatagtttgcaaagaatgcatgttatgcccagcaagattggcggagtctgagttgctctttcaccctggtgagactgtccagatctagtctgtaaacccagcttagaagcactgttgtaaaaatgactgaagagcccatcaaggagatcctgggagccccaaaggctcacatggcagcgacgatggagaagagccccaagagtgaagttgtgatcaccacagtccctctggtcagtgagattcagttgatggctgctacagggggtaccgagctctcctgctaccgctgcatcatcccctttgctgtggttgtcttcatcgccggcatcgtggtcaccgcggtggcttacagcttcaattcccatgggtctattatctccatctttggcctggttgttctgtcatctggactttttttactagcctccagtgccttgtgctggaaagtgagacaaaggagcaagaaagccaagagacgggagagtcaaacagctctcgtggcaaatcaga

SEQ ID NO: 193406 - DNA, 1962 bp, Homo sapiens
  Payload ID: 18183
  Gene Name: transmembrane protein 100
  Uniprot ID: Q9NV29
  ENST ID: ENST00000575734
  CDS Start-End: 810-1214
cagttgcttctacaaaacccgtgaaagttctctgtccaaaagccttgttggtcccgcggtacatgcttcctgttcccagagagattcacccttgggctttcctatcagtcttccctaaagttggctgctcctgtgtcctgtcacataaaactgtgaaccgaggtctccgacttacgtcatgtcagtcacagcagggtgaggctccacaagtgtgagttctggcccctgctgctttcctttcaaatgcagtttacagtttattatggtattggacaccccatgctccttactgcattggctttgggtaagaaggagtgaaaattagtgtgcgaacctgaaaacctagaatttctgattgggactgaagaaaacctttgtgctgcagtcagtccccgagccagacgcctgtgactctcttcacatggaaatagatgactatccacagtaaaagcaaaattaaaaagtgacttgtgaaaaatatcctccatgctcctcttaccaagcctgcaacttaaaacctatggtttaaactgtgctttcaattatctggaggaggccagcactgatgagcccatcctgagccagtcattttaaggccagtgctacctaactgagacaaggctaatctggtcgccttgctgttagaggctctttcccagaagttggacgaagaggctcaggcgttgctgtttcttgtcttccaagtcaagtggttactctggtaatggattgcctctctccgagctttcaccctggtgagactgtccagatctagtctgtaaacccagcttagaagcactgttgtaaaaatgactgaagagcccatcaaggagatcctgggagccccaaaggctcacatggcagcgacgatggagaagagccccaagagtgaagttgtgatcaccacagtccctctggtcagtgagattcagttgatggctgctacagggggtaccgagctctcctgctaccgctgcatcatcccctttgctgtggttgtcttcatcgccggcatcgtggtcaccgcggtggcttacagcttcaattcccatgggtctattatctccatctttggcctggttgttctgtcatctggactttttttactagcctccagtgccttgtgctggaaagtgagacaaaggagcaagaaagccaagagacgggagagtcaaacagctctcgtggcaaatcagagaagcttgtttgcttgagactgaatacgaccaaatgggccattgggcctggaaaacgtgctctgactttgtcacccaattcacccagaaccatggtgggagagaacagacttggcgttggagcagactggaagaatgggggtgggagggtggaggggcttctcctttgtgaggaatgactcatgtcttctttaacgacaaacttaaccctaagggctacttctgagactgaaaaatcagctttctatttacatgaaacactttgggggtcatgggagtgcacagcattagacagtatttggttcaccctgtaaagtagccaagaaaagatgagaaaaatcaagataggcctggcacactagacatttgcctccaaaagaaataacctacagtcttaagatgtatcataaaaatgttctgccaaggatctaaattaccttgggtttcgcatatgtctatgaaattctgtgataatttttttcaatacattgattcactggcgtctgttttcattttatacttttaataactcatcactggtggtactttatcttgaaaagtaatattttttatattttaacattggacagtgttagccagttgtaatgatgtatcagaagtaaagaaaaacccattaaagttatagctaatagatgctgttgggggttaaattaatagtaaaataatccaatatagcacttttgatgatttttatataaaagtcaactgtacatttcattcagaataataaatacttattgctgct

SEQ ID NO: 193407 - DNA, 1536 bp, Homo sapiens
  Payload ID: 18184
  Gene Name: transmembrane protein 101
  Uniprot ID: Q96IK0
  ENST ID: ENST00000206380
  CDS Start-End: 26-799
ccgcagcggactgccctttcccaagatggcgtcgaagataggttcgagacggtggatgttgcagctgatcatgcagttgggttcggtgctgctcacacgctgccccttttggggctgcttcagccagctcatgctgtacgctgagagggctgaggcacgccggaagcccgacatcccagtgccttacctgtatttcgacatgggggcagccgtgctgtgcgctagtttcatgtcctttggcgtgaagcggcgctggttcgcgctgggggccgcactccaattggccattagcacctacgccgcctacatcgggggctacgtccactacggggactggctgaaggtccgtatgtactcgcgcacagttgccatcatcggcggctttcttgtgttggccagcggtgctggggagctgtaccgccggaaacctcgcagccgctccctgcagtccaccggccaggtgttcctgggtatctacctcatctgtgtggcctactcactgcagcacagcaaggaggaccggctggcgtatctgaaccatctcccaggaggggagctgatgatccagctgttcttcgtgctgtatggcatcctggccctggcctttctgtcaggctactacgtgaccctcgctgcccagatcctggctgtactgctgccccctgtcatgctgctcattgatggcaatgttgcttactggcacaacacgcggcgtgttgagttctggaaccagatgaagctccttggagagagtgtgggcatcttcggaactgctgtcatcctggccactgatggctgagttttatggcaagaggctgagatgggcacagggagccactgagggtcaccctgccttcctccttgctggcccagctgctgtttatttatgctttttggtctgtttgtttgatcttttgcttttttaaaattgttttttgcagttaagaggcagctcatttgtccaaatttctgggctcagcgcttgggagggcaggagccctggcactaatgctgtacaggtttttttcctgttaggagagctgaggccagctgcccactgagtctcctgtccctgagaagggagtatggcagggctgggatgcggctactgagagtgggagagtgggagacagaggaaggaagatggagattggaagtgagcaaatgtgaaaaattcctctttgaacctggcagatgcagctaggctctgcagtgctgtttggagactgtgagagggagtgcgtgtgttgacacatgtggatcaggcccaggaagggcacaggggctgagcactacagaagtcacatgggttctcagggtatgccaggggcagaaacagtaccggctctctgtcactcaccttgagagtagagcagaccctgttctgctctgggctgtgaaggggtggagcaggcagtggccagctttgcccttcctgctgtctctgtttctagctccatggttggcctggtgggggtggagttccctcccaaacaccagaccacacagtcctccaaaaataaacattttatatag

SEQ ID NO: 193408 - DNA, 593 bp, Homo sapiens
  Payload ID: 18184
  Gene Name: transmembrane protein 101
  ENST ID: ENST00000586174
  CDS Start-End: 583-593
aaaagagctagggtcctagattgtgccgaagcttcatgagacctctcctcgtctgtgcacggacgagtggccgactctggagcccaggctgttgtttcctagtctggtggtgaatccgccatagtctggtgagtgcagtgtccgactctcgagcccaggctgttgctgttgcttcccagtctggtggtgaatcctccatagtctgggacaaatatggccctgaaggctccatgagcagacgagaaggctggacttcgcaactgggtcaccttagatccggaactagagaatgacaccgttgtttccgggaggaaaaagaaaaagcgcttgacccggaagctgcgtgtcccatccccgcgcctgcttctctgactggggtgaggccgcagcggactgccctttcccaagatggcgtcgaagataggttcgagacggtggatgttgcagctgatcatgcagttgggttcggtgctgctcacacgctgccccttttggggctgcttcagccagctcatgctgtacgctgagagggctgaggcacgccggaagcccgacatcccagtgccttacctgtatttcgacatgggggcagc

SEQ ID NO: 193409 - DNA, 965 bp, Homo sapiens
  Payload ID: 18184
  Gene Name: transmembrane protein 101
  ENST ID: ENST00000587529
  CDS Start-End: 1-516
atggcgtcgaagataggttcgagacggtggatgttgcagctgatcatgcagttgggttcggtgctgctcacacgctgccccttttggggctgcttcagccagctcatgctgtacgctgagagggctgaggcacgccggaagcccgacatcccagtgccttacctgtatttcgacatgggggcagccgtgctgtgcgctagtttcatgtcctttggcgtgaagcggcgctggttcgcgctgggggccgcactccaattggccattagcacctacgccgcctacatcgggggctacgtccactacggggactggctgaaggtccgtatgtactcgcgcacagttgccatcatcggcggctttcttgtgttggccagcggtgctggggagctgtaccgccggaaacctcgcagccgctccctgcagtccaccggccaggtgttcctgggtatctacctcatctgtgtggtatgttgggggactgttggttggaggtgcctggctgggagtgaactgtgagtctaggcatggcagaaccccaggaaggtagacacagaacgaggccctgagtgcagttcctgatggcccagttccctgggaattgccctggccagcttctaggcctcaggggccctccaaatgcctgttgagaggcccttcctccaacagtgttgccacgaggtagactggccattaaatttcaaccctgagagccaggagaacaagatggggtgattctctcatggctccagcccccaaaggactagaaggggataaaggagaggtttggtgggggtcaggccccagctgggactctgccccctagagctgatgagagctctagggtagccacttatggttctccctggtgctaggggaggccagggtgactggagacatggacaggcgccaggccattaggtcttatcttaattaccgagtatatctctgtacagctctctgtgtgg

SEQ ID NO: 193410 - DNA, 682 bp, Homo sapiens
  Payload ID: 18184
  Gene Name: transmembrane protein 101
  ENST ID: ENST00000585950
  CDS Start-End: 392-682
ggacgagtggccgactctggagcccaggctgttgcttcccagactggtggtgaatcctccatagtctgactatttaatcagcaggcagatcaacaggccaaaatttccaccataactgcaaacttgaatgcggatgaatggattacaacatggtcaaaccttgcaatgagaggcattataatggacaaatatggccctgaaggctccatgagcagacgagaaggctggacttcgcaactgggtcaccttagatccggaactagagaatgacaccgttgtttccgggaggaaaaagaaaaagcgcttgacccggaagctgcgtgtcccatccccgcgcctgcttctctgactggggaagcccgacatcccagtgccttacctgtatttcgacatgggggcagccgtgctgtgcgctagtttcatgtcctttggcgtgaagcggcgctggttcgcgctgggggccgcactccaattggccattagcacctacgccgcctacatcgggggctacgtccactacggggactggctgaaggtccgtatgtactcgcgcacagttgccatcatcggcggctttcttgtgttggccagcggtgctggggagctgtaccgccggaaacctcgcagccgctccctgcagtccaccggccaggtgttcctgggtatctacctcatctgtgtg

SEQ ID NO: 193411 - DNA, 573 bp, Homo sapiens
  Payload ID: 18184
  Gene Name: transmembrane protein 101
  ENST ID: ENST00000590905
  CDS Start-End: 420-573
attacaaaagagctagggtcctagattgtgccgaagcttcatgagacctctcctcgtctgtgcacggacgagtggccgactctggagcccaggctgttgtttcctagtctggtggtgaatccgccatagtctggtgagtgcagtgtccgactctcgagcccaggctgttgctgttgcttcccagtctggtggtgaatcctccatagtctgggacaaatatggccctgaaggctccatgagcagacgagaaggctggacttcgcaactgggtcaccttagatccggaactagagaatgacaccgttgtttccgggaggaaaaagaaaaagcgcttgacccggaagctgcgtgtcccatccccgcgcctgcttctctgactggggaagcccgacatcccagtgccttacctgtatttcgacatgggggcagccgtgctgtgcgctagtttcatgtcctttggcgtgaagcggcgctggttcgcgctgggggccgcactccaattggccattagcacctacgccgcctacatcgggggctacgtccactacggggactggctgaaggtccgtatgt

SEQ ID NO: 193412 - DNA, 1830 bp, Homo sapiens
  Payload ID: 18184
  Gene Name: transmembrane protein 101
  Uniprot ID: Q96IK0
  ENST ID: ENST00000589334
  CDS Start-End: 317-1090
ccagactgcgccgaagcttcatgagacctctcctcgtctgtgcacggacgagtggccgactctggagcccaggctgttgcttcccagactggtggtgaatcctccatagtctgggacaaatatggccctgaaggctccatgagcagacgagaaggctggacttcgcaactgggtcaccttagatccggaactagagaatgacaccgttgtttccgggaggaaaaagaaaaagcgcttgacccggaagctgcgtgtcccatccccgcgcctgcttctctgactggggtgaggccgcagcggactgccctttcccaagatggcgtcgaagataggttcgagacggtggatgttgcagctgatcatgcagttgggttcggtgctgctcacacgctgccccttttggggctgcttcagccagctcatgctgtacgctgagagggctgaggcacgccggaagcccgacatcccagtgccttacctgtatttcgacatgggggcagccgtgctgtgcgctagtttcatgtcctttggcgtgaagcggcgctggttcgcgctgggggccgcactccaattggccattagcacctacgccgcctacatcgggggctacgtccactacggggactggctgaaggtccgtatgtactcgcgcacagttgccatcatcggcggctttcttgtgttggccagcggtgctggggagctgtaccgccggaaacctcgcagccgctccctgcagtccaccggccaggtgttcctgggtatctacctcatctgtgtggcctactcactgcagcacagcaaggaggaccggctggcgtatctgaaccatctcccaggaggggagctgatgatccagctgttcttcgtgctgtatggcatcctggccctggcctttctgtcaggctactacgtgaccctcgctgcccagatcctggctgtactgctgccccctgtcatgctgctcattgatggcaatgttgcttactggcacaacacgcggcgtgttgagttctggaaccagatgaagctccttggagagagtgtgggcatcttcggaactgctgtcatcctggccactgatggctgagttttatggcaagaggctgagatgggcacagggagccactgagggtcaccctgccttcctccttgctggcccagctgctgtttatttatgctttttggtctgtttgtttgatcttttgcttttttaaaattgttttttgcagttaagaggcagctcatttgtccaaatttctgggctcagcgcttgggagggcaggagccctggcactaatgctgtacaggtttttttcctgttaggagagctgaggccagctgcccactgagtctcctgtccctgagaagggagtatggcagggctgggatgcggctactgagagtgggagagtgggagacagaggaaggaagatggagattggaagtgagcaaatgtgaaaaattcctctttgaacctggcagatgcagctaggctctgcagtgctgtttggagactgtgagagggagtgcgtgtgttgacacatgtggatcaggcccaggaagggcacaggggctgagcactacagaagtcacatgggttctcagggtatgccaggggcagaaacagtaccggctctctgtcactcaccttgagagtagagcagaccctgttctgctctgggctgtgaaggggtggagcaggcagtggccagctttgcccttcctgctgtctctgtttctagctccatggttggcctggtgggggtggagttccctcccaaacaccagaccacacagtcctccaaaaataaacattttatatagaca

SEQ ID NO: 193413 - DNA, 576 bp, Homo sapiens
  Payload ID: 18184
  Gene Name: transmembrane protein 101
  ENST ID: ENST00000592127
  CDS Start-End: 311-576
gaagcttcatgagacctctcctcgtctgtgcacggacgagtggccgactctggagcccaggctgttgcttcccagactggtggtgaatcctccatagtctgggacaaatatggccctgaaggctccatgagcagacgagaaggctggacttcgcaactgggtcaccttagatccggaactagagaatgacaccgttgtttccgggaggaaaaagaaaaagcgcttgacccggaagctgcgtgtcccatccccgcgcctgcttctctgactggggaagcccgacatcccagtgccttacctgtatttcgacatgggggcagccgtgctgtgcgctagtttcatgtcctttggcgtgaagcggcgctggttcgcgctgggggccgcactccaattggccattagcacctacgccgcctacatcgggggctacgtccactacggggactggctgaaggtccgtatgtactcgcgcacagttgccatcatcggcggctttcttgtgttggccagcggtgctggggagctgtaccgccggaaacctcgcagccgctccctgcagtccaccggccaggtgtt

SEQ ID NO: 193414 - DNA, 1973 bp, Homo sapiens
  Payload ID: 18185
  Gene Name: transmembrane protein 102
  Uniprot ID: Q8N9M5
  ENST ID: ENST00000323206
  CDS Start-End: 274-1800
gtgggcatcaggaagaagtaacctgttgaatctatttctgctccccacccttactgcttcccataagggggaagccgcagactaataagcctcttccaaaaaagaggtaaagggaggtagacaaggggcggcagcggaggctggctactgcattccgtaggaggagccaacagttactttttacctgctgagtccggtgaaccagttcatgggggcggggacctgcctatgagaaaagggccaggatagaagagcccaaagcgatagaaccgcatggcttccgcagtctgggggagtgccccctggtggggcccgccgcccccggccccagctcggccgctcacggacatcgacttctgctccggggcgcagctgcaggaattgacccagctgatccaggagctgggtgtgcaggagagctggagtgacgggcccaagccgggagccgatctcctccgggccaaggactttgtcttctctttgcttggtctagttcaccgccgggaccctcgctttcctccccaggcagagctcttgctgcttcgtggtgggattcgcgagggctccctggatctggggcatgcacccctgggtccctacgcccggggacctcactacgatgccggcttcacactcctagtgcccatgttttcactggacggcactgaactgcaactggacctggaatcctgttacgcacaggtctgcctcccagagatggtgtgcggaacccccatccgggagatgtggcaggattgcttaggacccccagtcccaggagcacgtgattcgatccaccgaacggagagcgaagaaagttccaaggactggcaaagctctgtagaccagccgcacagctacgtcactgagcacgaggcgccggtgtctttggaaaaatcgcctagtgacgtttcagcgtccgagtcgcctcagcatgacgtcgtcgaccttggctctaccgcacctttgaaaacaatgagtagtgacgtcaccaaggcagccgtcgaaagcccagtcccaaagccgtcggaggctcgggaagcgtggcccacattatgttccgcccaggtggctgcctggttctttgctacgctggcggcggtcgccgagtctctgatccctgtcccgggtgctccgcgtctggtgcacgcagctcgccacgcgggtttcaccaccgtcctcctggctacccctgagccccctcgccgcctcctgctcttcgacctgatcccagtggtgtccgtggcgggctggcccgagggggctcggagccactcgtgggccggtccgctggcctctgagtcggcttccttctacctggtgcccggtggcggcaccgagcggccgtgcgcctccgcctggcagctctgttttgcccgccaggagctggcgctcaaagcgcgcataccagcgccgctgctgcaggcgcacgcggcggcccaggcgctactgcgcccgctggtggccgggacccgggcggcggcgccctacctcctgcggacgctgctgtactgggcgtgcgagcggctgcctgcgctctacctggcgcggccagaaaatgcgggcgcctgctgcctcgggctgctagacgagctcggccgagtgctcgaggccgggacgttgcctcactattttctgaacggccgacagctccgtacgggggacgactccgctgcgctgctcggagaattggcccggctccgcggggacccggcccgggccctccgtgccgcggtggaggaggccaaagtggcccgcaaggggggcggtttggcgggcgtggggggcggggcccattaaagacgctgttcctaccagtggaaagtgcctctgtgggcgagcgggacgtggggggccctgctcgcccctcgccagggggactgactgtgtgccctgggcctgaagccccccttctggaagacctccctgttggttcctcctctacgcccacccgcctgcccccgcacaagttg

SEQ ID NO: 193415 - DNA, 1962 bp, Homo sapiens
  Payload ID: 18185
  Gene Name: transmembrane protein 102
  Uniprot ID: Q8N9M5
  ENST ID: ENST00000396568
  CDS Start-End: 419-1945
gaagaagtaacctgttgaatctatttctgctccccacccttactgcttcccataagggggaagccgcagactaataagcctcttccaaaaaagaggtaaagggaggtagacaaggggcggcagcggaggctggctactgcattccgtaggaggagccaacagttactttttacctgctgagtccggtgaaccagttcatgggggcggggacctgcctatgagaaaagggccaggatagaagaggtatttatttgttcattttgaggactaaatttagaacccatcatctacagacccatttgtaggttgtgtctggggcactcgctcggcctcaggaagagggaagaacggggacgactttgtggcagcaaagccacctcccttccgtgttttccgcagcccaaagcgatagaaccgcatggcttccgcagtctgggggagtgccccctggtggggcccgccgcccccggccccagctcggccgctcacggacatcgacttctgctccggggcgcagctgcaggaattgacccagctgatccaggagctgggtgtgcaggagagctggagtgacgggcccaagccgggagccgatctcctccgggccaaggactttgtcttctctttgcttggtctagttcaccgccgggaccctcgctttcctccccaggcagagctcttgctgcttcgtggtgggattcgcgagggctccctggatctggggcatgcacccctgggtccctacgcccggggacctcactacgatgccggcttcacactcctagtgcccatgttttcactggacggcactgaactgcaactggacctggaatcctgttacgcacaggtctgcctcccagagatggtgtgcggaacccccatccgggagatgtggcaggattgcttaggacccccagtcccaggagcacgtgattcgatccaccgaacggagagcgaagaaagttccaaggactggcaaagctctgtagaccagccgcacagctacgtcactgagcacgaggcgccggtgtctttggaaaaatcgcctagtgacgtttcagcgtccgagtcgcctcagcatgacgtcgtcgaccttggctctaccgcacctttgaaaacaatgagtagtgacgtcaccaaggcagccgtcgaaagcccagtcccaaagccgtcggaggctcgggaagcgtggcccacattatgttccgcccaggtggctgcctggttctttgctacgctggcggcggtcgccgagtctctgatccctgtcccgggtgctccgcgtctggtgcacgcagctcgccacgcgggtttcaccaccgtcctcctggctacccctgagccccctcgccgcctcctgctcttcgacctgatcccagtggtgtccgtggcgggctggcccgagggggctcggagccactcgtgggccggtccgctggcctctgagtcggcttccttctacctggtgcccggtggcggcaccgagcggccgtgcgcctccgcctggcagctctgttttgcccgccaggagctggcgctcaaagcgcgcataccagcgccgctgctgcaggcgcacgcggcggcccaggcgctactgcgcccgctggtggccgggacccgggcggcggcgccctacctcctgcggacgctgctgtactgggcgtgcgagcggctgcctgcgctctacctggcgcggccagaaaatgcgggcgcctgctgcctcgggctgctagacgagctcggccgagtgctcgaggccgggacgttgcctcactattttctgaacggccgacagctccgtacgggggacgactccgctgcgctgctcggagaattggcccggctccgcggggacccggcccgggccctccgtgccgcggtggaggaggccaaagtggcccgcaaggggggcggtttggcgggcgtggggggcggggcccattaaagacgctgttcctacca

SEQ ID NO: 193416 - DNA, 4745 bp, Homo sapiens
  Payload ID: 18186
  Gene Name: transmembrane protein 104
  Uniprot ID: Q8NE00
  ENST ID: ENST00000335464
  CDS Start-End: 163-1653
ggcgcatgcgcgctgcggaagctggtgctggacagctggcgccggcagcagcggaccggcgggagacggcggcttgggagctggctgtgctgcaggagctgcggcagccgccgtccttgcacctaaggaacctctgctgccagcccttcctcacttttggaaatggcgggtgaaattacagagaccggggaactctactcttcctacgttgggctggtgtacatgtttaacctcatcgtgggcacgggcgcactcaccatgcccaaggcattcgccactgccgggtggcttgtcagcctcgtcctgctggtgttcctgggcttcatgagcttcgtgaccaccacctttgtgatagaggccatggctgcagccaacgcgcagctccactggaagaggatggagaacctcaaggaggaggaagatgacgactcctccacagcctcagacagcgatgttctcatccgggacaactacgagcgggcagagaagcggcccatcctgtctgtgcagagacgtggatctcccaacccgtttgaaatcacagaccgggtggaaatgggacaaatggcctccatgttcttcaataaagtgggggtcaacttgttctatttctgcatcatcgtttacctgtatggagacctcgccatctatgctgctgccgtgcccttctccctcatgcaggtgacctgcagcgccactggcaatgactcctgcggtgtggaagcagacaccaaatacaatgacactgaccggtgctgggggcccctgcgccgagtggacgcctaccgcatctacttggcgatcttcactctcctcctcggaccgttcaccttctttgacgtccagaagaccaagtacctgcagatcctgacctctctgatgagatggatcgctttcgccgtcatgattgtgctggccctgatccgcatcgggcacggacaaggggaggggcacccgcccctggctgacttctcgggggtccggaacctgtttggggtgtgcgtctactccttcatgtgccagcactctctgccatccctcattacccccgtctcctccaagcgccacctcacaaggctggtgttcctggactacgtgctgatcctggccttctacggcctcctctccttcaccgccatcttctgcttccgcggcgacagcctcatggacatgtacaccctcaacttcgcgcgctgtgacgtcgtgggcctggccgctgtgcgctttttcctgggcctcttccccgtcttcaccatcagcaccaacttccccatcattgccgtgaccctgcgcaacaactggaagacactcttccaccgcgagggcggcacgtacccgtgggtggtggaccgcgtcgtgtttcccaccatcaccctggtgccgcctgtgctggtggccttctgcacccacgacctggagtccctggtgggcatcacaggggcctacgcgggcaccggcatccagtacgtcatccccgccttcctggtgtaccactgccgcagggacacccagctggcctttggctgtggggtcagcaacaagcacaggtcccctttccgccacaccttctgggtgggcttcgtgctgctctgggctttctcctgcttcattttcgtcacggccaatatcatcctcagcgagaccaagctctgatggcaggacaggcaggtctagtgacaggaggcataggggccccagccccacccctcgcccgcagagcccagatttagttgctcccaggtcttcatggggcaggtgggactgtggctctaggggaaaccccctgtccagctggggttgttctccccacccaccttccacccagtctgcacctgtcctcactcccccgggcagctctcccaccaggtccttctgcctgggtgacgcgtggctgctcccaagttctaagactcattactggaatcacacctctcccacatcttccaacacgcttcacccccaaccctacttccagggcgggctactccctgcacaatgggagatgcagtgctggcactgccatcatttgtcccagacccatgcccctcccctctcctgccccatcctgcgtccttgtctaagaaacctccactagcagctgctgcctcttcagaggcgaatcccaggctggaagtatcctagccaggtctgcctgtgacggcagggcccaccctcccaccaggcctgggaggcggtaggtgccacctcagagagggcctggctggccccatgacaagaacaagaagtgctaactggtaccagagtccccagatagagctgcgagggccctcgctgtgggcgcgagctccggagtagcaggctggatggagcatcccttctacagggacacagccgcctgccagctgggcctaaagtctggagcttgtctctgaaagggaccgtctgctgccctcgctgccccactggagccctcagggcctcctacagtgcaggtggtcctactagagggaagccatccccacctggcacctcagcggcttggcagtgacatggcagtgggagggctctgaggttcccaccctgacaatggtcaggctgcccgtgctcccactccaacactaaaagcggctcccttaggggctgagcgtgggtgctcagtgttcacgctatatcccttgggcaatgtggggttggatggggcccccacttccattcccatggaaggaggccaggtccccagccacctcccactcagccatgcacgcacttgctgggctggcctcctgggaaacacaggtgactcgaatgaactctgcattttcaacgtgccttctactgcttcaggacctgggggtccccctgaccctcactggcttgcccccagccctgggcctggccccacctgtcctggagcccagagcccctggcctggagctacctctctggggtgggtctcaggccccacccctccctcttttgagttcagtgccttgctcagcccctcccctgtatctcagcgtcttcagacctctgacagagcgacgatgtagggtctcccggggcccaaggtggtctcagggtcaggggtgggatttgcagggaactcggggagcccacgggctgcgccacctctgccctggcagctgaagcctgggagagtccctgcgtggtgtaattggcctcagcccgctttctctgtgccgtcgcacctcagtgtttctcatagcttgtccccacgtgtcactttccatccacgggaaaaacaaatgccccttctccatctatcattgcgacttcctcccaggaggcctctcaggttgggtagagcaggggcctgcagtggtcaggccaagagcaaggaagacctggctgccccactgtggctgaaaactcaaaacatctggaactacccttctccaattacgttccctcttgcttaaagacaaagctaattaaatcatcctgccacccgaggctccaaaccaaatcttggacgcaaattcattagcttcataaagcccaggttgatttatgtgacagtctggaaccgcccagccatggagtcggtggccgtgttccctgccctggagggaactggccagcagtgaccacatcgctgatgccaagtggggaccctcaccactgccgttgtctagctgctttgctcctcagtgtcctcctgctgtaagtcagatgaggtcaccttcctctccatcgatgccaggcttctgccgctgacggccaatggggcttggggccaggggcagagaaccccaacagcaagagagccccaggtgatgctggctctccacgtgcatccggcacgtttcactgcagccatcatcaacttggcaaagtaggcaagctcagcttgtggtttccattttgcagatgggcccccggggtcagtgatgggaagagcagaagaggatgccagcccagcctggcccaggagcaggtgtcgttgtggaggaaagcttaaactcaacagcctctacccaacatctgccacctgcatggccccagatgcccccggtgcaggccaggtcaaggtgggagtaaactttctttgcctccctccccacagaagcaccagacccacctgagccccagagcctcatgccagcagctcctggctgttcctcacctgaggctagagcagcagctgccagcttatagatggggcggatggcaggtgatagactgggaagcactgctgggtggtggaggtgggcagtggcaccatgacgggcccctagccacacagctgtcctcactacggggcagggagcagcctcggcaacaggcaaaggccagagtcagagtggtggggaggacaggggctgctgccccgctcctggaaagccactgcagaggggcagtggctggcagtgccaggcctgggggaagtggaagcgtcctgtctgggggcagattcccaagcaagggtgacccatggttaagggccactggaaagctggagagagcttgggatcccttccacctggggccaatggtgttgattgcagactggaggggtaacctccgctgagggtcattatgtgccaggcatggcattgggtactttctgcattgggaccaggcagccgggcctgccatttgaggcagcgagcctccgtgacctgtcctccctcatttgtaaagtggggtaacagctatgtcactggccagttgtggggattaaagtgctgagcttagtgcccagcccaaaatgctcaataaagctattcagtgatacctgtttcccacatcactcaccagcc

SEQ ID NO: 193417 - DNA, 1781 bp, Homo sapiens
  Payload ID: 18186
  Gene Name: transmembrane protein 104
  ENST ID: ENST00000417024
  CDS Start-End: 147-1130
ggaagctggtgctggacagctggcgccggcagcagcggaccggcgggagacggcggcttgggagctggctgtgctgcaggagctgcggcagccgccgtccttgcacctaaggaacctctgctgccagcccttcctcacttttggaaatggcgggtgaaattacagagaccggggaactctactcttcctacgtgtttgtcagagtggtcaagccaaacaaaatcgccatgctgtttataatgttaatcccgggctgggcacggtggctcacgcctgtaatcccagcactttgggaggctgaagcgggcagatcacctgaggtcaggagttcaagaccagcctggccaacatgcttcgtgaccaccacctttgtgatagaggccatggctgcagccaacgcgcagctccactggaagaggatggagaacctcaaggaggaggaagatgacgactcctccacagcctcagacagcgatgttctcatccgggacaactacgagcgggcagagaagcggcccatcctgtctgtgcagagacgtggatctcccaacccgtttgaaatcacagaccgggtggaaatgggacaaatggcctccatgttcttcaataaagtgggggtcaacttgttctatttctgcatcatcgtttacctgtatggagacctcgccatctatgctgctgccgtgcccttctccctcatgcaggtgacctgcagcgccactggcaatgactcctgcggtgtggaagcagacaccaaatacaatgacactgaccggtgctgggggcccctgcgccgagtggacgcctaccgcatctacttggcgatcttcactctcctcctcggaccgttcaccttctttgacgtccagaagaccaagtacctgcagatcctgacctctctgatgagatggatcgatgggcccccggggtcagtgatgggaagagcagaagaggatgccagcccagcctggcccaggagcaggtgtcgttgtggaggaaagcttaaactcaacagcctctacccaacatctgccacctgcatggccccagatgcccccggtgcaggccaggtcaaggtgggagtaaactttctttgcctccctccccacagaagcaccagacccacctgagccccagagcctcatgccagcagctcctggctgttcctcacctgaggctagagcagcagctgccagcttatagatggggcggatggcaggtgatagactgggaagcactgctgggtggtggaggtgggcagtggcaccatgacgggcccctagccacacagctgtcctcactacggggcagggagcagcctcggcaacaggcaaaggccagagtcagagtggtggggaggacaggggctgctgccccgctcctggaaagccactgcagaggggcagtggctggcagtgccaggcctgggggaagtggaagcgtcctgtctgggggcagattcccaagcaagggtgacccatggttaagggccactggaaagctggagagagcttgggatcccttccacctggggccaatggtgttgattgcagactggaggggtaacctccgctgagggtcattatgtgccaggcatggcattgggtactttctgcattgggaccaggcagccgggcctgccatttgaggcagcgagcctccgtgacctgtcctccctcatttgtaaagtggggtaacagctatgtcactggccagttgtggggattaaagtgctgagcttagtgcccagcccaaaatgctcaataaagctattcagtgat

SEQ ID NO: 193418 - DNA, 4679 bp, Homo sapiens
  Payload ID: 18186
  Gene Name: transmembrane protein 104
  Uniprot ID: Q8NE00
  ENST ID: ENST00000582330
  CDS Start-End: 123-1613
ggcgccggcagcagcggaccggcgggagacggcggcttgggagctggctgtgctgcagctgcggcagccgccgtccttgcacctaaggaacctctgctgccagcccttcctcacttttggaaatggcgggtgaaattacagagaccggggaactctactcttcctacgttgggctggtgtacatgtttaacctcatcgtgggcacgggcgcactcaccatgcccaaggcattcgccactgccgggtggcttgtcagcctcgtcctgctggtgttcctgggcttcatgagcttcgtgaccaccacctttgtgatagaggccatggctgcagccaacgcgcagctccactggaagaggatggagaacctcaaggaggaggaagatgacgactcctccacagcctcagacagcgatgttctcatccgggacaactacgagcgggcagagaagcggcccatcctgtctgtgcagagacgtggatctcccaacccgtttgaaatcacagaccgggtggaaatgggacaaatggcctccatgttcttcaataaagtgggggtcaacttgttctatttctgcatcatcgtttacctgtatggagacctcgccatctatgctgctgccgtgcccttctccctcatgcaggtgacctgcagcgccactggcaatgactcctgcggtgtggaagcagacaccaaatacaatgacactgaccggtgctgggggcccctgcgccgagtggacgcctaccgcatctacttggcgatcttcactctcctcctcggaccgttcaccttctttgacgtccagaagaccaagtacctgcagatcctgacctctctgatgagatggatcgctttcgccgtcatgattgtgctggccctgatccgcatcgggcacggacaaggggaggggcacccgcccctggctgacttctcgggggtccggaacctgtttggggtgtgcgtctactccttcatgtgccagcactctctgccatccctcattacccccgtctcctccaagcgccacctcacaaggctggtgttcctggactacgtgctgatcctggccttctacggcctcctctccttcaccgccatcttctgcttccgcggcgacagcctcatggacatgtacaccctcaacttcgcgcgctgtgacgtcgtgggcctggccgctgtgcgctttttcctgggcctcttccccgtcttcaccatcagcaccaacttccccatcattgccgtgaccctgcgcaacaactggaagacactcttccaccgcgagggcggcacgtacccgtgggtggtggaccgcgtcgtgtttcccaccatcaccctggtgccgcctgtgctggtggccttctgcacccacgacctggagtccctggtgggcatcacaggggcctacgcgggcaccggcatccagtacgtcatccccgccttcctggtgtaccactgccgcagggacacccagctggcctttggctgtggggtcagcaacaagcacaggtcccctttccgccacaccttctgggtgggcttcgtgctgctctgggctttctcctgcttcattttcgtcacggccaatatcatcctcagcgagaccaagctctgatggcaggacaggcaggtctagtgacaggaggcataggggccccagccccacccctcgcccgcagagcccagatttagttgctcccaggtcttcatggggcaggtgggactgtggctctaggggaaaccccctgtccagctggggttgttctccccacccaccttccacccagtctgcacctgtcctcactcccccgggcagctctcccaccaggtccttctgcctgggtgacgcgtggctgctcccaagttctaagactcattactggaatcacacctctcccacatcttccaacacgcttcacccccaaccctacttccagggcgggctactccctgcacaatgggagatgcagtgctggcactgccatcatttgtcccagacccatgcccctcccctctcctgccccatcctgcgtccttgtctaagaaacctccactagcagctgctgcctcttcagaggcgaatcccaggctggaagtatcctagccaggtctgcctgtgacggcagggcccaccctcccaccaggcctgggaggcggtaggtgccacctcagagagggcctggctggccccatgacaagaacaagaagtgctaactggtaccagagtccccagatagagctgcgagggccctcgctgtgggcgcgagctccggagtagcaggctggatggagcatcccttctacagggacacagccgcctgccagctgggcctaaagtctggagcttgtctctgaaagggaccgtctgctgccctcgctgccccactggagccctcagggcctcctacagtgcaggtggtcctactagagggaagccatccccacctggcacctcagcggcttggcagtgacatggcagtgggagggctctgaggttcccaccctgacaatggtcaggctgcccgtgctcccactccaacactaaaagcggctcccttaggggctgagcgtgggtgctcagtgttcacgctatatcccttgggcaatgtggggttggatggggcccccacttccattcccatggaaggaggccaggtccccagccacctcccactcagccatgcacgcacttgctgggctggcctcctgggaaacacaggtgactcgaatgaactctgcattttcaacgtgccttctactgcttcaggacctgggggtccccctgaccctcactggcttgcccccagccctgggcctggccccacctgtcctggagcccagagcccctggcctggagctacctctctggggtgggtctcaggccccacccctccctcttttgagttcagtgccttgctcagcccctcccctgtatctcagcgtcttcagacctctgacagagcgacgatgtagggtctcccggggcccaaggtggtctcagggtcaggggtgggatttgcagggaactcggggagcccacgggctgcgccacctctgccctggcagctgaagcctgggagagtccctgcgtggtgtaattggcctcagcccgctttctctgtgccgtcgcacctcagtgtttctcatagcttgtccccacgtgtcactttccatccacgggaaaaacaaatgccccttctccatctatcattgcgacttcctcccaggaggcctctcaggttgggtagagcaggggcctgcagtggtcaggccaagagcaaggaagacctggctgccccactgtggctgaaaactcaaaacatctggaactacccttctccaattacgttccctcttgcttaaagacaaagctaattaaatcatcctgccacccgaggctccaaaccaaatcttggacgcaaattcattagcttcataaagcccaggttgatttatgtgacagtctggaaccgcccagccatggagtcggtggccgtgttccctgccctggagggaactggccagcagtgaccacatcgctgatgccaagtggggaccctcaccactgccgttgtctagctgctttgctcctcagtgtcctcctgctgtaagtcagatgaggtcaccttcctctccatcgatgccaggcttctgccgctgacggccaatggggcttggggccaggggcagagaaccccaacagcaagagagccccaggtgatgctggctctccacgtgcatccggcacgtttcactgcagccatcatcaacttggcaaagtaggcaagctcagcttgtggtttccattttgcagatgggcccccggggtcagtgatgggaagagcagaagaggatgccagcccagcctggcccaggagcaggtgtcgttgtggaggaaagcttaaactcaacagcctctacccaacatctgccacctgcatggccccagatgcccccggtgcaggccaggtcaaggtgggagtaaactttctttgcctccctccccacagaagcaccagacccacctgagccccagagcctcatgccagcagctcctggctgttcctcacctgaggctagagcagcagctgccagcttatagatggggcggatggcaggtgatagactgggaagcactgctgggtggtggaggtgggcagtggcaccatgacgggcccctagccacacagctgtcctcactacggggcagggagcagcctcggcaacaggcaaaggccagagtcagagtggtggggaggacaggggctgctgccccgctcctggaaagccactgcagaggggcagtggctggcagtgccaggcctgggggaagtggaagcgtcctgtctgggggcagattcccaagcaagggtgacccatggttaagggccactggaaagctggagagagcttgggatcccttccacctggggccaatggtgttgattgcagactggaggggtaacctccgctgagggtcattatgtgccaggcatggcattgggtactttctgcattgggaccaggcagccgggcctgccatttgaggcagcgagcctccgtgacctgtcctccctcatttgtaaagtggggtaacagctatgtcactggccagttgtggggattaaagtgctgagcttagtgcccagcccaaaatgctcaataaagctattcagtgata

SEQ ID NO: 193419 - DNA, 1740 bp, Homo sapiens
  Payload ID: 18186
  Gene Name: transmembrane protein 104
  Uniprot ID: Q8NE00
  ENST ID: ENST00000582773
  CDS Start-End: 146-1090
gaagctggtgctggacagctggcgccggcagcagcggaccggcgggagacggcggcttgggagctggctgtgctgcaggagctgcggcagccgccgtccttgcacctaaggaacctctgctgccagcccttcctcacttttggaaatggcgggtgaaattacagagaccggggaactctactcttcctacgttgggctggtgtacatgtttaacctcatcgtgggcacgggcgcactcaccatgcccaaggcattcgccactgccgggtggcttgtcagcctcgtcctgctggtgttcctgggcttcatgagcttcgtgaccaccacctttgtgatagaggccatggctgcagccaacgcgcagctccactggaagaggatggagaacctcaaggaggaggaagatgacgactcctccacagcctcagacagcgatgttctcatccgggacaactacgagcgggcagagaagcggcccatcctgtctgtgcagagacgtggatctcccaacccgtttgaaatcacagaccgggtggaaatgggacaaatggcctccatgttcttcaataaagtgggggtcaacttgttctatttctgcatcatcgtttacctgtatggagacctcgccatctatgctgctgccgtgcccttctccctcatgcaggtgacctgcagcgccactggcaatgactcctgcggtgtggaagcagacaccaaatacaatgacactgaccggtgctgggggcccctgcgccgagtggacgcctaccgcatctacttggcgatcttcactctcctcctcggaccgttcaccttctttgacgtccagaagaccaagtacctgcagatcctgacctctctgatgagatggatcgatgggcccccggggtcagtgatgggaagagcagaagaggatgccagcccagcctggcccaggagcaggtgtcgttgtggaggaaagcttaaactcaacagcctctacccaacatctgccacctgcatggccccagatgcccccggtgcaggccaggtcaaggtgggagtaaactttctttgcctccctccccacagaagcaccagacccacctgagccccagagcctcatgccagcagctcctggctgttcctcacctgaggctagagcagcagctgccagcttatagatggggcggatggcaggtgatagactgggaagcactgctgggtggtggaggtgggcagtggcaccatgacgggcccctagccacacagctgtcctcactacggggcagggagcagcctcggcaacaggcaaaggccagagtcagagtggtggggaggacaggggctgctgccccgctcctggaaagccactgcagaggggcagtggctggcagtgccaggcctgggggaagtggaagcgtcctgtctgggggcagattcccaagcaagggtgacccatggttaagggccactggaaagctggagagagcttgggatcccttccacctggggccaatggtgttgattgcagactggaggggtaacctccgctgagggtcattatgtgccaggcatggcattgggtactttctgcattgggaccaggcagccgggcctgccatttgaggcagcgagcctccgtgacctgtcctccctcatttgtaaagtggggtaacagctatgtcactggccagttgtggggattaaagtgctgagcttagtgcccagcccaaaatgctcaataaagctattcagtga

SEQ ID NO: 193420 - DNA, 534 bp, Homo sapiens
  Payload ID: 18186
  Gene Name: transmembrane protein 104
  ENST ID: ENST00000578764
  CDS Start-End: 146-534
gaagctggtgctggacagctggcgccggcagcagcggaccggcgggagacggcggcttgggagctggctgtgctgcaggagctgcggcagccgccgtccttgcacctaaggaacctctgctgccagcccttcctcacttttggaaatggcgggtgaaattacagagaccggggaactctactcttcctacgaggaggaagatgacgactcctccacagcctcagacagcgatgttctcatccgggacaactacgagcgggcagagaagcggcccatcctgtctgtgcagagacgtggatctcccaacccgtttgaaatcacagaccgggtggaaatgggacaaatggcctccatgttcttcaataaagtgggggtcaacttgttctatttctgcatcatcgtttacctgtatggagacctcgccatctatgctgctgccgtgcccttctccctcatgcaggtgacctgcagcgccactggcaatgactcctgcggtgtggaagcagacaccaaatacaatgacactgaccggtg

SEQ ID NO: 193421 - DNA, 3321 bp, Homo sapiens
  Payload ID: 18187
  Gene Name: transmembrane protein 105
  Uniprot ID: Q8N8V8
  ENST ID: ENST00000332900
  CDS Start-End: 551-940
acactgcgtccccatcagctcaaagaatacgcatggggacaagcctggggggccgtctgagagtcccccaaccctggatccccacggcagcccccactgttgggtttttcagtggctggtgtgccctgggctggtcacctctgcattttgctctgctgggagtttgctcctggccctccaacagcgcctcctctgtgaggaggaactcctgttcccgtggctctgctggctctggaggctggagttcccgtgctgggccctcctgggcgggttctctcttgctgccgccagtaccctgcccctctcgtcctcctgggtagcctgggaggaatggcagaagaaagcagtgaagccaggtagcagtagcccggccaccccaccaggctctgctgtaggctgggctctcaaggcagctgctccaggaggggccccctaggaagggactgccacactcctgggagcgttcctggccccctccagtgcaaatgaccctgggccccaaggctccgaacacccgcccctctgctccaggctagcttggctgagcccgatgcttctcaaggtgaggagggcgtccttgaagcctccggccaccccacaccaaggagctttcagggcaggaaatgtgatcgggcagctgatttatctccttacctggtctttgttcacagcctggctccggccccccaccctgctgcagggcccgaggacgtctccccaggggtccccacctcggtctccttggggggactgtgctgagcccagctgcctctgtgagatgaagataagaaggcgaagacatgaagggcctgcctgggggcagtctggctttcttgcaggggggctgcacctggttccctcctccctctcgctggcagcctgcggggtggtgaggatgaaggggctgtggggccggggtgcagggattagagggaggtgactgccatctcttcctcctcatcgtgtttttcacctcttaagtcaactttagattctcggactcagagttctctcctgacggtggcagggtcctcagatcaccggtgcagacagggccagacagggccaatgtggggacccactcagcctgtggcctctgcaggagggaggtcggaggcctcagcagccaccccggccacctcctgaaacagtgaatgtccttcattttcagctggcaagctctgatcttacaacgaggtatggaactgttcagaaaactttcagcagacgttcgagggaaaacagctcagcttcccatgccccccacctctgccaggagcgaccccatatcccccaaacagaattctggtagcccgggaccacagggtcttcctgtgcctcccctgccagctctgcatgactttgtcacgtacttgagtgctggctgagatgatgctaccgctaccaaacaggtgggaggccagccccagccccagccccagccccaccggggccggagctcccggtgaagaagcgtctgcctggttcgcaggtgtccaggacacaccagtcgcctgactcccggtcaggcaaacgcacacatcaagttcttgcaagccagggctctgctggcatcttcaagaggagggagggtcctggccctgaccacagggctcccttaacaggaggagttacaaactcggcttcctggggggcatcgtggggtgtgctgcctgccaggagaccccactcctggtcacggggttccgtcccacacagtggcaggagccatgcatgattcttggctgaagaagaacccgcacagctatgtggtctgccgcccagcagggaagcccccacatcagccctaagggaacttcccaaagctcagcaggtgcctcttcctgccatccgctaggtcttctcttggcccctctcccaagccttgacccatagctgacacttctagaaaagtctttaccgagaaacggaccggctgcatgggtggtgaggagggcagttgcccagggcctggcatcagaggggcctgtggctaaggctgtcctgaaattcttaatcattttacctctgaacttgcgggtttttgttgttgttttttgaggcagagtcttgctctgtcacccaggctggagtgcagtggtgcgatcttggcttactgcaacttccgactcccaggttcaagcgattctcctgcctcagcctcccgagtagctgggactacagaagtgcaccaccacacccggttaatttttgtatttttagtagagacggggtttcaccatgttggccaggctgatctcaaactcctgatacacccgcctcggcctctcaaagcactgggattacaggtgtgagccaccgcgcccggcccttttcctgcctcctaaacaagtggccaggaattctcctcctgcaccgggtccccagattgtgtggcaagccctgcagatggcacaggggactggttcttcctcgtggaaagccaggcccggacacctctcgggcatcgcctgttggggtgaccctcccacacccagcctggaaccctagccagctcagcctccgtccgctgagaaatcaaggtgaccttgtggctcagccctcagggggcactcaccacacaagagttccctttcaagaccccctgttcggggctggggcccccaggaacggttggggcaccttcctggggccctgtttttccccaggagcggggcctgggagctgagggcgtctcatctccccacaggcatctgctgctgctcctggctgccactcacccctgtgagatgctgagggcaggatacctgtctgtgcggggcgtgggaaaaagggagaaagcctggcagagggttgggggctaagaagcaaagggcgtggaagggccaccgtgcacttttgaagtctctacttgccagtggccaccccacctctccctgccctcatccaaggacggacaggcctggcaggtggaccggagctgtggggcagaagcatcccaggcctggcctcagaggagggaggccatggtgaaagtggaggctgtctgcatccacctccccagcctttgtcaccgggacctcagcctgaccccaggcccaccccaggctgctcaccgaggtgggtaccctgcccaccgccagctcagatgcggtgtgtggactcccttctctctgggggtgagcgggagttccctcccctccacatcaggagctgggggagagctggagggccctgggatccccttgaccctggtcatcagccccagccctgacaggccctgcgtgtgccatgtgtggcctgggtttggagctcagcaccctgcgggaattctattaaatctccgattttatctgaaaa

SEQ ID NO: 193422 - DNA, 513 bp, Homo sapiens
  Payload ID: 18187
  Gene Name: transmembrane protein 105
  ENST ID: ENST00000574093
  CDS Start-End: 292-513
ctcctgggcgggttctctcttgctgccgccagtaccctgcccctctcgtcctcctgggtagcctgggaggaatggcagaagaaagcagtgaagccaggtagcagtagcccggccaccccaccaggctctgctgtaggctgggctctcaaggcagctgctccaggaggggccccctaggaagggactgccacactcctgggagcgttcctggccccctccagtgcaaatgaccctgggccccaaggctccgaacacccgcccctctgctccaggctagcttggctgagcccgatgcttctcaaggtgaggagggcgtccttgaagcctccggccaccccacaccaagcctggctccggccccccaccctgctgcagggcccgaggacgtctccccaggggtccccacctcggtctccttggggggactgtgctgagcccagctgcctctgtgagatgaagataagaaggcgaagacatgaagggcctgcctgggggcagtctggctttcttgca

SEQ ID NO: 193423 - DNA, 1181 bp, Homo sapiens
  Payload ID: 18188
  Gene Name: transmembrane protein 106A
  ENST ID: ENST00000536052
  CDS Start-End: 70-717
attttcgattccactctcttccgtttctgtcgctgcagtcgtccgcggtgaaacccccgcccctgaagaatgggtaagacgttttcccagctgggctcttggcgggaggatgagaacaagtcaatcctgtcctccaaaccagccattggcagcaaggctgtcaactactccagcaccggtagcagcaagtctttttgttcctgtgtgccttgtgaaggaactgctgatgccagcttcgtgacttgtcccacctgccagggcagtggcaagattccccaagagctggagaagcagttggtggctctcattccctatggggaccagaggctgaagcccaagcacacgaagctctttgtgttcctggccgtgctcatctgcctggtgacctcctccttcatcgtctttttcctgtttccccggtccgtcattgtgcagcctgcaggcctcaactcctccacagtggcctttgatgaggctgatatctacctcaacataacgatgttttacgcagtagctaccaagatacgggatgaaaacacatacaaaatctgtacctggctggaaatcaaagtccaccatgtgcttttgcacatccagggcaccctgacctgttcatacctgagccattcagagcagctggtctttcagagctatgaatatgtggactgccgaggaaacgcatctgtgccccaccagctgacccctcacccaccatgacctgtctgctgtccctgtactccaggcacctgcaaccctggtctatatctcccacaactccctggtgactaaggaaggactacagaggctttgccaaaggagaagccctgcctcatcacacccttacctcccaccccctcagcacaggaagcttgctttgaagttaacttcatacacacacactcatatcctccagtttcccccagattctttcaggggctgccatcagattctgcccttggttagttttttgttttttttttggtagagacagagtctcactgttggtccaggttggttttgaactcctgggctcaagcgatcctcccttcttggcctcccaaagcacttggattacagatgtgagcctgtgcctggctggtctttcttgaggaaaatctgacctggcattttcttgaggcaccttagattccctggagtggcacctggcctttctgtactga

SEQ ID NO: 193424 - DNA, 1330 bp, Homo sapiens
  Payload ID: 18188
  Gene Name: transmembrane protein 106A
  Uniprot ID: Q96A25
  ENST ID: ENST00000541594
  CDS Start-End: 238-882
attttcgattccactctcttccgtttctgtcgctgcagtcgtccgcgggactccggccggttgccggccccaggcggtgcttctccccaccaccgcccagctcagctcagcccagcccagcccactctgcccttagaggcccttctccccaaagacgcactccagaagtctcgccctcgtgcggctgaggagcctgggatcccagacctgaacaagtgaaacccccgcccctgaagaatgggaactgctgatgccagcttcgtgacttgtcccacctgccagggcagtggcaagattccccaagagctggagaagcagttggtggctctcattccctatggggaccagaggctgaagcccaagcacacgaagctctttgtgttcctggccgtgctcatctgcctggtgacctcctccttcatcgtctttttcctgtttccccggtccgtcattgtgcagcctgcaggcctcaactcctccacagtggcctttgatgaggctgatatctacctcaacataacgaatatcttaaacatctccaatggcaactactaccccattatggtgacacagctgaccctcgaggttctgcacctgtccctcgtggtggggcaggtttccaacaaccttctcctacacattggccctttggccagtgaacagatgttttacgcagtagctaccaagatacgggatgaaaacacatacaaaatctgtacctggctggaaatcaaagtccaccatgtgcttttgcacatccagggcaccctgacctgttcatacctgagccattcagagcagctggtctttcagagctatgaatatgtggactgccgaggaaacgcatctgtgccccaccagctgacccctcacccaccatgacctgtctgctgtccctgtactccaggcacctgcaaccctggtctatatctcccacaactccctggtgactaaggaaggactacagaggctttgccaaaggagaagccctgcctcatcacacccttacctcccaccccctcagcacaggaagcttgctttgaagttaacttcatacacacacactcatatcctccagtttcccccagattctttcaggggctgccatcagattctgcccttggttagttttttgttttttttttggtagagacagagtctcactgttggtccaggttggttttgaactcctgggctcaagcgatcctcccttcttggcctcccaaagcacttggattacagatgtgagcctgtgcctggctggtctttcttgaggaaaatctgacctggcattttcttgaggcaccttagattccctggagtggcacct

SEQ ID NO: 193425 - DNA, 1437 bp, Homo sapiens
  Payload ID: 18188
  Gene Name: transmembrane protein 106A
  Uniprot ID: Q96A25
  ENST ID: ENST00000588659
  CDS Start-End: 260-1048
attttcgattccactctcttccgtttctgtcgctgcagtcgtccgcggtgcggcacattcgttcccctaggactccggccggttgccggccccaggcggtgcttctccccaccaccgcccagctcagctcagcccagcccagcccactctgcccttagaggcccttctccccaaagacgcactccagaagtctcgccctcgtgcggctgaggagcctgggatcccagacctgaacaagtgaaacccccgcccctgaagaatgggtaagacgttttcccagctgggctcttggcgggaggatgagaacaagtcaatcctgtcctccaaaccagccattggcagcaaggctgtcaactactccagcaccggtagcagcaagtctttttgttcctgtgtgccttgtgaaggaactgctgatgccagcttcgtgacttgtcccacctgccagggcagtggcaagattccccaagagctggagaagcagttggtggctctcattccctatggggaccagaggctgaagcccaagcacacgaagctctttgtgttcctggccgtgctcatctgcctggtgacctcctccttcatcgtctttttcctgtttccccggtccgtcattgtgcagcctgcaggcctcaactcctccacagtggcctttgatgaggctgatatctacctcaacataacgaatatcttaaacatctccaatggcaactactaccccattatggtgacacagctgaccctcgaggttctgcacctgtccctcgtggtggggcaggtttccaacaaccttctcctacacattggccctttggccagtgaacagatgttttacgcagtagctaccaagatacgggatgaaaacacatacaaaatctgtacctggctggaaatcaaagtccaccatgtgcttttgcacatccagggcaccctgacctgttcatacctgagccattcagagcagctggtctttcagagctatgaatatgtggactgccgaggaaacgcatctgtgccccaccagctgacccctcacccaccatgacctgtctgctgtccctgtactccaggcacctgcaaccctggtctatatctcccacaactccctggtgactaaggaaggactacagaggctttgccaaaggagaagccctgcctcatcacacccttacctcccaccccctcagcacaggaagcttgctttgaagttaacttcatacacacacactcatatcctccagtttcccccagattctttcaggggctgccatcagattctgcccttggttagttttttgttttttttttggtagagacagagtctcactgttggtccaggttggttttgaactcctgggctcaagcgatcctcccttcttggcctcccaaagcacttggattacagatgtgagcctgtgcctggctggtctttct

SEQ ID NO: 193426 - DNA, 913 bp, Homo sapiens
  Payload ID: 18188
  Gene Name: transmembrane protein 106A
  ENST ID: ENST00000588693
  CDS Start-End: 190-913
gggcactgagtcaaagcttgaggggagtgttcgctcccgcattttcgattccactctcttccgtttctgtcgctgcagtcgtccgcggaggcccttctccccaaagacgcactccagaagtctcgccctcgtgcggctgaggagcctgggatcccagacctgaacaagtgaaacccccgcccctgaagaatgggtaagacgttttcccagctgggctcttggcgggaggatgagaacaagtcaatcctgtcctccaaaccagccattggcagcaaggctgtcaactactccagcaccggtagcagcaagtctttttgttcctgtgtgccttgtgaaggaactgctgatgccagcttcgtgacttgtcccacctgccagggcagtggcaagattccccaagagctggagaagcagttggtggctctcattccctatggggaccagaggctgaagcccaagcacacgaagctctttgtgttcctggccgtgctcatctgcctggtgacctcctccttcatcgtctttttcctgtttccccggtccgtcattgtgcagcctgcaggcctcaactcctccacagtggcctttgatgaggctgatatctacctcaacataacgaatatcttaaacatctccaatggcaactactaccccattatggtgacacagctgaccctcgaggttctgcacctgtccctcgtggtggggcaggtttccaacaaccttctcctacacattggccctttggccagtgaacagatgttttacgcagtagctaccaagatacgggatgaaaacacatacaaaatctgtacctggctggaaatcaaagtccaccatgtgcttttgcacatccagggcaccctgacctgttcatacctgagccattcagagcagctggtctttcagagct

SEQ ID NO: 193427 - DNA, 3266 bp, Homo sapiens
  Payload ID: 18188
  Gene Name: transmembrane protein 106A
  Uniprot ID: Q96A25
  ENST ID: ENST00000612339
  CDS Start-End: 238-1026
attttcgattccactctcttccgtttctgtcgctgcagtcgtccgcgggactccggccggttgccggccccaggcggtgcttctccccaccaccgcccagctcagctcagcccagcccagcccactctgcccttagaggcccttctccccaaagacgcactccagaagtctcgccctcgtgcggctgaggagcctgggatcccagacctgaacaagtgaaacccccgcccctgaagaatgggtaagacgttttcccagctgggctcttggcgggaggatgagaacaagtcaatcctgtcctccaaaccagccattggcagcaaggctgtcaactactccagcaccggtagcagcaagtctttttgttcctgtgtgccttgtgaaggaactgctgatgccagcttcgtgacttgtcccacctgccagggcagtggcaagattccccaagagctggagaagcagttggtggctctcattccctatggggaccagaggctgaagcccaagcacacgaagctctttgtgttcctggccgtgctcatctgcctggtgacctcctccttcatcgtctttttcctgtttccccggtccgtcattgtgcagcctgcaggcctcaactcctccacagtggcctttgatgaggctgatatctacctcaacataacgaatatcttaaacatctccaatggcaactactaccccattatggtgacacagctgaccctcgaggttctgcacctgtccctcgtggtggggcaggtttccaacaaccttctcctacacattggccctttggccagtgaacagatgttttacgcagtagctaccaagatacgggatgaaaacacatacaaaatctgtacctggctggaaatcaaagtccaccatgtgcttttgcacatccagggcaccctgacctgttcatacctgagccattcagagcagctggtctttcagagctatgaatatgtggactgccgaggaaacgcatctgtgccccaccagctgacccctcacccaccatgacctgtctgctgtccctgtactccaggcacctgcaaccctggtctatatctcccacaactccctggtgactaaggaaggactacagaggctttgccaaaggagaagccctgcctcatcacacccttacctcccaccccctcagcacaggaagcttgctttgaagttaacttcatacacacacactcatatcctccagtttcccccagattctttcaggggctgccatcagattctgcccttggttagttttttgttttttttttggtagagacagagtctcactgttggtccaggttggttttgaactcctgggctcaagcgatcctcccttcttggcctcccaaagcacttggattacagatgtgagcctgtgcctggctggtctttcttgaggaaaatctgacctggcattttcttgaggcaccttagattccctggagtggcacctggcctttctgtactgagcacctggtcagtctgaagggggcatttcaccccagctccatcagggctggctgtcccgtctgaatgtggagagagctgtagttttatctggcttttaaaacatggacctgccggctgggcgcagtggcttacacctgtaatcccagtactttgggaggccgaagtgggtggatcacttgagggcaggagttcgtgaccagcctggtcaacatggtgaaaccttgtctctactaaaaatacaaaaattagctgggtgtggtggcatgcgcctgtaatcccagctactcgggaggctgaggcagcagaatcacttgaaaccggaaggcagaggttgcagtgagccaagatcgtgcaactgcactccagcctgggcaaaagagcaaaactttgtctcaaaaaaagactcttttcaagttttctaccctctgataagaaaatttggggatatccagtgccatctccaaggactttcaggggatcatagatgcttttctgtgcctatctgctttgaccatgtgaaaaagtgatagtctgcttctctctggtaacttgtctgccacccatctgatagtaagattagccaaggccctttagccctctgtcctttctggttattgactgtccctggttcctaggaagacagagttgttctccagctaaagcgtctcctctctataaagtagttttactattcttttcatagcaggagccaaaatagtagaggaggggagagaggcacctggcactctgcgggcctgcacaggaaaaacagagccaaagacagaatcattgtataagatatttattaaaggagagcctctaagtccacatcctgagcccatgtgagtggacacaggtaggtaaaacggtgggtccagctgctgtcatctgaaagccttcaggagatgaagctatcagtatccagctgaaggctgctgggttctgttccaccaccaccttagcaccagggccctctctggtcccagaggcctcatctctccttgggctttgacaatgtggagcagcacatcagcagggactggtctagaccctccctttcctgtcacttagctggagctaagctccagataacccctaggttcccactggctcctagtagaaatagtttctgtactttagcagaacaggaaggatatttgttcattaaaggtggcttggtcttacagctgggtgcagtggtatatacctgtagtcccagctactcaggaagctgaggtgagaggatctctagagcccaggaattcaagtttaacatgagcagcaacattagcaagaccccgtttaaaaaaaaaaaaagagctgggcgtaatggcgcacacctgtaatcccacctactcaggaggctgaggcaggagaatcacttgaacctgggaggcagaggttgcagtgagccaagatcgcaccactgcactccagcctgggcaacaagggcgagactctgtctcaaaaaaaaaaaaaaaaaaagatggctgtctctttatcattcagacagaacgatgaacacaggtgagcagggaaagctaattttgaagtaggatgcatggagagggagaagtggtgacagaacttggtaactagctggctgggggaacgaggggaaggaaggagactgctgtctccaagctgaggtcagggtggtgttggcaagagcgcaaaagtccagggaagccaggctggagctgctgtgtatagactgccaaatgtgaagtatttatattgtattcaataaactatacttaagagtgttcaaaaaa

SEQ ID NO: 193428 - DNA, 12539 bp, Homo sapiens
  Payload ID: 18189
  Gene Name: transmembrane protein 106B
  Uniprot ID: Q9NUM4
  ENST ID: ENST00000396667
  CDS Start-End: 323-1147
acggcggccgcgcgctccaggccggtcgctccaccccccggctcccgggactgtggactccacgaccctgtcctcggccctgtccgcgccgaagcagcccgggactgcgcagcgccccgcgtgccgatcttttcctaattcagcagcgatttaaccaagagcctggaatattttaaggagtaataagagacatttacaaactattctctctgaagcctgctacctggaggcatcatctagataatcagaaccttggcttccacatcctcctcccttgtcttaactacaaacatttctttctgctgacttcaactcctcagacatgggaaagtctctttctcatttgcctttgcattcaagcaaagaagatgcttatgatggagtcacatctgaaaacatgaggaatggactggttaatagtgaagtccataatgaagatggaagaaatggagatgtctctcagtttccatatgtggaatttacaggaagagatagtgtcacctgccctacttgtcagggaacaggaagaattcctagggggcaagaaaaccaactggtggcattgattccatatagtgatcagagattaaggccaagaagaacaaagctgtatgtgatggcttctgtgtttgtctgtctactcctttctggattggctgtgtttttccttttccctcgctctatcgacgtgaaatacattggtgtaaaatcagcctatgtcagttatgatgttcagaagcgtacaatttatttaaatatcacaaacacactaaatataacaaacaataactattactctgtcgaagttgaaaacatcactgcccaagttcaattttcaaaaacagttattggaaaggcacgcttaaacaacataaccattattggtccacttgatatgaaacaaattgattacacagtacctaccgttatagcagaggaaatgagttatatgtatgatttctgtactctgatatccatcaaagtgcataacatagtactcatgatgcaagttactgtgacaacaacatactttggccactctgaacagatatcccaggagaggtatcagtatgtcgactgtggaagaaacacaacttatcagttggggcagtctgaatatttaaatgtacttcagccacaacagtaaaaactggaagagatggatttaaagaagaaatatctattgatatttcctatactctcaatgaagaggtatttcctaataggagaccttaaattgaacaaacctaaagtttacacttctaagagtacagttaaaagtatgtggacctgcagttcttgtaactctccactctgtgttaatgatatatttgtactaggatcttttacttgaatctaaatttactggttgatttccttctccagcctatcccctacagggaaaagctgatacttcccctatagtacaataaataattatttaaaagtcatagctccagtcactactgaaaacataattttggtgataaacataatttgagaaacttaatttctgaatgtttttatagaaaattactgaaagtctattactcatggaagacttttaaagaataaccttttttcctgttttataaattcccattgttatatggtagtatttcagctacacaatattttagcttttagctagacatttatagcttttcatttgttgaaatggtaatcatctgcatgtttttgtcacttatttcaggttagtgattgcctaacacttataagccaaaataatctttgcaaaattccatacctaaaattttgaaagcccctaatgttttcacacatctttctgtattagttatagttttgtgaaatctttgtgtgatcttcaaacattatcatttaatgtacaatactgtaaataaactgtgcatggcttttatacagctttagtaaatgtcaaataaagtggtacagactcattacaacaagtttctcataaaaatacaataaataggaaaatgaaattcagaaacccatagactgggaataggttccagttacagcttggatctggcataaaataaatttgaaataaaatattttgatgctccatttttttatgttgcttttcatactaaagaatggtgtagacatgttttgcaactgttaggtacccagttatcaattttatcaatgttttagaggaggaaattatttttttggtagaaattgttcaagaaatccttaattgaatgtcattaaatgatggtggccaaaataaaacctatttagaaatttaatcactttgcacatcacttggaatatgatgcctctagtagttacttttttatagttttctacttttggttttatttaaaattgttttcaaatatagattattgacttattcaactttgctgttttatattttcagtatcatttttcatttttttttttttttgtcttttcacttaccaagttctagggacatttaaaatatgtactaagtgtaggagtggttatgataccaaaaaatgtagctgggttgagattaatttcgttctgttttctcatgacagaaatcaggtttccctttccccacccctaagtgcctaacttaggtctgaaacagcctgtttattagtctgactctctcaaccataaaacataagctttatttaattctgcctttaaacacactcaggtttccccttaattttcatattattttctgcaagttttcttgagtatcttcaattcgttgaatgtggtttttggtttttttttgttttaacactagtcttcccttaattcattgctaactcaagccatccttactattaaacccaaatcagtcctttaagttcattatggcctttctagtatttaaaaaaaaaaaaatcattttcatttttcttctgctacgtttcctgactactactgcatacttctctgatacaggttctgtttgtattttttatatcattctcattttctcatttgacatgatctatgtctatatatgatataggtccccttttgtctcaaaatttttaattatgtgacttcaaaaatcacctgtatctgtagtagggcttccaaatctgcttctccatatgtgaccagtcacctgtctgctttcacatttagctagtgaactacacatttactaaaatgtgtaaattttacacatttagtgactgtgtaaaataaaaaaaaagttattttatcatatcctttctattatgttcccatcctgtcctcatgtcccatttactttattatcaccattcatttcttcaaaattatcttttagatacgctcatacaaaaatcaatccttgttttcttgcttgtgtcttttaaccttggaaaattacatcgtgtaaattaaacagatttttctgatgatctgtgcttcttatatactattagagtgcatgatagtatctcctgaaaaggatggaaagtagaagcatttgcttttagtcacttaattttgaatcttttttcttcatcttttgaattaattttttttattatatctacttttagtggagtttgagtcagaaaaaaacaagaatttgaaacaagtaaaaagatagaagagaaataaagatggtatgtgactactttcagagagagttaagtaactgtcagaataagcctggaacaaaacaggctgtaaattaataaaactacaaacacacattcaggtgaagcagaagtatagccataaaacatctagaaagagtgaatgaggcttttagcttttcttaggtcaatgtccagtgtgcttttttccatgggaataggataggtattaatacgcttttctaaactgctctcagaccttatccagaggacatggtaaagatatgttacagaaatttttctgatacttcctggaataactttaagttacaccctagtagactggtcattctaataaaatccagtactataacaaacctctgtatgttgatagcacattggccctttttagagttctttcctatgtttttcttacgtgatttcccacagttccatgagtccaacaaaggagagtgataggctccttatcttttagaagaggaaggaaaggcatgaagaagttgagggactggctgaagatcacgtacttactaagtagtacaactggagcaagatcaagtatctctgtctcccatatctgtgttctatcatttaaaatatatattggaaatccctgctgactcagattggtatgattaaaaatgagaggaaagttcaaatagttagtagtgacaaactaatactgctggactaagattttggtagcattgttttctaaaatattttaaatggagaatgaacacttataaaatgctttggaacataatctttagcttaattttctgttaaaatttagtaccccttcatcattccaataaagataagactgatccattgtctaaggaaattatttataaataatagagattaatttatttgagatttgaaataagaatagtatgaaaatattagataccacataaattgtttgaaattactgaataaccatcttaagtatggaacatttaaatggctatattttatttgtgtacagtttttctgtgccttgttaggccagtgaagcaattattttctctaagaaaatgacaataaaatataacacacttcagattgtctgatttacagtttggaaaggacaccgcaatgttcaaataggtaggagaccatcaaaaacacaattaaagtaacatattaggagacttgaaacttcagcctaataaatccttcatggttcttagccttattattgtgatataattctagatattttcttggagggcatgtgcccaactctcccgcaccccattttgtttgtcttttaaagttcttagaataaacagttctttatataataattatattttatttaagaaaatagtttgttaggtactttttaaaagatgtaaatttttaaatttacaaatacatatgggtctttgataagcaataggaattgaattacaagttactagggttataagcaaaaggttgcttaccataatgtcattaggtcacgatttttagctcacatctggaagcagcaactacttggctcaagtacatataagagtaattagttttattctctcttttttataaaatcgggtttcagatgagatgtttatcttagactattttagggaaaaattttacatgtttgagatggtggagtaaaaagactgttaaacatttcttttaaaaaattatttttacattacaacaatatatttatgatgtgttcagatcaaaaatttaacttctgtgtcccagatctactttcaaagtgagattttcacttgtcagcttaaatttctgactagaactaacatttgtgtatttttgtgcttagtcggaatacaaatttcacagtggatttttgaagtttgtccttaaattggataaaatcaagtgattaaagttactaaagagataaaaatggtaatttccatttttaaaagtaatttggttgtgtttatagttatttgtacaagtatttatcacagactctaaattgaaaaatgtagtatgatctatatttgaccctaaaaatgttggattaatttaacaaatatggcagatttttcataactaagtcttaagtcttctaaaaggaagctgttacccttctgtttttaattacattaattgaaatgtgttttaagagatacaatttcagcatattttatatattaaaaaacaaaaaaggattagtattgagccagtggccaaaaggtaatattactaccatgtagactgttatagttcaaattgtcccacttcacccagaattttagaaactagaagtctgggaggtactatatcagctgtagttgggtaattccaagtgctgatagtactattcatcttttttattattgtgtcagatgaaacaaatgccaagttgcaaaatatgcagatttttattatataatggttttaggcataaattattaacaagccatgccttatgtgtttcatcttatatttttctttagaactaaactataacagattttggaaaatgatttgacgtgcttgctcacttgattgacttggtcagatatttgaatgatggtattacctagattctaatccttgattctagttatataataaataatatagaatatgaaaatatgtttgggcatttactgtttatattatgtagtagcctccatcatgacacacttactacatttatgaattgagcagttctgtaattgtaattattattgctgttcatgtaacaaaacatgcttataatagcaaacaaatagaaatgcccccaaaatgctatttttttaattcagttataactgttactcttgtagttgtgtatgacgcaataaaatttgtaaaaaaatttcagcatgaaaaataaaatttgtatcacttatgtattttggctatgcttttgaaatttccttaacataaacaaatcagtgtagatattcaaaatcttttacctttaatccttttcatccttatagtccttacctgaactctactttagcattatctttgatttctttttttcattcacttaacttccaatcagtactcaagctttatccattctacctctgtaatgtctctggaatttatctcatacgtgaaatttcccttgatattatagacataccttggatatattgcaggtttggttccacaccatatcgataaagtgatataatcaagcaagttacacacctttttttggtttcccagtgcatatgaaagttatgtttacatcatactgtagtctattaagtgtgcaatagcattatgtcgaaaaacacaatatatatgccttaataaaaaataggctgtgtgcagtggctcacacctgtaatcccagcactttcggaggccaaggtgggaggatcacctgagcccagaagttcaagaccaaattggtcaacatggcgagaccccatataaaatatatacatacacacacacacacacacacacacacacacacacacacactattgctaaaaaatgttaacgatcatctgaatgttcagaagtttatactccttttgccggcacaggatcttgtctggatgttgtttgctgatagatccatgtagtggttactaaagttggggtggctatggcaatttcttaagacaacaatgaagtttatcacatctattgccttgtcctttcatgaaagatgtctctagcatgtgatgctgttttgatagcattttaccaatggtaggtcttttttcaaaattggagccagtcctctcaaaccctgcctctgctttatcgaccatgtttaaataattttctaaattctttattgtcatttcagcagtggtctcagcatcttcaccaggagtagattccaactcaagaaaccactttcttagctcattcataagaaacaattcctcatctgttcaagttttggcatcaagttgtagcaattcagtcacatctacagactccattgctaaattttagttctcttgctatttccacatctgctgtgacttccttcactgaagtcatgaacccctcaaaattatccatgagagttgaaatcaatttctttcaaactcctgttaatgttcatatttagacctcttcccctgaatcacaaatgttgttaatggcatctagaatggcaaatcctttctggaaggtttcaatttactttgcccagatccatcagaggaatcactacctatgacagctatggtcttacaaaatgtatttcttatatagtaagattcaaaagtcaaatttactccctgatccatggctgcagaatgcacgttgtgttaagaggcatgaaaacaacattaatctatttgtacatcatcagagctgttgggtgaccaggtacattgtcaatgagtagtaatactttgaaaggaatttttttttccaagcaggtctcaacaatgggcttaaaatattcagtgaaccgtgttgtaaacagatgtcatattatccagactgttccatttattgaacacaggcagagtaggtaaaagttttaagggtcctaggattttcaggatggcaaatgagcattggcttcaacttaaagtcaccagctacattcaccactaaagagagtcagcctgtcctttaaagctttaaaggcaagcattgacttctctttagctatgaaagttttagatggcacctttttgtaaaagaaggttgttttatctacattgaaaatatattgttcattgtaaccactttcatcaatgatcttagctagatattctgggtaacttactgcaggttctccatcagcacttactgcttcaccttgcacttttatattatggaaacaacttatctccttaaacatcattaaccaacctcttggtagcttccaacttttcttcaatagcttcctcatctctctcagccttcatagaattgaagcgtgttagggctttgttcaggattaggctttcacttaaggcaatgttgtggctggtttgatctattgaaaccactaaaacattcccatatcggcaataaggctgtttgattttcttatcattcatgttttctggaacacttttcaattacttacagtaaggaaatagcacttttaatttccttcaagaacttttcctttgccttcacaacttgtgcaagagacctagctttcagcctatcttgactttccaagattgtccttggtgagaaatgcttgattactaggtgtaattatttctagcttttgattgaaagtgagagatatgtgactcttccttttacttgaacagttagaggctattgtaggattattaattggcctaatttcaatgttattttgtctcaaggagagagggatgtgggaacagctggttaggagagcagtccgaacacacacttttttttattactttcactgccttacatgggtatggttcatgctgcctccaaatacttacaaaaacatcaaagatcactgattacagatcattaaaataggtttaataataatggaaacatttgaaatattgcaaaaattaccaaaatgcgacagagacatgaaatgagaacatgctgttgaaaaaaatggcactcatagacttgttggacacaggattgaaagaaaccaattcatcaaaaccacaatatctgcaaaacgcaataaggtgatgcacaataaaaggaagtatatctgcacttccttcttttttactgaaaaagcccaagttcttactctggtgttgagaacctttcattagctggctacaatctcagttcacaatcatttcttattgcccttcaacaatgtcctgaccaaatcgagttctttctcattgggaacagttcattcctttatcccttcgctcattctgttccttttttcttagaaaaattatttgcccatgttttttatcccccaattctatctttttcaatgcccacttcgtgtccaacccctctctactttccctctaaacttactcaaacacttggtgaactttttctgaatgttttttctgaatgtttacttttaaaggagttgcccagtcacaaagtttgagccaagtttttttgttttaaacttgttttaaacttttgttttcatcaacttttttcaaacaatttttgtcagcttagaggttgtgttttaattactatttttaaaatcttgtatgaggtagtatgatttgaaattagatggaatgtgcccaaaattatctctgtagaataatatggaaaaacgaaaatgaaaagatgtattacctgaatgtgctcctcctagccagtttctcaagggagaagaatcattaataagtttgtgaggctttttttttttttctggtagatttctgtttccttgatcagtggtttttcagaattttttaaagcttgtgaaatacttatttgtaaatagcatcttatgaggaaccttgatatgtgacaaaacagatgctttgatttgagagcagaagacctgcagcccctgactgctcacctttccagggacccctgaacattggcctagagggtagtgtacagtcacttcttcagtgataacttactgagtgtgattcaacaaaactgctttggtttatgggtgaaacataatttataactaggcaaatgtcagcttaaatttatattttctaaatagcactgaaaatgacaatagacaaatgtaatttctgatttttaagaaatgattttccattttaacatacattttaaatgttttgtcttcaaagggaatccttaaaaatgatatattggaaaccactgatttcttattttcatttcatgaatttcagattcatgaatggaatatattgataatagcattttttaagttgccccaaaaagatgaaatacaaataattttaatcccaaatctatttcagacacctaactttttttttattttttatactttaagttctaggatacatgtgcagaacgtgcaggtttgttacataggtatacacgtgccatgttggtttgctgcacccatcaacccgtcatctacattagatatttctactaatgctatccctcccctagccccctaccccacaaaaggccccagtgtgtgatgttcccctccctgtgtccatctgttctcattgttcaactcccacttatgagtggcaacatgtgctgtttggttttctgttcctgtgtgtgtttgctgagaatgatggtttccagcttcatccatatccctgaaaaggacatgaactcatccttttttatggctgcatagtattccatggtgtatatatgccacattttctttatccagtctatcattgatggacatttgggttggttccaagtctttactattgtgaacagtgctgcaataaacatatgtgtgtatgtgtctttacagtaaaatgatttataatcttttgggtatacacccagtaatgggattgctgggtcaaatggtatttctggttctagatccttgaggaatcaccacactgtcttccacaatggttgcaatttacactcccaccaacagtgtgtaaaagcttcctatttctctacattctctccagcatctgttgtttcctgacttaatgattgccattctaactggcgtgagatggtttctcactgtggttttgatttgcatttctgtaatgacccgtgatgatgagctttttttcatgtttgttggctgcataaatgtcttcttttgagaagtgtaaggtacttaattcttaaattaaaaaaaaatacccggccgggcacggtggctcacgcctgtaatcccagcactttgggaggccgaggcgggtggatcatgaggtcaagagatcgagaccatcctggctaacaaggtgaaaccccgtctctactaaaaatacaaaaaattagccgggcgcggtggcgggcgcctgtagtcccagctactcgggaggctgaggcaggagaatggcgtgaacccgggaagcggggcttgcagcgagccgagattgcgccactgcagtccgcagtccggcctgggcgacagagcgagactccgtctcaaaaaaaaaaaaaaaaaaaaaaaaaaaatacccttctttaacaaaatcaagtttcaagttttctgccttgttgataacttgttaacatttttttattttagaataaatctaaacagagaccacactgatatctgtaacaacctatgtaaagttaagattaaggttaaatcacatttttcacagagagtgttttactgaaatataaacttttatgcatctgatattatctaattgtgtccttactgggtaacttgtgtatttttcaagttaaaggatttcctaaaaatgcttatttgaatatttatgtcatttgtcacacatactttcaaaacataaccttcttcaacgagtatcttcttttccttcctaaaatactgttaatagctggctattttgtaagcctgtatctggtttaaaaaaaagaagtgaatattttcaatacttatgaaccatagaattctgtattcttttcataacttttaacttttccataggacctatcactatgtaaaatattatacatatctactgatttatttattgcctatgtacctatactagaacatagtaaacatgagaacagggaatcttggttattaattcctgcaggactcaactacttatcactcaaacatttgttcttgaaaagaacttcgtataacatcattagatttttacagaatctttaaaaaagctttaatattttcaaggttttttatttatataaatattgttactttaccactagtgatttcaatagtggcattgtcacatgattcaagaagaggaggccattacattactgttgtattaaaaagtcagttcaggcttaatatatatgactactataagtcaacctcacattttaatgtatgaagaagattgtatgaacgatcacattaattcatttaaatagtatgtattttgatactaatttttaagaagaaatgtatcattctcatggaaataaaagataatttgaaaagca

SEQ ID NO: 193429 - DNA, 2126 bp, Homo sapiens
  Payload ID: 18189
  Gene Name: transmembrane protein 106B
  Uniprot ID: Q9NUM4
  ENST ID: ENST00000396668
  CDS Start-End: 188-1012
agcagcgcttggcctctgctgatgccgtcgttatcctacccctcccccgtcccagctctacggcggccgcgcgctccaggccggtcgctccaccccccggctcccgggactgtggactccacgaccctgtcctcggccctgtccgcgccgaagcagcccgggactgcgcagcgccccgcgtgccgacatgggaaagtctctttctcatttgcctttgcattcaagcaaagaagatgcttatgatggagtcacatctgaaaacatgaggaatggactggttaatagtgaagtccataatgaagatggaagaaatggagatgtctctcagtttccatatgtggaatttacaggaagagatagtgtcacctgccctacttgtcagggaacaggaagaattcctagggggcaagaaaaccaactggtggcattgattccatatagtgatcagagattaaggccaagaagaacaaagctgtatgtgatggcttctgtgtttgtctgtctactcctttctggattggctgtgtttttccttttccctcgctctatcgacgtgaaatacattggtgtaaaatcagcctatgtcagttatgatgttcagaagcgtacaatttatttaaatatcacaaacacactaaatataacaaacaataactattactctgtcgaagttgaaaacatcactgcccaagttcaattttcaaaaacagttattggaaaggcacgcttaaacaacataaccattattggtccacttgatatgaaacaaattgattacacagtacctaccgttatagcagaggaaatgagttatatgtatgatttctgtactctgatatccatcaaagtgcataacatagtactcatgatgcaagttactgtgacaacaacatactttggccactctgaacagatatcccaggagaggtatcagtatgtcgactgtggaagaaacacaacttatcagttggggcagtctgaatatttaaatgtacttcagccacaacagtaaaaactggaagagatggatttaaagaagaaatatctattgatatttcctatactctcaatgaagaggtatttcctaataggagaccttaaattgaacaaacctaaagtttacacttctaagagtacagttaaaagtatgtggacctgcagttcttgtaactctccactctgtgttaatgatatatttgtactaggatcttttacttgaatctaaatttactggttgatttccttctccagcctatcccctacagggaaaagctgatacttcccctatagtacaataaataattatttaaaagtcatagctccagtcactactgaaaacataattttggtgataaacataatttgagaaacttaatttctgaatgtttttatagaaaattactgaaagtctattactcatggaagacttttaaagaataaccttttttcctgttttataaattcccattgttatatggtagtatttcagctacacaatattttagcttttagctagacatttatagcttttcatttgttgaaatggtaatcatctgcatgtttttgtcacttatttcaggttagtgattgcctaacacttataagccaaaataatctttgcaaaattccatacctaaaattttgaaagcccctaatgttttcacacatctttctgtattagttatagttttgtgaaatctttgtgtgatcttcaaacattatcatttaatgtacaatactgtaaataaactgtgcatggcttttatacagctttagtaaatgtcaaataaagtggtacagactcattacaacaagtttctcataaaaatacaataaataggaaaatgaaattcagaaacccatagactgggaataggttccagttacagcttggatctggcataaaataaatttgaaataaaatattttgatgctccatttttttatgttgcttttcatactaaagaatggtgtagacatgttttgcaactgttaggtacccagttatcaattttatcaatgttttagaggaggaaattatttttttggtagaaattgttcaagaaatccttaattgaatgtcattaaatgatggtggccaaaataaaacctatttagaaatttaa

SEQ ID NO: 193430 - DNA, 1492 bp, Homo sapiens
  Payload ID: 18189
  Gene Name: transmembrane protein 106B
  ENST ID: ENST00000420833
  CDS Start-End: 159-473
gttatcctacccctcccccgtcccagctctacggcggccgcgcgctccaggccggtcgctccaccccccggctcccgggactgtggactccacgaccctgtcctcggccctgtccgcgccgaagcagcccgggactgcgcagcgccccgcgtgccgacatgggaaagtctctttctcatttgcctttgcattcaagcaaagaagatgcttatgatggagtcacatctgaaaacatgaggaatggactggttaatagtgaagtccataatgaagatggaagaaatggagatgtctctcagtttccatatgtggaatttacaggaagagatagtgtcacctgccctacttgtcagggaacaggaagaattcctaggggatggagtttccccatgtttcccaggatgatgtcgaattcttgggctcaagcgatcatccagccttggcctcccaaagtgttagaattacagctgtgagccaccacgcctggccaacctaatatttttaattcattatctaaagaagaagaataagctggctgtgccctaatgagttaaagaaactctgtgaagagggatgggcaagaaaaccaactggtggcattgattccatatagtgatcagagattaaggccaagaagaacaaagctgtatgtgatggcttctgtgtttgtctgtctactcctttctggattggctgtgtttttccttttccctcgctctatcgacgtgaaatacattggtgtaaaatcagcctatgtcagttatgatgttcagaagcgtacaatttatttaaatatcacaaacacactaaatataacaaacaataactattactctgtcgaagttgaaaacatcactgcccaagttcaattttcaaaaacagttattggaaaggcacgcttaaacaacataaccattattggtccacttgatatgaaacaaattgattacacagtacctaccgttatagcagaggaaatgagttatatgtagtaagttctgatttataataactttttattgtcaaataatgaagtgtataaaataaagtataaagagtatacatattttttaatttccgttatcagtcaaaaagagtacattatgtagtattctggcttctggtcctctctgttcctctttttcaacatatataatattcatgtatatatacacataaaatttgtttttttatttatttttcagaattagggttataccatgtcactttatttttcattactatgttactgtgttaaacttgttactatgttaaaataattataaattttcatcatcttttgaataagcgtagatacagacttttagggtaaataacaacctagttatcaaaatttcagaagatgagcaaaatatataagtaatttatagcctgcatttaaacaaccctgcaactgcagtggcatgaatacatacatgtttttcgagtaagaagtcatgaatatatcagtcattgtttgaagtatagaaaa

SEQ ID NO: 193431 - DNA, 496 bp, Homo sapiens
  Payload ID: 18189
  Gene Name: transmembrane protein 106B
  ENST ID: ENST00000442107
  CDS Start-End: 422-496
ggtcgctccaccccccggctcccgggactgtggactccacgaccctgtcctcggccctgtccgcgccgaagcagcccgggactgcgcagcgccccgcgtgccggtgagcgaccccggacgtgcagtccccaggtccccttccggagcgaggctgagcggctgcgccgcggcttgagccgggcctgacaaggaggggaggccgctggggtgctgggccagccgcagatcttttcctaattcagcagcgatttaaccaagagcctggaatattttaaggagtaataagagacatttacaaactattctctctgaagcctgctacctggaggcatcatctagataatcagaaccttggcttccacatcctcctcccttgtcttaactacaaacatttctttctgctgacttcaactcctcagacatgggaaagtctctttctcatttgcctttgcattcaagcaaagaagatgcttatgatggagtcacatctgaaaac

SEQ ID NO: 193432 - DNA, 584 bp, Homo sapiens
  Payload ID: 18189
  Gene Name: transmembrane protein 106B
  ENST ID: ENST00000444443
  CDS Start-End: 255-584
ctctacggcggccgcgcgctccaggccggtcgctccaccccccggctcccgggactgtggactccacgaccctgtcctcggccctgtccgcgccgaagcagcccgggactgcgcagcgccccgcgtgccggtgagcgaccccggacgtgcagtccccaggtccccttccggagcgaggctgagcggctgcgccgcggcttgagccgggcctgacaaggaggggaggccgctggggtgctgggccagccgcagacatgggaaagtctctttctcatttgcctttgcattcaagcaaagaagatgcttatgatggagtcacatctgaaaacatgaggaatggactggttaatagtgaagtccataatgaagatggaagaaatggagatgtctctcagtttccatatgtggaatttacaggaagagatagtgtcacctgccctacttgtcagggaacaggaagaattcctagggggcaagaaaaccaactggtggcattgattccatatagtgatcagagattaaggccaagaagaacaaagctgtatgtgatggcttctgtgtttgtctgtctactcctttctgga

SEQ ID NO: 193433 - DNA, 1394 bp, Homo sapiens
  Payload ID: 18190
  Gene Name: transmembrane protein 106C
  Uniprot ID: Q9BVX2
  ENST ID: ENST00000256686
  CDS Start-End: 79-774
tttggcgcctgcgcgctgagtgcgtgccgctccgccgaccgaagaggctggacatgacaccagtggcatatcacggccatggggtctcagcattccgctgctgctcgcccctcctcctgcaggcgaaagcaagaagatgacagggacggtttgctggctgaacgagagcaggaagaagccattgctcagttcccatatgtggaattcaccgggagagatagcatcacctgtctcacgtgccaggggacaggctacattccaacagagcaagtaaatgagttggtggctttgatcccacacagtgatcagagattgcgccctcagcgaactaagcaatatgtcctcctgtccatcctgctttgtctcctggcatctggtttggtggttttcttcctgtttccgcattcagtccttgtggatgatgacggcatcaaagtggtgaaagtcacatttaataagcaagactcccttgtaattctcaccatcatggccaccctgaaaatcaggaactccaacttctacacggtggcagtgaccagcctgtccagccagattcagtacatgaacacagtggtgaattttaccgggaaggccgagatgggaggaccgttttcctatgtgtacttcttctgcacggtacctgagatcctggtgcacaacatagtgatcttcatgcgaacttcagtgaagatttcatacattggcctcatgacccagagctccttggagacacatcactatgtggattgtggaggaaattccacagctatttaacaactgctattggttcttccacacagcgcctgtagaagagagcacagcatatgttcccaaggcctgagttctggacctacccccacgtggtgtaagcagaggaggaattggttcacttaactcccagcaaacatcctcctgccacttaggaggaaacacctccctatggtaccatttatgtttctcagaaccagcagaatcagtgcctagcctgtgcccagcaaatagttggcactcaataaagatttgcagaatttaatacagatcttttcagctgttcttagggcattataaatggaaatcataacgtggttctaggttatcaaaccatggagtgatgtggagctaggattgtgagtgacctgcaggccattatcagtgcctcatctgtgcagaagtggcagcagagagggaccatccaaatacctaagagaaaacagacctagtcaggatatgaatttgtttcagctgttcccaaaggcctgggagctttttgaaaagaaagaaaaaagtgtgttggctttttttttttttagaaagttagaattgtttttaccaagagtctatgtggggcttgattcacccttcatccattggctggaacatggattggggatttg

SEQ ID NO: 193434 - DNA, 1515 bp, Homo sapiens
  Payload ID: 18190
  Gene Name: transmembrane protein 106C
  Uniprot ID: Q9BVX2
  ENST ID: ENST00000429772
  CDS Start-End: 114-866
gaccgaagaggctggtaagtcctcaagctggcaggtggtcgggggagcggccggagaggagctgccgggagttcgtgccctgcaggacatgacaccagtggcatatcacggccatggggtctcagcattccgctgctgctcgcccctcctcctgcaggcgaaagcaagaagatgacagggacggtttgctggctgaacgagagcaggaagaagccattgctcagttcccatatgtggaattcaccgggagagatagcatcacctgtctcacgtgccaggggacaggctacattccaacagagcaagtaaatgagttggtggctttgatcccacacagtgatcagagattgcgccctcagcgaactaagcaatatgtcctcctgtccatcctgctttgtctcctggcatctggtttggtggttttcttcctgtttccgcattcagtccttgtggatgatgacggcatcaaagtggtgaaagtcacatttaataagcaagactcccttgtaattctcaccatcatggccaccctgaaaatcaggaactccaacttctacacggtggcagtgaccagcctgtccagccagattcagtacatgaacacagtggtcagtacatatgtgactactaacgtctcccttattccacctcggagtgagcaactggtgaattttaccgggaaggccgagatgggaggaccgttttcctatgtgtacttcttctgcacggtacctgagatcctggtgcacaacatagtgatcttcatgcgaacttcagtgaagatttcatacattggcctcatgacccagagctccttggagacacatcactatgtggattgtggaggaaattccacagctatttaacaactgctattggttcttccacacagcgcctgtagaagagagcacagcatatgttcccaaggcctgagttctggacctacccccacgtggtgtaagcagaggaggaattggttcacttaactcccagcaaacatcctcctgccacttaggaggaaacacctccctatggtaccatttatgtttctcagaaccagcagaatcagtgcctagcctgtgcccagcaaatagttggcactcaataaagatttgcagaatttaatacagatcttttcagctgttcttagggcattataaatggaaatcataacgtggttctaggttatcaaaccatggagtgatgtggagctaggattgtgagtgacctgcaggccattatcagtgcctcatctgtgcagaagtggcagcagagagggaccatccaaatacctaagagaaaacagacctagtcaggatatgaatttgtttcagctgttcccaaaggcctgggagctttttgaaaagaaagaaaaaagtgtgttggctttttttttttttagaaagttagaattgtttttaccaagagtctatgtggggcttgattcacccttcatccattggctggaacatggattggggatttgatagaaaaataaaccctgcttttgattca

SEQ ID NO: 193435 - DNA, 1414 bp, Homo sapiens
  Payload ID: 18190
  Gene Name: transmembrane protein 106C
  Uniprot ID: Q9BVX2
  ENST ID: ENST00000449758
  CDS Start-End: 99-794
taagtcctcaagctggcaggtggtcgggggagcggccggagaggagctgccgggagttcgtgccctgcaggacatgacaccagtggcatatcacggccatggggtctcagcattccgctgctgctcgcccctcctcctgcaggcgaaagcaagaagatgacagggacggtttgctggctgaacgagagcaggaagaagccattgctcagttcccatatgtggaattcaccgggagagatagcatcacctgtctcacgtgccaggggacaggctacattccaacagagcaagtaaatgagttggtggctttgatcccacacagtgatcagagattgcgccctcagcgaactaagcaatatgtcctcctgtccatcctgctttgtctcctggcatctggtttggtggttttcttcctgtttccgcattcagtccttgtggatgatgacggcatcaaagtggtgaaagtcacatttaataagcaagactcccttgtaattctcaccatcatggccaccctgaaaatcaggaactccaacttctacacggtggcagtgaccagcctgtccagccagattcagtacatgaacacagtggtgaattttaccgggaaggccgagatgggaggaccgttttcctatgtgtacttcttctgcacggtacctgagatcctggtgcacaacatagtgatcttcatgcgaacttcagtgaagatttcatacattggcctcatgacccagagctccttggagacacatcactatgtggattgtggaggaaattccacagctatttaacaactgctattggttcttccacacagcgcctgtagaagagagcacagcatatgttcccaaggcctgagttctggacctacccccacgtggtgtaagcagaggaggaattggttcacttaactcccagcaaacatcctcctgccacttaggaggaaacacctccctatggtaccatttatgtttctcagaaccagcagaatcagtgcctagcctgtgcccagcaaatagttggcactcaataaagatttgcagaatttaatacagatcttttcagctgttcttagggcattataaatggaaatcataacgtggttctaggttatcaaaccatggagtgatgtggagctaggattgtgagtgacctgcaggccattatcagtgcctcatctgtgcagaagtggcagcagagagggaccatccaaatacctaagagaaaacagacctagtcaggatatgaatttgtttcagctgttcccaaaggcctgggagctttttgaaaagaaagaaaaaagtgtgttggctttttttttttttagaaagttagaattgtttttaccaagagtctatgtggggcttgattcacccttcatccattggctggaacatggattggggatttg

SEQ ID NO: 193436 - DNA, 579 bp, Homo sapiens
  Payload ID: 18190
  Gene Name: transmembrane protein 106C
  ENST ID: ENST00000546749
  CDS Start-End: 392-579
gtgccgctccgccgaccgaagaggctggcgaaagcaagaagatgacagggacggtttgctggctgaacgagagcaggaagaagccattgctcagttcccatatgtggaattcaccgggagagatagcatcacctgtctcacgtgccaggggacaggctacattccaacagagcaagtaaatgagttggtggctttgatcccacacagtgatcagagattgcgccctcagcgaactaagcaatatgtcctcctgtccatcctgctttgtctcctggcatctggtttggtggttttcttcctgtttccgcattcagtccttgtggatgatgacggcatcaaagtggtgaaagtcacatttaataagcaagactcccttgtaattctcaccatcatggccaccctgaaaatcaggaactccaacttctacacggtggcagtgaccagcctgtccagccagattcagtacatgaacacagtggtcagtacatatgtgactactaacgtctcccttattccacctcggagtgagcaactggtgaattttaccgggaaggccgagatgggaggaccgttttccta

SEQ ID NO: 193437 - DNA, 810 bp, Homo sapiens
  Payload ID: 18190
  Gene Name: transmembrane protein 106C
  Uniprot ID: Q9BVX2
  ENST ID: ENST00000552561
  CDS Start-End: 58-810
gcgtgccgctccgccgaccgaagaggctggacatgacaccagtggcatatcacggccatggggtctcagcattccgctgctgctcgcccctcctcctgcaggcgaaagcaagaagatgacagggacggtttgctggctgaacgagagcaggaagaagccattgctcagttcccatatgtggaattcaccgggagagatagcatcacctgtctcacgtgccaggggacaggctacattccaacagagcaagtaaatgagttggtggctttgatcccacacagtgatcagagattgcgccctcagcgaactaagcaatatgtcctcctgtccatcctgctttgtctcctggcatctggtttggtggttttcttcctgtttccgcattcagtccttgtggatgatgacggcatcaaagtggtgaaagtcacatttaataagcaagactcccttgtaattctcaccatcatggccaccctgaaaatcaggaactccaacttctacacggtggcagtgaccagcctgtccagccagattcagtacatgaacacagtggtcagtacatatgtgactactaacgtctcccttattccacctcggagtgagcaactggtgaattttaccgggaaggccgagatgggaggaccgttttcctatgtgtacttcttctgcacggtacctgagatcctggtgcacaacatagtgatcttcatgcgaacttcagtgaagatttcatacattggcctcatgacccagagctccttggagacacatcactatgtggattgtggaggaaattccacagctatttaa

SEQ ID NO: 193438 - DNA, 581 bp, Homo sapiens
  Payload ID: 18190
  Gene Name: transmembrane protein 106C
  ENST ID: ENST00000548640
  CDS Start-End: 141-581
ttgttgctcgaggaggggcatagagcttacaaatagtgaagaggaaggggcgaggctggaccaggtgggagcgggggtgccccaagtcccagggcggtgaggatcgaggcaggacatgacaccagtggcatatcacggccatggggtctcagcattccgctgctgctcgcccctcctcctgcaggcgaaagcaagaagatgacagggacggtttgctggcatctggtttggtggttttcttcctgtttccgcattcagtccttgtggatgatgacggcatcaaagtggtgaaagtcacatttaataagcaagactcccttgtaattctcaccatcatggccaccctgaaaatcaggaactccaacttctacacggtggcagtgaccagcctgtccagccagattcagtacatgaacacagtggtgaattttaccgggaaggccgagatgggaggaccgttttcctatgtgtacttcttctgcacggtacctgagatcctggtgcacaacatagtgatcttcatgcgaacttcagtgaagatttcatacattggcctcatgacccagagctccttggagaca

SEQ ID NO: 193439 - DNA, 321 bp, Homo sapiens
  Payload ID: 18190
  Gene Name: transmembrane protein 106C
  ENST ID: ENST00000549288
  CDS Start-End: 67-264
gcgctgagtgcgtgccgctccgccgaccgaagaggctggacatgacaccagtggcatatcacggccatggggtctcagcattccgctgctgctcgcccctcctcctgcaggcgaaagcaagaagatgacagggacggtttgctggctgaacgagagcaggaagaagccattgctcagttcccatatgtggaattcaccgggagagatagcatcacctgtctcacgtgccaggggacaggctacattccaacagaacttcagtgaagatttcatacattggcctcatgacccagagctccttggagacacatcactatgtgg

SEQ ID NO: 193440 - DNA, 663 bp, Homo sapiens
  Payload ID: 18190
  Gene Name: transmembrane protein 106C
  ENST ID: ENST00000550146
  CDS Start-End: 94-354
ctggcgggcttggtatttggcgcctgcgcgctgagtgcgtgccgctccgccgaccgaagaggctggacatgacaccagtggcatatcacggccatggggtctcagcattccgctgctgctcgcccctcctcctgcaggcgaaagcaagaagatgacagggacggtttgctggctgaacgagagcaggaagaagccattgctcagttcccatatgtggaattcaccgggagagatagcatcacctgtctcacgtgccaggggacaggctacattccaacagagcaagtaaatgagttggtggctttgatcccacacagtgatcagagattgcgccctcagcgaacgccaccctgaaaatcaggaactccaacttctacacggtggcagtgaccagcctgtccagccagattcagtacatgaacacagtggtgaattttaccgggaaggccgagatgggaggaccgttttcctatgtgtacttcttctgcacggtacctgagatcctggtgcacaacatagtgatcttcatgcgaacttcagtgaagatttcatacattggcctcatgacccagagctccttggagacacatcactatgtggattgtggaggaaattccacagctatttaacaactgctattggttcttccacacagcgcctgta

SEQ ID NO: 193441 - DNA, 491 bp, Homo sapiens
  Payload ID: 18190
  Gene Name: transmembrane protein 106C
  ENST ID: ENST00000547682
  CDS Start-End: 1-352
tgatgacggcatcaaagtggtgaaagtcacatttaataagcaagactcccttgtaattctcaccatcatggccaccctgaaaatcaggaactccaacttctacacggtggcagtgaccagcctgtccagccagattcagtacatgaacacagtggtgaattttaccgggaaggccgagatgggaggaccgttttcctatgtgtacttcttctgcacggtacctgagatcctggtgcacaacatagtgatcttcatgcgcgcctgtagaagagagcacagcatatgttcccaaggcctgagttctggacctacccccacgtggtgtaagcagaggaggaattggttcacttaactcccagcaaacatcctcctgccacttaggaggaaacacctccctatggtaccatttatgtttctcagaaccagcagaatcagtgcctagcctgtgcccagcaaatagttggcactcaataaagatttgcagaatttaa

SEQ ID NO: 193442 - DNA, 742 bp, Homo sapiens
  Payload ID: 18190
  Gene Name: transmembrane protein 106C
  ENST ID: ENST00000552546
  CDS Start-End: 56-595
gtgccgctccgccgaccgaagaggctggacatgacaccagtggcatatcacggccatggggtctcagcattccgctgctgctcgcccctcctcctgcaggcgaaagcaagaagatgacagggacggtttgctggcatctggtttggtggttttcttcctgtttccgcattcagtccttgtggatgatgacggcatcaaagtggtgaaagtcacatttaataagcaagactcccttgtaattctcaccatcatggccaccctgaaaatcaggaactccaacttctacacggtggcagtgaccagcctgtccagccagattcagtacatgaacacagtggtcagtacatatgtgactactaacgtctcccttattccacctcggagtgagcaactggtgaattttaccgggaaggccgagatgggaggaccgttttcctatgtgtacttcttctgcacggtacctgagatcctggtgcacaacatagtgatcttcatgcgaacttcagtgaagatttcatacattggcctcatgacccagagctccttggagacacatcactatgtggattgtggaggaaattccacagctatttaacaactgctattggttcttccacacagcgcctgtagaagagagcacagcatatgttcccaaggcctgagttctggacctacccccacgtggtgtaagcagaggaggaattggttcacttaactcccagcaaacatcctcctgccactt

SEQ ID NO: 193443 - DNA, 326 bp, Homo sapiens
  Payload ID: 18190
  Gene Name: transmembrane protein 106C
  ENST ID: ENST00000548965
  CDS Start-End: 1-326
ggtctcagcattccgctgctgctcgcccctcctcctgcaggcgaaagcaagaagatgacagggacggtttgctggctgaacgagagcaggaagaagccattgctcagttcccatatgtggaattcaccgggagagatagcatcacctgtctcacgtgccaggggacaggctacattccaacagagcaagtaaatgagttggtggctttgatcccacacagtgatcagagattgcgccctcagcgaacaacttcagtgaagatttcatacattggcctcatgacccagagctccttggagacacatcactatgtggattgtggagga

SEQ ID NO: 193444 - DNA, 583 bp, Homo sapiens
  Payload ID: 18190
  Gene Name: transmembrane protein 106C
  ENST ID: ENST00000548355
  CDS Start-End: 25-279
tgacaccagtggcatatcacggccatggggtctcagcattccgctgctgctcgcccctcctcctgcaggcgaaagcaagaagatgacagggacggtttgctggctgaacgagagcaggaagaagccattgctcagttcccatatgtggaattcaccgggagagatagcatcacctgtctcacgtgccaggggacaggctacattccaacagagcaagtaaatgagttggtggctttgatcccacacagtgatcagagattgcgccctcagcgaacgtgaattttaccgggaaggccgagatgggaggaccgttttcctatgtgtacttcttctgcacggtacctgagatcctggtgcacaacatagtgatcttcatgcgaacttcagtgaagatttcatacattggcctcatgacccagagctccttggagacacatcactatgtggattgtggaggaaattccacagctatttaacaactgctattggttcttccacacagcgcctgtagaagagagcacagcatatgttcccaaggcctgagttctggacctacccccacgtggtgtaagcagaggaggaa

SEQ ID NO: 193445 - DNA, 660 bp, Homo sapiens
  Payload ID: 18190
  Gene Name: transmembrane protein 106C
  ENST ID: ENST00000553217
  CDS Start-End: 29-241
gacatgacaccagtggcatatcacggccatggggtctcagcattccgctgctgctcgcccctcctcctgcaggcgaaagcaagaagatgacagggacggtttgctggctgaacgagagcaggaagaagccattgctcagttcccatatgtggaattcaccgggagagatagcatcacctgtctcacgtgccaggggacaggctacattccaacaggtgatcatggagggatgattccctgatgagaatcccaaggtgaattttaccgggaaggccgagatgggaggaccgttttcctatgtgtacttcttctgcacggtacctgagatcctggtgcacaacatagtgatcttcatgcgaacttcagtgaagatttcatacattggcctcatgacccagagctccttggagacacatcactatgtggattgtggaggaaattccacagctatttaacaactgctattggttcttccacacagcgcctgtagaagagagcacagcatatgttcccaaggcctgagttctggacctacccccacgtggtgtaagcagaggaggaattggttcacttaactcccagcaaacatcctcctgccacttaggaggaaacacctccctatggtaccatttatgtttctcagaaccagcagaatcagtg

SEQ ID NO: 193446 - DNA, 776 bp, Homo sapiens
  Payload ID: 18190
  Gene Name: transmembrane protein 106C
  Uniprot ID: Q9BVX2
  ENST ID: ENST00000550552
  CDS Start-End: 54-749
gccgctccgccgaccgaagaggctggacatgacaccagtggcatatcacggccatggggtctcagcattccgctgctgctcgcccctcctcctgcaggcgaaagcaagaagatgacagggacggtttgctggctgaacgagagcaggaagaagccattgctcagttcccatatgtggaattcaccgggagagatagcatcacctgtctcacgtgccaggggacaggctacattccaacagagcaagtaaatgagttggtggctttgatcccacacagtgatcagagattgcgccctcagcgaactaagcaatatgtcctcctgtccatcctgctttgtctcctggcatctggtttggtggttttcttcctgtttccgcattcagtccttgtggatgatgacggcatcaaagtggtgaaagtcacatttaataagcaagactcccttgtaattctcaccatcatggccaccctgaaaatcaggaactccaacttctacacggtggcagtgaccagcctgtccagccagattcagtacatgaacacagtggtgaattttaccgggaaggccgagatgggaggaccgttttcctatgtgtacttcttctgcacggtacctgagatcctggtgcacaacatagtgatcttcatgcgaacttcagtgaagatttcatacattggcctcatgacccagagctccttggagacacatcactatgtggattgtggaggaaattccacagctatttaacaactgctattggttcttccacacagc

SEQ ID NO: 193447 - DNA, 685 bp, Homo sapiens
  Payload ID: 18190
  Gene Name: transmembrane protein 106C
  ENST ID: ENST00000615597
  CDS Start-End: 1-226
taagcaagactcccttgtaattctcaccatcatggccaccctgaaaatcaggaactccaacttctacacggtggcagtgaccagcctgtccagccagattcagtacatgaacacagtggtcagtacatatgtgactactaacgtctcccttattccacctcggagtgagcaactggtgaattttaccgggaaggccgagatgggaggaccgttttcctatgtgtagtaaggacactgttctctctgtgtgtgctctctactggaggaaagggattcaaagtcatactccattgattggggcctggtcctgccttagatctcagcttttgacttataggttccctggctttggatgtcttgagatttatttgaagaatgtattattattatgtgtgtatttgaagaatgtattatttgatatgtgacagaagtgctggaatttctaaaagagaacattaagccactaaaaacgttaccaagctccagcacttatgtgatgggtttgaaaaaacagaaagtggtatgacgctgtgggaggatgaaaatgacagtggcagggactgagagctgacaagccttggcagcacttaggtcggaagggggaggggggcaccccaaacaggacagtgtaactctgcactcttctactgaggctttaaaaaaaaaaaaactgactatttccata

SEQ ID NO: 193448 - DNA, 976 bp, Homo sapiens
  Payload ID: 18190
  Gene Name: transmembrane protein 106C
  ENST ID: ENST00000550161
  CDS Start-End: 99-644
taagtcctcaagctggcaggtggtcgggggagcggccggagaggagctgccgggagttcgtgccctgcaggacatgacaccagtggcatatcacggccatggggtctcagcattccgctgctgctcgcccctcctcctgcaggcgaaagcaagaagatgacagggacggtttgctggctgaacgagagcaggaagaagccattgctcagttcccatatgtggaattcaccgggagagatagcatcacctgtctcacgtgccaggggacaggctacattccaacagagcaagtaaatgagttggtggctttgatcccacacagtgatcagagattgcgccctcagcgaactaagcaatatgtcctcctgtccatcctgctttgtctcctggcatctggtttggtggttttcttcctgtttccgcattcagtccttgtggatgatgacggcatcaaagtggtgaaagtcacatttaataagcaagactcccttgtaattctcaccatcatggccaccctgaaaatcaggaactccaacttctacacggtggcagtgaccagcctgtccagccagattcagtacatgaacacagtggtgaattttaccgggaaggccgagatgggaggaccgttttcctatgtgtagtaaggacactgttctctctgtgtgtgctctctactggaggaaagggattcaaagtcatactccattgattggggcctggtcctgccttagatctcagcttttgacttataggttccctggctttggatgtcttgagatttatttgaagaatgtattattattatgtgtgtatttgaagaatgtattatttgatatgtgacagaagtgctggaatttctaaaagagaacattaagccactaaaaacgttaccaagctccagcacttatgtgatgggtttgaaaaaacagaaagtggtatgacgctgtgggaggatgaaaatgacagtggcagg

SEQ ID NO: 193449 - DNA, 756 bp, Homo sapiens
  Payload ID: 18191
  Gene Name: transmembrane protein 107
  Uniprot ID: Q6UX40
  ENST ID: ENST00000316425
  CDS Start-End: 114-554
gagcgggcgggaaggaggcgttcgtctagatttgtcggcttgcggggagacttcaggagtcgctgtctctgaacttccagcctcagagaccgccgcccttgtccccgagggccatgggccgggtctcagggcttgtgccctctcgcttcctgacgctcctggcgcatctggtggtcgtcatcaccttattctggtcccgggacagcaacatacaggcctgcctgcctctcacgttcacccccgaggagtatgacaagcaggacattcatccacttcctctctgcaggctggtggccgcgctctctgtcaccctgggcctctttgcagtggagctggccggtttcctctcaggagtctccatgttcaacagcacccagagcctcatctccattggggctcactgtagtgcatccgtggccctgtccttcttcatattcgagcgttgggagtgcactacgtattggtacatttttgtcttctgcagtgcccttccagctgtcactgaaatggctttattcgtcaccgtctttgggctgaaaaagaaacccttctgattaccttcatgacgggaacctaaggacgaagcctacaggggcaagggccgcttcgtattcctggaagaaggaaggcataggcttcggttttcccctcggaaactgcttctgctggaggatatgtgttggaataattacgtcttgagtctgggattatccgcattgtatttagtgctttgtaataaaatatgttttgtagtaa

SEQ ID NO: 193450 - DNA, 455 bp, Homo sapiens
  Payload ID: 18191
  Gene Name: transmembrane protein 107
  ENST ID: ENST00000431792
  CDS Start-End: 31-255
cagagaccgccgcccttgtccccgagggccatgggccgggtctcagggcttgtgccctctcgcttcctgacgctcctggcgcatctggtggtcgtcatcaccttattctggtcccgggacagcaacatacaggcctgcctgcctctcacgttcacccccgaggagtatgacaagcaggacattcatgcccttccagctgtcactgaaatggctttattcgtcaccgtctttgggctgaaaaagaaacccttctgattaccttcatgacgggaacctaaggacgaagcctacaggggcaagggccgcttcgtattcctggaagaaggaaggcataggcttcggttttcccctcggaaactgcttctgctggaggatatgtgttggaataattacgtcttgagtctgggattatccgcattgtatttagtgctttgtaataaaatatgttttgtagt

SEQ ID NO: 193451 - DNA, 747 bp, Homo sapiens
  Payload ID: 18191
  Gene Name: transmembrane protein 107
  Uniprot ID: Q6UX40
  ENST ID: ENST00000437139
  CDS Start-End: 89-511
ctagatttgtcggcttgcggggagacttcaggagtcgctgtctctgaacttccagcctcagagaccgccgcccttgtccccgagggccatgggccgggtctcagggcttgtgccctctcgcttcctgacgctcctggcgcatctggtggtcgtcatcaccttattctggtcccgggacagcaacatacaggcctgcctgcctctcacgttcacccccgaggagtatgacaagcaggacattcagctggtggccgcgctctctgtcaccctgggcctctttgcagtggagctggccggtttcctctcaggagtctccatgttcaacagcacccagagcctcatctccattggggctcactgtagtgcatccgtggccctgtccttcttcatattcgagcgttgggagtgcactacgtattggtacatttttgtcttctgcagtgcccttccagctgtcactgaaatggctttattcgtcaccgtctttgggctgaaaaagaaacccttctgattaccttcatgacgggaacctaaggacgaagcctacaggggcaagggccgcttcgtattcctggaagaaggaaggcataggcttcggttttcccctcggaaactgcttctgctggaggatatgtgttggaataattacgtcttgagtctgggattatccgcattgtatttagtgctttgtaataaaatatgttttgtagtaacattaagacttatatacagttttaggggacaatt

SEQ ID NO: 193452 - DNA, 1210 bp, Homo sapiens
  Payload ID: 18191
  Gene Name: transmembrane protein 107
  ENST ID: ENST00000449985
  CDS Start-End: 88-195
tagatttgtcggcttgcggggagacttcaggagtcgctgtctctgaacttccagcctcagagaccgccgcccttgtccccgagggccatgggccgggtctcagggcttgtgccctctcgcttcctgacgctcctggcgcatctggtggtcgtcatcaccttattctggtcccggtgcccttccagctgtcactgaaatggctttattcgtcaccgtctttgggctgaaaaagaaacccttctgattaccttcatgacgggaacctaaggacgaagcctacaggggcaagggccgcttcgtattcctggaagaaggaaggcataggcttcggttttcccctcggaaactgcttctgctggaggatatgtgttggaataattacgtcttgagtctgggattatccgcattgtatttagtgctttgtaataaaatatgttttgtagtaacattaagacttatatacagttttaggggacaattgagatggctgaactactgaataaaaaaaaaacaacgctgttttctagtcctgcagaccgtaagatacttggtatcgcttctattttggttactacggtaggtgcctggcggaagggagtgggcggagatatgtaaatagaaagtgcgtacagttagaacgtccggcacgtaactgatcggagcattctgggaagaagtaatttattccttttcggcagccgaatgaaaaaaaaatttaaaaaaatgtgcgagctaatatggcaaaacaactggaaggacgctaaataataggattgctcataccagcgcgttatgaactcaccctagcttgtaacggaatctttttcactgagtgcagaatgtcggctgtttgtctgtatcgtcaggtgggataatccttacctgttcctcctccggagggcagattagaacatgatgattggagatgcatgaaacgtgattaacgtctctgcgtaatcaggacttgcaacaccctgattgctcctgtctgattctttctgacgatcacttacatttgtgttatgctgattagcagatatccacaaacatagctatgaagttctgactgggataaccttgctgtttgtctattttgcagtcttgctattgctgtttgtctattttgcagtcttgctaaatttgtttgttcttgaaaattgtgatttggtttttgttgctttctggaatttaggcagtgaaataatacaaa

SEQ ID NO: 193453 - DNA, 2358 bp, Homo sapiens
  Payload ID: 18191
  Gene Name: transmembrane protein 107
  ENST ID: ENST00000532998
  CDS Start-End: 88-411
tagatttgtcggcttgcggggagacttcaggagtcgctgtctctgaacttccagcctcagagaccgccgcccttgtccccgagggccatgggccgggtctcagggcttgtgccctctcgcttcctgacgctcctggcgcatctggtggtcgtcatcaccttattctggtcccgggacagcaacatacaggcctgcctgcctctcacgttcacccccgaggagtatgacaagcaggacattcagctggtggccgcgctctctgtcaccctgggcctctttgcagtggagctggccggtttcctctcaggagtctccatgttcaacagcacccagagcctcatctgtatcctttctgcctgcccacctttcccacacgacccacttctatcaggactcccttcagccacctgacacaatagtgtctgctgtagccaatccttccagttcaaagatcttcaacgatgtgctaaatcctgctgtttactaggcacttaaaatcccaaaatgagagtaaaatacagtttttggccaggcatgttggctcacgtctgtaatcccagcactgtgggaggcgcaggcaggaggcaacatagtgagaacccaagtctacaaaaataataggaataataaaaaccccaccgtttctttttacaatgaggaggaggtagatacaaatctgtaattcagtgtgataagcactgtgctatagaagtgtgtgaagatagaaagcacaggcagggcgcgatggctcacgcatgtaatcccagcactttgggaggccgaggcaggtggaccacctgaggtcaggagttcgagaccggcctgaccaacatggtgaaacccccgtctctactaaaaatacaaaaattagtcgggcgtggcggcgcactcctgtaatcccagctactcaggagactgaggaaggagaattgcttgaacccgggaggcagaggttgcagtgagctgagatcgtgccactgcactccagccagggcaacagagcaagactctgtcaaaaaacaaacaaaagatataaagcacaatgggaactcagaagaggcaacggaagcgagcactgggaactcagaagaggcaaaggagatgaggcacatgggtcagagaattgtggaccaggaggaccaggacactggaggctgattccagcgcatattaagtcgctgtcagcactcctttgtggcatagcagaaggagagcctactcttacctctcatctgaaggatccaggctggcccacagataaggggtagggtagcctgaggtccgatctgtgcagtcacttctggtctctcctcacatgactgtcctaaaattcagaagtcagagctgctgactctagcccttgaaacatggtgagggagcaagggatgaacctgaatgcagatgccagccccaccactggccttttctgacccatcactgtctgtcgatccaaagactttccttaatctcgtgccttcccaagccattggggctcactgtagtgcatccgtggccctgtccttcttcatattcgagcgttgggagtgcactacgtattggtacatttttgtcttctgcaggtgtggtagcatccaatatttggggatgagggaggaaggttggccctaaacctgaaggtttttcccctacccagccctttcctccatgtgtgagataccagatccactcaacatcctgtaggcttttaaagtttcatcccctaccccccatgccacctgccctacactttcagaggtggggtctctggtttggagatttgggtatttatactgaaagggtttctgaatctaccacttgccttggtagtgcccttccagctgtcactgaaatggctttattcgtcaccgtctttgggctgaaaaagaaacccttctgattaccttcatgacgggaacctaaggacgaagcctacaggggcaagggccgcttcgtattcctggaagaaggaaggcataggcttcggttttcccctcggaaactgcttctgctggaggatatgtgttggaataattacgtcttgagtctgggattatccgcattgtatttagtgctttgtaataaaatatgttttgtagtaacattaagacttatatacagttttaggggacaattgagatggctgaactactgaataaaaaaaaaacaacgctgttttctagtcctgcagaccgtaagatacttggtatcgcttctattttggttactacggtaggtgcctggcggaagggagtgggcggagatatgtaaatagaaagtgcgtacagttagaacgtccggcacgtaactgatcggagcattctgggaagaagtaatttattccttttcggcagccgaatg

SEQ ID NO: 193454 - DNA, 726 bp, Homo sapiens
  Payload ID: 18191
  Gene Name: transmembrane protein 107
  Uniprot ID: Q6UX40
  ENST ID: ENST00000533070
  CDS Start-End: 103-522
aaggaggcgttcgtctagatttgtcggcttgcggggagacttcaggagtcgctgtctctgaacttccagcctcagagaccgccgcccttgtccccgagggccatgggccgggtctcagggcttgtgccctctcgcttcctgacgctcctggcgcatctggtggtcgtcatcaccttattctggtcccgggacagcaacatacaggcctgcctgcctctcacgttcacccccgaggagtatgacaagcaggacattcatccacttcctctctgcaggctggtggccgcgctctctgtcaccctgggcctctttgcagtggagctggccggtttcctctcaggagtctccatgttcaacagcacccagagcctcatctccattggggctcactgtagtgcatccgtggccctgtccttcttcatattcgagcgttgggagtgcactacgtattgtgcccttccagctgtcactgaaatggctttattcgtcaccgtctttgggctgaaaaagaaacccttctgattaccttcatgacgggaacctaaggacgaagcctacaggggcaagggccgcttcgtattcctggaagaaggaaggcataggcttcggttttcccctcggaaactgcttctgctggaggatatgtgttggaataattacgtcttgagtctgggattatccgcattgtatttagtgctttgtaataaaatatgttttgtagtaaca

SEQ ID NO: 193455 - DNA, 3744 bp, Homo sapiens
  Payload ID: 18192
  Gene Name: transmembrane protein 108
  Uniprot ID: Q6UXF1
  ENST ID: ENST00000321871
  CDS Start-End: 211-1938
gctttctcctgagccgtcggagggagccggagcgcttctcccgagttggtgatagattggtggtcatccaacatgcagaaatgaatgagcagtgaaaagcagcagagccgatgggtcatgaggatgtaagtgcgtttgaaggcttccacaccctctactccaggacagaatcatgaataaactggaggataagcaggaccagatgataccatgaagagaagtttacaggccctctattgccaactgttaagtttcctgctgatcttggcactgaccgaagcgctggcatttgccatccaggaaccatctcccagggaatctcttcaggtcctcccttcaggcactcccccgggaaccatggtgacagcaccccacagctctaccagacatacttctgtggtgatgctgacccccaatcccgatggacccccctcacaggctgcagctcccatggcaacaccgacaccccgtgcagaggggcaccctcctacgcacaccatctccaccatcgctgcgacagtaaccgccccccattctgaaagctccctgtccacagggcccgctccagcagccatggcaaccacatcctccaagccagagggccgccctcgagggcaggctgcccccaccatcctgctgacaaagccaccgggggccaccagccgccccaccacagcgcccccccgcactaccacacgcaggccccccaggcccccaggctcttcccgaaaaggggctggtaattcatcacgccctgtcccgcctgcacctggtggccactccaggagtaaagaaggacagcgaggacgaaatccaagctccacacctctggggcagaagcggcccctggggaaaatctttcagatctacaagggcaacttcacagggtctgtggaaccggagccctctaccctcacccccaggaccccactctggggctactcctcttcaccacagccccagacagtggctgcgaccacagtgcccagcaatacctcatgggcacccaccaccacctccctggggcctgcaaaggacaagccaggccttcgcagagcagcccaggggggtggttctaccttcaccagccaaggagggacaccagatgccacagcagcctcaggtgcccctgtcagtccacaagctgccccagtgccttctcagcgcccccaccacggtgacccacaggatggccccagccatagtgactcttggcttactgttacccctggcaccagcagacctctgtctaccagctctggggtcttcacggctgccacggggcccaccccagctgccttcgataccagtgtctcagccccttcccaggggattcctcagggagcatccacaaccccacaagctccaacccatccctccagggtctcagaaagcactatttctggagccaaggaggagactgtggccaccctcaccatgaccgaccgggtgcccagtcctctctccacagtggtatccacagccacaggcaatttcctcaaccgcctggtccccgccgggacctggaagcctgggacagcagggaacatctcccatgtggccgagggggacaaaccgcagcacagagccaccatctgcctgagcaagatggatatcgcctgggtgatcctggccatcagcgtgcccatctcctcctgctctgtcctgctgacggtgtgctgcatgaagaggaagaagaagaccgccaacccggagaacaacctgagctactggaacaacaccatcaccatggactacttcaacaggcatgctgtggagctgcccagggagatccagtcccttgaaacctctgaggaccagctctcagagccccgctccccagccaatggcgactatagagacactgggatggtccttgttaaccccttctgtcaagaaacactgtttgtgggaaacgatcaagtatctgagatctaactacagcaggcatcactttgccattccgtatttttcgtctctaaattataaatatacaaatacatatattataaatataacctttgtgtaaccctgacttaatgagaaacattttcagctttttttcctatgaattgtcaacatcttttttacaagtgtggtttaaaaaaaaaaaaaactttacagaatgatctgtggctttataaaataaaggtatttctaagcaaagcagttgcattgattgcttctcttaataactattcttgagcacctggggatcccaggaaccctggtcaggtgaggtaagagactgacctcctgtagaagctgaatgttacagtgcaagcgcacgattctttgagtgattcttaaagctctggttcctcttgatttggtgtgaccccatttcctcccttctcatacgcacacctgtaaagggaactggaccgcctcaggggaagacggcagactcatgcacagagaaggaaaagggaacatctcatcacctctgaggatgagtaccctggagccttatgacggcaccattggatgtcatgtttaattccatccaagttgtggatggcaggcaggagcatggagccctcaggaatccatggaggacatcaaggcatcccaaggccatattcccctaacattacttccactgctaacaacaggactgcctttccctggtgggaaaatgctccctttatgcccattcctgtatcccctccaacacccacatctgcattaaacacccgtgcctttctcttggagagggtttagatgcagatcccggccctggagctttaaaatgcttgcccttccttcttcaaggatcaaatgtttattggggttcagctttgttttctcaaaaggccatggtatcgtgcccctgaggaacatgtttatctaagaagctttgaggtagtagagcgataatttttgaaaccttcctcctgcaatctttaaaaaagaaaaaaaagattgcccaaacaaatcatttgggagaagacatcattatactcctacttggcactgcaaacctgctcgcagcaccagccggtggacttgccatccagctctcagcttccactgctccccttgttcccggccggctggctgcctccccgtgctgtgtccagcacggccaacaacgtcagaccctcagagacgcccaaggggcttccagaggtggccgcttctctattttttcctgattgtggctgagagagatgattactgctttgacacttcctttctctaaaagaaaaatagtttgatagtatattttgaatatagatgctcttatagtcagattgggaattgaacttgaatattgggtcatatgtttgtgttgttgctgtagtctatcatgacttttttctttctgcattttccttaaaaaaaaaaaaaagatggccttcaaaagtgtgttctcaatgttgtatgaacctccttcacatgagttcggttgttgtctctcttcaaagactcttcaacccacaaagaagcaactaaatgtttctctaagtttaattttctagcgtgttgttgtcttacctttttaaccttaccataatatttctgttaactgttacatttaatataccaatgtgtgtaagtatacagagaaaaatctgtttgtaaagtaaaatttatatataatatatgtaatcaaagatacatatgttatatatacatatgtggatgtatgacttatttttccttatccacagatttcagctaccatgtatatataaataaacttattttattagccagaggattctgttgctaatacat

SEQ ID NO: 193456 - DNA, 2165 bp, Homo sapiens
  Payload ID: 18192
  Gene Name: transmembrane protein 108
  Uniprot ID: Q6UXF1
  ENST ID: ENST00000393130
  CDS Start-End: 196-1923
agccgtcggagggagccggagcgcttctcccgagttggtgatagattggtggtcatccaacatgcagaaatgaatgagcagtgaaaagcagcagagccgatgggtcatgaggatgtaagtgcgtttgaaggcttccacaccctctactccaggaatcatgaataaactggaggataagcaggaccagatgataccatgaagagaagtttacaggccctctattgccaactgttaagtttcctgctgatcttggcactgaccgaagcgctggcatttgccatccaggaaccatctcccagggaatctcttcaggtcctcccttcaggcactcccccgggaaccatggtgacagcaccccacagctctaccagacatacttctgtggtgatgctgacccccaatcccgatggacccccctcacaggctgcagctcccatggcaacaccgacaccccgtgcagaggggcaccctcctacgcacaccatctccaccatcgctgcgacagtaaccgccccccattctgaaagctccctgtccacagggcccgctccagcagccatggcaaccacatcctccaagccagagggccgccctcgagggcaggctgcccccaccatcctgctgacaaagccaccgggggccaccagccgccccaccacagcgcccccccgcactaccacacgcaggccccccaggcccccaggctcttcccgaaaaggggctggtaattcatcacgccctgtcccgcctgcacctggtggccactccaggagtaaagaaggacagcgaggacgaaatccaagctccacacctctggggcagaagcggcccctggggaaaatctttcagatctacaagggcaacttcacagggtctgtggaaccggagccctctaccctcacccccaggaccccactctggggctactcctcttcaccacagccccagacagtggctgcgaccacagtgcccagcaatacctcatgggcacccaccaccacctccctggggcctgcaaaggacaagccaggccttcgcagagcagcccaggggggtggttctaccttcaccagccaaggagggacaccagatgccacagcagcctcaggtgcccctgtcagtccacaagctgccccagtgccttctcagcgcccccaccacggtgacccacaggatggccccagccatagtgactcttggcttactgttacccctggcaccagcagacctctgtctaccagctctggggtcttcacggctgccacggggcccaccccagctgccttcgataccagtgtctcagccccttcccaggggattcctcagggagcatccacaaccccacaagctccaacccatccctccagggtctcagaaagcactatttctggagccaaggaggagactgtggccaccctcaccatgaccgaccgggtgcccagtcctctctccacagtggtatccacagccacaggcaatttcctcaaccgcctggtccccgccgggacctggaagcctgggacagcagggaacatctcccatgtggccgagggggacaaaccgcagcacagagccaccatctgcctgagcaagatggatatcgcctgggtgatcctggccatcagcgtgcccatctcctcctgctctgtcctgctgacggtgtgctgcatgaagaggaagaagaagaccgccaacccggagaacaacctgagctactggaacaacaccatcaccatggactacttcaacaggcatgctgtggagctgcccagggagatccagtcccttgaaacctctgaggaccagctctcagagccccgctccccagccaatggcgactatagagacactgggatggtccttgttaaccccttctgtcaagaaacactgtttgtgggaaacgatcaagtatctgagatctaactacagcaggcatcactttgccattccgtatttttcgtctctaaattataaatatacaaatacatatattataaatataacctttgtgtaaccctgacttaatgagaaacattttcagctttttttcctatgaattgtcaacatcttttttacaagtgtggtttaaaaaaaaaaaaaactttacagaatgatctgtggctttataaaataaaggtatttctaagcaaagcagttgcattgat

SEQ ID NO: 193457 - DNA, 555 bp, Homo sapiens
  Payload ID: 18192
  Gene Name: transmembrane protein 108
  ENST ID: ENST00000510183
  CDS Start-End: 96-555
ggtgaggcggccagcttcatgaggaaggagaatgcattgggaagcaagaaaagaatcatgaataaactggaggataagcaggaccagatgataccatgaagagaagtttacaggccctctattgccaactgttaagtttcctgctgatcttggcactgaccgaagcgctggcatttgccatccaggaaccatctcccagggaatctcttcaggtcctcccttcaggcactcccccgggaaccatggtgacagcaccccacagctctaccagacatacttctgtggtgatgctgacccccaatcccgatggacccccctcacaggctgcagctcccatggcaacaccgacaccccgtgcagaggggcaccctcctacgcacaccatctccaccatcgctgcgacagtaaccgccccccattctgaaagctccctgtccacagggcccgctccagcagccatggcaaccacatcctccaagccagagggccgccctcgagggcaggctgcccccaccatcctgctgacaaagccaccgggggccaccagccgcccca

SEQ ID NO: 193458 - DNA, 823 bp, Homo sapiens
  Payload ID: 18192
  Gene Name: transmembrane protein 108
  ENST ID: ENST00000514894
  CDS Start-End: 556-823
cggagggagccggagcgcttctcccgagttggtgatagattggtggtcatccaacatgcagaaatgaatgagcagtgaaaagcagcagagccgatgggtcatgaggatgtaagtgcgtttgaaggcttccacaccctctactccaggacagaatcatgaataaactggaggataagcaggaccagatgataccatgaagagaagtttacaggccctctattgccaactgttaaggccctgccttctccatcagacacctgggaatcacagctggggcccctgctttggccgtttgtcctgctggaatctgatggaggaaagacgctctgagagagtaattagacgcagacagagatctctctccatagtcagaggagcctagcaggggctgaaggaactgcctgaggatgacaaagaaggggatccatgaacaaggaggtgctaacaggtttcctgctgatcttggcactgaccgaagcgctggcatttgccatccaggaaccatctcccagggaatctcttcaggtcctcccttcaggcactcccccgggaaccatggtgacagcaccccacagctctaccagacatacttctgtggtgatgctgacccccaatcccgatggacccccctcacaggctgcagctcccatggcaacaccgacaccccgtgcagaggggcaccctcctacgcacaccatctccaccatcgctgcgacagtaaccgccccccattctgaaagctccctgtccacagggcccgctccagcagccatggcaaccacatcctccaagccagagggccgccctcgagggcaggctgccc

SEQ ID NO: 193459 - DNA, 510 bp, Homo sapiens
  Payload ID: 18192
  Gene Name: transmembrane protein 108
  ENST ID: ENST00000511555
  CDS Start-End: 296-510
gtatgcaaagacagagcctctcatgagaacttggatggtggagtataaacactcatttaaaaataaatccagatgtagttggctgcagtcatctgacagaaccctgattctctcttcaataatgacgttcatttgtacctcattaattgagagtttttaataatttctccagggtaagaaaactgagtcacacaaggatatatttgtgtaacacaatttcaaaaaggcaaactcttgctcttgttaacgacagaatcatgaataaactggaggataagcaggaccagatgataccatgaagagaagtttacaggccctctattgccaactgttaagtttcctgctgatcttggcactgaccgaagcgctggcatttgccatccaggaaccatctcccagggaatctcttcaggtcctcccttcaggcactcccccgggaaccatggtgacagcaccccacagctctaccagacatacttctgtggtgatgctgacccccaatcccgatgg

SEQ ID NO: 193460 - DNA, 4833 bp, Homo sapiens
  Payload ID: 18192
  Gene Name: transmembrane protein 108
  ENST ID: ENST00000515826
  CDS Start-End: 124-1590
tccaactagactctgaaatgaattagatggagatttaaaatagggcaatttagtgggaagagatacttaatttgaagacagaatcatgaataaactggaggataagcaggaccagatgataccatgaagagaagtttacaggccctctattgccaactgttaagtttcctgctgatcttggcactgaccgaagcgctggcatttgccatccaggaaccatctcccagggaatctcttcaggtcctcccttcaggcactcccccgggaaccatggtgacagcaccccacagctctaccagacatacttctgtggtgatgctgacccccaatcccgatggacccccctcacaggctgcagctcccatggcaacaccgacaccccgtgcagaggggcaccctcctacgcacaccatctccaccatcgctgcgacagtaaccgccccccattctgaaagctccctgtccacagggcccgctccagcagccatggcaaccacatcctccaagccagagggccgccctcgagggcaggctgcccccaccatcctgctgacaaagccaccgggggccaccagccgccccaccacagcgcccccccgcactaccacacgcaggccccccaggcccccaggctcttcccgaaaaggggctggtaattcatcacgccctgtcccgcctgcacctggtggccactccaggagtaaagaaggacagcgaggacgaaatccaagctccacacctctggggcagaagcggcccctggggaaaatctttcagatctacaagggcaacttcacagggtctgtggaaccggagccctctaccctcacccccaggaccccactctggggctactcctcttcaccacagccccagacagtggctgcgaccacagtgcccagcaatacctcatgggcacccaccaccacctccctggggcctgcaaaggacaagccaggccttcgcagagcagcccaggggggtggttctaccttcaccagccaaggagggacaccagatgccacagcagcctcaggtgcccctgtcagtccacaagctgccccagtgccttctcagcgcccccaccacggtgacccacaggatggccccagccatagtgactcttggcttactgttacccctggcaccagcagacctctgtctaccagctctggggtcttcacggctgccacggggcccaccccagctgccttcgataccagtgtctcagccccttcccaggggattcctcagggagcatccacaaccccacaagctccaacccatccctccagggtctcagaaagcactatttctggagccaaggaggagactgtggccaccctcaccatgaccgaccgggtgcccagtcctctctccacagtggtatccacagccacaggcaatttcctcaaccgcctggtccccgccgggacctggaagcctgggacagcagggaacatctcccatgtggccgagggggacaaaccgcagcacagagccaccatctgcctgagcaagatggatatcgcctgggtgatcctggccatcagcgtgcccatctcctcctgctcagatcctatcacctgaaagcatgcccttccacaaatgtgaatacagtactcagggctccatctgaaaatggagtgacccctcttcttcctgtcacacatctgacaagccatggatgactccccagtgacattcctgggaacccaagagagcttaattcccaactctgttttaaaactcaaggaaattgggactccatgacctcctccagagtcttgatggctactgcctcaggagaaacagagcagttgaagcttttcaactaaatgggaaagggaacagttaacatcttgtgtttgcatagagctgcgcagtttacaaaacgcttctgcatatgtcatctctataccctccggtgttcaggacaatacaggatagtggatatcaacttgaagatcatcaagacctggactcaagttgcagtaattagttgggtgatcaagatcaatactattagcttctatgaccttcagttacctgttctgaaaatgggaagagcaatagtgccttcctcaggcagttatcatgtgggctaaataagcttcaaagtgcctgggtcagtgctgggaatatagtagagaccctgtaagtctgacttgtacttttctttcttggatgaaaggtgagaccactgaaatagtgaatgttctaacccctaggtggagctttgtccttgagccacccaatagtcatataacacagtttttctttctagatctctcttgtagaggatgttgggagaacaagaagagaactgtcattaattaagcatccattgtgtgtcaggcattgtgtttggcattttgcatccatgatctctttaattctcattacaagcctatgaagttcatcttaagtgactttccaggtggaatacatggcagagtcacaatttgaacctaggtctttctgtagccaggctggctttcagtaagtaaatgaaatggtgtttgagaagcactggaaactccctgagagaaatataatcaggccaggagcatgaacatgtgaggggaagacagcgtggagcagaactttctgttctgactcccaggccttcccgcagggcaggatctctgcatctggcattctaacaacatgggctgttagagcactggactcgggggcggaggacttggattctgcaacctctaccagcccaggttagcagcatggccttgagcaagttcacctctctaggtttccatgccccaccttctagaataagaatgtaggctgggggaaggggctgatttgtttcagcacctactgtgcaccagggacaatttgaagtgctggcagatgtatgactgcatttaatcttcccaaggaagctgacgctgagagaggttaagtaacttactcaagtcatgcaagtaatagattgtcacctagattctaattctaaattcgatgtcccttttgccctattgactaggcctaagatggcatctgtcactttgattctgtttgcttataactgctcagtagatcagaggcacaaatatctttctaccttagagaggcgtgcaaactatacaaatctgactcacagatacacttttcccctgccagcctgtgttctgtgtctatggcagtgttttgtggggcatgatgggatgtgcccctacaggctgataactgaagagctgttctgtttgtcctgattgctcccctccctctagctctaactctaccaaaactgagctggagctgaggaaacagcacttttcccacttcccagatggttccctctttatggcttctgtcacaccagctagaactcctccaggtgtttcaccatgccagctgcaggagcagagtgaaaggtagtgacaatgaagaacagagacaccagagaaggggacaggggacccgggatcttgtcccagctctgccactcacatacctgtgacctgtggcaaggcggccagcactttaggccacagtttttcctctagaataaggaggcggcctgaattagcaagtttcaggctgagcaccacagccccctccttgcccctttcctcttcaaccatctgaagaaagggttttttggaaggaagggagggaaagaggaaagagatccacaatatttgaaaagttctgtaccagctaatctctcaaatccccgttagccctaacactcagaaattccttctatgttttaaagattttttaaaaaggatctagaagactgaaaagcaaattagaagtctttttgatcaaagcagataagataaagtagaaacttaccctatctcctaaccttgtacagagacctttccaggttgagaggccagcaaggctggcagctggaaagaaagctacagaattccccaggcagcctacagggccctgggctctgggctgtgaggtctcagcctatacaggtgccagcttgtgcaactgccccacaccctggcatgaacccacccctgatgctggccagaccctcaggctgctgcgaacagagctggccctctgccaacccccggtgctggcctctctggacagcccagcctgggaccccgactccccagcacagagatggttggcaccaccaggatgtcagatgtggctcttggcttcagctctcctcatccccagaggctctggtgatgatgaacctggggcaggatatactcagtcctcacttcatggcttctccccaagaggcctctgtcacccttgtccttgtgttacccttctgcagtgtgaatctggacaggccaccccacctctctgacctcagaagccttccctgctcacaagccactcaattcacacatggttaatcaacaatatcgagacataattcttcctcctgggccctgggagtctcagggatgaacagacagggtcacatgtcacactgtgctcagtcaagctgtgtggagcccacctcaggccatctgtgcaggtgggcttttgcatcaatctaaggcaggaatcagctggtaagagcatagactggccaggtgcagtggctcacacctgtaatcaatcccagcactttaggaggctgaggcaggcggattacctgaggtcaggagttcgagaccagcctaaccaacatggcaaaaccctgtctctactaaaaatacaaaaattagccagacatggtggcaggcacctgtaatatcccagcttcttgggaggctgaggcaggagaatcgcttgatcccaggaggcagaggttgcagtgagccaagattgcgccactgcactccagcctgggcaacggagctagactccatc

SEQ ID NO: 193461 - DNA, 2470 bp, Homo sapiens
  Payload ID: 18192
  Gene Name: transmembrane protein 108
  ENST ID: ENST00000508711
  CDS Start-End: 370-687
gagagcaagacggcagcatctacggttctttctgctcaggaatgggaacccagagtgggcagtagagcggaggcaagccatgcagaggcaggagcagatgagaccctagatgccacgagaagctaaacatgtggggaaaataaagagcagattaactcaggaaaattatatggggagctcttatgctactctgaagatctgagactcgttggagaatttacaatcccaaattaactcagggagaattccaactagactctgaaatgaattagatggagatttaaaatagggcaatttagtgggaagagatacttaatttgaagacagaatcatgaataaactggaggataagcaggaccagatgataccatgaagagaagtttacaggccctctattgccaactgttaactgtcctgctgacggtgtgctgcatgaagaggaagaagaagaccgccaacccggagaacaacctgagctactggaacaacaccatcaccatggactacttcaacaggcatgctgtggagctgcccagggagatccagtcccttgaaacctctgaggaccagctctcagagccccgctccccagccaatggcgactatagagacactgggatggtccttgttaaccccttctgtcaagaaacactgtttgtgggaaacgatcaagtatctgagatctaactacagcaggcatcactttgccattccgtatttttcgtctctaaattataaatatacaaatacatatattataaatataacctttgtgtaaccctgacttaatgagaaacattttcagctttttttcctatgaattgtcaacatcttttttacaagtgtggtttaaaaaaaaaaaaaactttacagaatgatctgtggctttataaaataaaggtatttctaagcaaagcagttgcattgattgcttctcttaataactattcttgagcacctggggatcccaggaaccctggtcaggtgaggtaagagactgacctcctgtagaagctgaatgttacagtgcaagcgcacgattctttgagtgattcttaaagctctggttcctcttgatttggtgtgaccccatttcctcccttctcatacgcacacctgtaaagggaactggaccgcctcaggggaagacggcagactcatgcacagagaaggaaaagggaacatctcatcacctctgaggatgagtaccctggagccttatgacggcaccattggatgtcatgtttaattccatccaagttgtggatggcaggcaggagcatggagccctcaggaatccatggaggacatcaaggcatcccaaggccatattcccctaacattacttccactgctaacaacaggactgcctttccctggtgggaaaatgctccctttatgcccattcctgtatcccctccaacacccacatctgcattaaacacccgtgcctttctcttggagagggtttagatgcagatcccggccctggagctttaaaatgcttgcccttccttcttcaaggatcaaatgtttattggggttcagctttgttttctcaaaaggccatggtatcgtgcccctgaggaacatgtttatctaagaagctttgaggtagtagagcgataatttttgaaaccttcctcctgcaatctttaaaaaagaaaaaaaagattgcccaaacaaatcatttgggagaagacatcattatactcctacttggcactgcaaacctgctcgcagcaccagccggtggacttgccatccagctctcagcttccactgctccccttgttcccggccggctggctgcctccccgtgctgtgtccagcacggccaacaacgtcagaccctcagagacgcccaaggggcttccagaggtggccgcttctctattttttcctgattgtggctgagagagatgattactgctttgacacttcctttctctaaaagaaaaatagtttgatagtatattttgaatatagatgctcttatagtcagattgggaattgaacttgaatattgggtcatatgtttgtgttgttgctgtagtctatcatgacttttttctttctgcattttccttaaaaaaaaaaaaaagatggccttcaaaagtgtgttctcaatgttgtatgaacctccttcacatgagttcggttgttgtctctcttcaaagactcttcaacccacaaagaagcaactaaatgtttctctaagtttaattttctagcgtgttgttgtcttacctttttaaccttaccataatatttctgttaactgttacatttaatataccaatgtgtgtaagtatacagagaaaaatctgtttgtaaagtaaaatttatatataatatatgtaatcaaagatacatatgttatatatacatatgtggatgtatgacttatttttccttatccacagatttcagctaccatgtatatataaataaacttattttattagcc

SEQ ID NO: 193462 - DNA, 681 bp, Homo sapiens
  Payload ID: 18192
  Gene Name: transmembrane protein 108
  ENST ID: ENST00000512137
  CDS Start-End: 236-681
gaagctagtctacacacatggatgggactatggaaatatacatgtgacttttaaacctgaacagtagctgttggtgatagattggtggtcatccaacatgcagaaatgaatgagcagtgaaaagcagcagagccgatgggtcatgaggatgtaagtgcgtttgaaggcttccacaccctctactccaggacagaatcatgaataaactggaggataagcaggaccagatgataccatgaagagaagtttacaggccctctattgccaactgttaagtttcctgctgatcttggcactgaccgaagcgctggcatttgccatccaggaaccatctcccagggaatctcttcaggtcctcccttcaggcactcccccgggaaccatggtgacagcaccccacagctctaccagacatacttctgtggtgatgctgacccccaatcccgatggacccccctcacaggctgcagctcccatggcaacaccgacaccccgtgcagaggggcaccctcctacgcacaccatctccaccatcgctgcgacagtaaccgccccccattctgaaagctccctgtccacagggcccgctccagcagccatggcaaccacatcctccaagccagagggccgccctcgagggcaggctgcccccaccatcctgctgacaaagccaccgggggc

SEQ ID NO: 193463 - DNA, 874 bp, Homo sapiens
  Payload ID: 18192
  Gene Name: transmembrane protein 108
  ENST ID: ENST00000512662
  CDS Start-End: 510-874
ccggagcgcttctcccgagttggtgatagattggtggtcatccaacatgcagaaatgaatgagcagtgaaaagcagcagagccgatgggtcatgaggatgtaagtgcgtttgaaggcttccacaccctctactccaggatgcttttcaacttatggtggtgtgacatcctgataaacacaatacagaatcatgaataaactggaggataagcaggaccagatgataccatgaagagaagtttacaggccctctattgccaactgttaaggttatctatgaagcacttgtgatgtttttgagcagtaaccaccattttttgagtatgtacatgttacacagcctgtcatataccaatcatgtcagtcaggatccccacagggagcagatggcactcaactggggtttcctgctgatcttggcactgaccgaagcgctggcatttgccatccaggaaccatctcccagggaatctcttcaggtcctcccttcaggcactcccccgggaaccatggtgacagcaccccacagctctaccagacatacttctgtggtgatgctgacccccaatcccgatggacccccctcacaggctgcagctcccatggcaacaccgacaccccgtgcagaggggcaccctcctacgcacaccatctccaccatcgctgcgacagtaaccgccccccattctgaaagctccctgtccacagggcccgctccagcagccatggcaaccacatcctccaagccagagggccgccctcgagggcaggctgcccccaccatcctgctgacaaagccaccgggggccaccagccgccccaccacagcgcccccccgcactaccacacgcaggccccccaggcccccaggctc

SEQ ID NO: 193464 - DNA, 2413 bp, Homo sapiens
  Payload ID: 18193
  Gene Name: transmembrane protein 109
  Uniprot ID: Q9BVC6
  ENST ID: ENST00000227525
  CDS Start-End: 404-1135
gtagctctagaactacatgacccaaaatgccgagtggtggcaagaggaggattagcttccactccgatttcaaagatccagtttacccactctacagcccagatatagtcacttatttcccctttccagccagagacttccgttccctgctggaacttccgatcccattcttctctcggtgggaatgcttgtggggggaaaaagaaacgcaatagataaagcggggcgcatgcgctcccggcacaggcttcgattgtgaggaaggccggctagtctccgagctcatcccgccttgcgcatgcggagaaggtaaaccagcgccccgagttgaggcgcgggtttggtggcgcgtttcagcgaagtcgcacgtgaaggatagcagtggcctgagaaagacccagtcatggcagcctccagcatcagttcaccatggggaaagcatgtgttcaaagccattctgatggtcctagtggcccttatcctcctccactcagcattggcccagtcccgtcgagactttgcaccaccaggccaacagaagagagaagccccagttgatgtcttgacccagataggtcgatctgtgcgagggacactggatgcctggattgggccagagaccatgcacctggtgtcagagtcttcgtcccaagtgttgtgggccatctcatcagccatttctgtggccttctttgctctgtctgggatcgccgcacagctgctgaatgccttgggactagctggtgattacctcgcccagggcctgaagctcagccctggccaggtccagaccttcctgctgtggggagcaggggccctggtcgtctactggctgctgtctctgctcctcggcttggtcttggccttgctggggcggatcctgtggggcctgaagcttgtcatcttcctggccggcttcgtggccctgatgaggtcggtgcctgacccttccacccgggccctgctactcctggccttgctgatcctctacgccctgctgagccggctcactggctcccgagcctctggggcccaactcgaggccaaggtgcgagggctggaacgccaggtggaggagctgcgctggcgccagaggcgagcggccaagggggcccgcagtgtggaggaggagtgagccggatgccccacacaccgccagtgtcataccaaagagctgagctgcttcggggccatgcagccctcctgccagccccctgcccttttcttgccctgtctctgaaccttcagaacattgatccttgccgcagccccactagccaagagaaacagagaaagaccattccccctgcctgtccttgcggccctgtcttctgaggttctctgtctggggttggctctcttaaccctttctctgctcccagcctgcctcaccagggaaggttggaggggcctccctctggcttctgcatctgcgccagcaaacatcactgccgttggtctctcatgacttaactggcttccctctgctgctgccttggcttcctcctaatgctcgtgctctcctgtccttctgaagttgctccttggccaaatctccagctcccttcttgttttcctcatcctcctaccctgtactcccaccaaaccatggtcctttaaggcacgctcctgtcctcctcattgcccagcagtagggaggggcaggggtaaggggacctgaggataaagggtggggaaacagggtcccctgaggcctgtgggggctgcaggggaggaggatgtaccttgtgtctctttcaagtgccttaatccgagccagcagggccttctgcttgcctgctgccatactgtatgtaggaaagtgttctgtggctgctttgtgtcaagaaaagagcagtcactctcagaatcttgattccccatcagccaaagcaaaagatggctgctgctttgtaggcatgtgcctgcaagtgggaccttgctgggcattatatgccctgtgggggtttcagagaccctgaaagaggagggaggacccgcctccttgtctgcacaactgcatgcacttctctccccatcgctccacaacctgaaaccgagaaggagttgctgaccagtgcccaccccggcagcccgggaggaacacaggcagctcctttcccttcacgtggtctgcagagagcagggtgagctgccagctgcccctctccaccagggtaccctgtcttggtggttaggggccacttttcctttgaggctctagtggaggtggatgtccttctctgccaggcttggcacatgatgtgaagaataaatgcccaattcttactgttcaggtttgatgtggaatcacagctgcagtgatatatattttttatcagtgcttggttggttttaaataaagtgcacgctattttattatcttgttctgaataaaatgtatttactccaa

SEQ ID NO: 193465 - DNA, 1959 bp, Homo sapiens
  Payload ID: 18193
  Gene Name: transmembrane protein 109
  Uniprot ID: Q9BVC6
  ENST ID: ENST00000536171
  CDS Start-End: 17-748
cctggcagacccagtcatggcagcctccagcatcagttcaccatggggaaagcatgtgttcaaagccattctgatggtcctagtggcccttatcctcctccactcagcattggcccagtcccgtcgagactttgcaccaccaggccaacagaagagagaagccccagttgatgtcttgacccagataggtcgatctgtgcgagggacactggatgcctggattgggccagagaccatgcacctggtgtcagagtcttcgtcccaagtgttgtgggccatctcatcagccatttctgtggccttctttgctctgtctgggatcgccgcacagctgctgaatgccttgggactagctggtgattacctcgcccagggcctgaagctcagccctggccaggtccagaccttcctgctgtggggagcaggggccctggtcgtctactggctgctgtctctgctcctcggcttggtcttggccttgctggggcggatcctgtggggcctgaagcttgtcatcttcctggccggcttcgtggccctgatgaggtcggtgcctgacccttccacccgggccctgctactcctggccttgctgatcctctacgccctgctgagccggctcactggctcccgagcctctggggcccaactcgaggccaaggtgcgagggctggaacgccaggtggaggagctgcgctggcgccagaggcgagcggccaagggggcccgcagtgtggaggaggagtgagccggatgccccacacaccgccagtgtcataccaaagagctgagctgcttcggggccatgcagccctcctgccagccccctgcccttttcttgccctgtctctgaaccttcagaacattgatccttgccgcagccccactagccaagagaaacagagaaagaccattccccctgcctgtccttgcggccctgtcttctgaggttctctgtctggggttggctctcttaaccctttctctgctcccagcctgcctcaccagggaaggttggaggggcctccctctggcttctgcatctgcgccagcaaacatcactgccgttggtctctcatgacttaactggcttccctctgctgctgccttggcttcctcctaatgctcgtgctctcctgtccttctgaagttgctccttggccaaatctccagctcccttcttgttttcctcatcctcctaccctgtactcccaccaaaccatggtcctttaaggcacgctcctgtcctcctcattgcccagcagtagggaggggcaggggtaaggggacctgaggataaagggtggggaaacagggtcccctgaggcctgtgggggctgcaggggaggaggatgtaccttgtgtctctttcaagtgccttaatccgagccagcagggccttctgcttgcctgctgccatactgtatgtaggaaagtgttctgtggctgctttgtgtcaagaaaagagcagtcactctcagaatcttgattccccatcagccaaagcaaaagatggctgctgctttgtaggcatgtgcctgcaagtgggaccttgctgggcattatatgccctgtgggggtttcagagaccctgaaagaggagggaggacccgcctccttgtctgcacaactgcatgcacttctctccccatcgctccacaacctgaaaccgagaaggagttgctgaccagtgcccaccccggcagcccgggaggaacacaggcagctcctttcccttcacgtggtctgcagagagcagggtgagctgccagctgcccctctccaccagggtaccctgtcttggtggttaggggccacttttcctttgaggctctagtggaggtggatgtccttctctgccaggcttggcacatgatgtgaagaataaatgcccaattcttactgttcaggtttgatgtggaatcacagctgcagtgatatatattttttatcagtgct

SEQ ID NO: 193466 - DNA, 2095 bp, Homo sapiens
  Payload ID: 18194
  Gene Name: transmembrane protein 11
  Uniprot ID: P17152
  ENST ID: ENST00000317635
  CDS Start-End: 473-1051
cgcggaggggcccggcgctagtagcccgcagacagcgcggcggcccccagcgggagaggcagcctggcggccaggacagcgcggccgggcgcctccgcgcagtgctctgggagttgtaggcacttgcctctcctctctccttcagctactggctctcgaaactcaaggacctaccggtgggtgggcgcctgtgactcccaggctgcgaacgccgggaactcagtttcttcagaaatgctcgaaccaggacggctcctggagtcctcgcgccctcgcagaaggactacgggccccggcgaccccgggggcggggcttccggcgcgctgccttgtgggcacggtagttccgccgggtctggcttccgcctgccgagcggccccggaccgcaggccggactacacttcccgtcggcccgcctgctctcccgatgccgccttggcgcgagacgttggcaagcagagtgtctccaagatggccgcttggggaaggaggcgtcttggcccgggcagcagtggcggcagcgcccgagagagggtgagcttgtcggccacagactgctacattgtgcatgagatctacaatggggagaatgcccaagaccagtttgagtacgagctggagcaggccctggaagcccagtacaagtacattgtgattgagcccactcgcattggcgacgagacagcccgctggatcaccgtgggcaactgcctgcacaagacggccgtgctggcgggcaccgcctgcctcttcaccccgttggcgctgcccttagattattcccactacatttccctgcccgctggtgtgctgagcctggcctgctgcaccctctatgggatctcctggcagtttgacccttgctgcaagtaccaagtggagtacgacgcctataaactgtcgcgcctgcctctgcacacactcacctcctccaccccggtggtgctggtccggaaggacgacctgcacagaaagagactgcacaacacgatagcactggccgccctggtgtactgtgtaaagaagatttacgaactctatgccgtatgatttcagtagaacagggagcgaagcaaaaccacccggcccacaagagacaacagagtattcagatcgccacactctgtgaggcagcagagcctgggcaggtgtttggcttagtatttgttatttttaaaaaataacagatcacgggtgtacccagggtttttcagctcattacactaagatgtggatttccataacccaagaggggggtctgaggctgtggaagtccgactgggcagtggaatgctgatggaggcagacgctgccgagggggtgtggacgtgctttgggggaggtctttaagtctattgtttaactgtaccatccagagcccaccagaagctattgatcattaaaattatgagaatttcaactcccgctgttctctctttccatgactgcccgcagctgctgctgcacatctgctctgggtggcggcttgcacatggaaggagcaggtgccatggtagccaccctgccctgctcctagctgcggcccagtgttaccacttacagcgacgacaagcctagatccaaggtagtcctggggccaaaccccgcccaggagcagtctcctggctcaccttggcctcatcattccgaaggccatcactgccaccatgctgttcaggaacatggtaggataaggtgacgaggcttggaggcctttgggtgtccacttgagttcacgtggggaactctgggctccaggatcgctcttcagagatctgaacacctgtgttttctttgaagcaccaaaactcttcctactgtggaccatgagtttattaacccattgccctaggctgacagaagagccctcggagcaatcttggaagcaccccctggcctcagtgctcgctgttccacaggagccaagccggtgcttctccctcacaccagaaggtagactgtgtcacctgccacatttcctctaaggcaggggtggccaatcttgacttccctgtgccacattggaaaaagaattgtcttggaccacacataaaatacactaacgacagctgatgagctaaaaaaaaaaaaaaa

SEQ ID NO: 193467 - DNA, 4769 bp, Homo sapiens
  Payload ID: 18195
  Gene Name: transmembrane protein 110
  Uniprot ID: Q86TL2
  ENST ID: ENST00000355083
  CDS Start-End: 147-1031
cgggttacgcgcggcgcggagtcggcggccgggcggaggtaccggctcaggcttgggatcccggctgcgggtttggcggcgctgcgccggcaggcagcgaggccgggcgggccctgggccctcgcgcccctcccgcgaggcctgtcatgcagggccccgccgggaacgcgagccggggactgccaggcgggccgccctccacagtcgcgtccggggcgggccgctgcgagagcggcgcgctcatgcacagcttcggcatcttcctgcaggggctgctcggcgtcgtggccttcagcacgttaatgctcaaacgcttcagagaaccaaagcatgaaagacgtccgtggaggatatggtttttagacacttccaaacaagccataggaatgctgttcatccactttgcaaatgtatacctagcagatctcactgaagaggacccttgttcactgtacctcatcaacttcctcctggacgccactgtgggcatgctgctcatctacgtgggggtgcgcgccgtcagcgtcctggtagagtggcagcagtgggagtccctgcgcttcggcgaatatggagaccctctgcagtgtggagcctgggtcgggcagtgcgctctttacatcgtgatcatgatttttgaaaagtctgtcgtcttcatcgtcctcctaatacttcagtggaaaaaggtggccctgttgaatcccattgaaaacccagacttgaagctggccatcgtcatgctgatcgtccccttctttgtcaacgctttgatgttttgggtagtggacaatttcctcatgagaaaggggaagacgaaagctaagctagaagaaaggggagccaaccaggactcgaggaatgggagcaaggtccgctaccggagggccgcatcccacgaggagtctgagtctgagatcctgatctcagcggatgatgagatggaggagtccgacgtggaggaggacctccgcagactgacccccctcaagcctgtgaagaaaaagaagcaccgctttgggctacccgtatgacacattcccatgctgggggtgacgggagggccccgccagccgctggtgtgcagaggtcatcccgcagcatcgttccttaccctctctctgcccttcctttctacctctgctcctcttgctgtctctgcccgctctcgcctgcccccagactactgtgacttaaaaagagggaagaggagccagcgcccgagggggccactggcggctggaggtccccattcagttgcactacaaacactgaccaaatatgcaaggaaggagctgtgtttgtttgttgtcgtcccagacagtgttgtgagggacctgaggccctgccccgtgtccgaccaccgagtggcaaggtggaaggaagcacaggcacacagaccgtgggtgggtctcctcaccgtggctgtgggcagtgcgaacacataacaccctcgggctaaaagtgactcgttgaccaagttggaaccggaatgctttcttactcaaaatggcttttgtaactattgatttctgaagctggttttatgagttgtgacagtgttaccaggttgggggtatgtgtttatttcctacaaagtacttacgggactaatgggcaaaacagagatttttaagtcttccgtatgctgtttgacttttatatttttaagttatattttcatactattgtatttaaaaactctttttagtccccaaagaaatgggtttatttgcctttcatggggtgtgggctggcaggaggaaaaatcgggagttttttatttggaatattattagatgatgccctatgataagatgagacaaatgatggggagggaaggaggatggcccttctctagaatcagcaaacccaatggttctgtgaaggtcagacccaagcttggagcagctggtctggatgcagatccaggagctgcagagtgtggaacaggaaaggctctgcccagggcccatgagctctagcattcctgctggcagattagagatcttagttaaatttgaccaagaaaggagcttagctaagaggtctttgtttccagaggacccaagactaccagactcctgtgcagtctgcctgtctgcagagcctccaatcacggtttaaagtggtcttggcctcccagcccccactgctgcagccttcagagccagcctctggactcagcgccaggagcctcctctcctgctgccctggtacctgtcatcctagtgtcacctatttgttttgcacagcattctggagaacatgtgcctcacaaagtgatcctgtttttctcaccctccaaagctgaggtggctaagggaggcaggggtgagagagctcactctctaaaccacaggcagggcaaggtgcttctaggccgtgtcccctccctggggaatggtcactactcctcagcatggccacaggcccctgtggttttgggagtttgctgagtgactgtggaatgggctgaccccagccgtttccctgctgtggaaacagcaaggtaggggcactgcttggtggtttgtcaagctcagaggcagccacggatggttaggaacaggaagccacactgctaaggtgtgatgagctagaagggagacatcctggacttcaagtgagacaagtgcagaggaggccactccacttaggaccttccttttagacctgcatgagcacgtgtttcacttaagcacattgggtccgaattgggcgcatgaacccagctgttaaaccaggtaccctgggactgccctctgcctctcagagccctacctgtcctggacttgaaggcgagcatcaggcaggccttctcagcccatcttccaccaggagtgcagagccagggtgctgagaggagcagggactgtaactacagtaggaggcaactttgctggtgtcattcctgctcggattgactttgtgctccctcccatccacagctatggtagccagtatttccccagcagctctctagtggggaagagtggctagaaccaggccattctcagtcgaatttaggaagaccaagactcatgttcctgacaggacggtcattccctcatggcatcactgactcagttctaattcctcccctcctgtttcattttggtttgaacaacctgtgcctgcagctgtttcttccaccttcctggagctcacaattggagcttcatgttcagtcttgagctcctaatgtttccagacagggcaggggataggagagccataatctatgaaagctgtgaaacaaaccctgggttatatagatctcagatggtctcatctgaaggctttgcccacttcccagtgagcagagggtttggggaacaaagaggtagctgaagagtggtggtttttccctgtatcctgattttcagaaagggctttagtctctgagctgtggctagtagctggctggctgaccaggggacgggggtctaatagggtgtctgaccataggacacctctcgtgtttggccttccctttcttgtgtgtttgtgtgtgtgtgtgcacgtgcacgtgcacacacatgtacacacacaaatctgtatccccaggagtgcctcctgcagtcactgggggctcttccgtggtgcaccatcccatgagagcagatcagagggctgtggtcaggacttcctcccgagctgccctccctccctgggatgagtttcctctccacctgctccaaggtgccttacgaggtgcagctcttcacctggccacatggcatccatcaccgtgttgagaaatggtgggacgttggctggatattgtgtgctatgaatctgatttgtccaaatctggacctcagccaagccacctgtggtggaaccttgcaagtcaaggtcatgaacaaatttcttgtaactattggaaataaactaatgaggtagaactgtcatatccaaatggaagaggtggttggtactgttacttccttttgctgtcagagggttgttgacaatggcaaggggggatgttagtgagatccaggtggtggtggcttcttggtccactcagcttgcacacatgcaagaggagggtctgtggcccctcagccgtgctggtggcctccttcctcaagctttaacttgtgccctccctggcaacagggagtcatgggttaatgtcacctgtcatgcctctttcttcagggaaaatattaaaaggctcaaatccaagctgtgacttcccttagacagtgtaagcctgtagggtgcagccccaagtttatgtccaaaggctgcctcagaaccctggagggagcagcgcccagctggcagctcactctgcccttgcagttcactggccttttcgcagccaggctaagataggcagtgcaaggagcttcccactggccagagcagctgccttgtagaatgtggggctggcttttagaagtttcacacgcttgcagctaagagtgcagagctctctgttttacttcgtgaaacattagcagctctgaggggcttggcttttggtaagggacttatggtctgacttgccacaagcaccttgagctcctgggttggttggtggttggttggttgggttgttttaaatttgatttttcttttcctgaagtttgttagaagtcagacctatgcaaggaaaaccatggcccacttcagcagccatccagtgggggtgcttaatcggtggtggtaggattcatggaaacgtttttttgaaatgaaagagaagatgatgtacttacattgtaaaatggtttacaataaagtttggcatctta

SEQ ID NO: 193468 - DNA, 514 bp, Homo sapiens
  Payload ID: 18195
  Gene Name: transmembrane protein 110
  ENST ID: ENST00000485356
  CDS Start-End: 1-269
ggtttttagacacttccaaacaagccataggaatgctgttcatccactttgcaaatgtatacctagcagatctcactgaagaggacccttgttcactgtacctcatcaacttcctcctggacgccactgtgggcatgctgctcatctacgtgggggtgcgcgccgtcagcgtcctggtagagtggcagcagtgggagtccctgcgcttcggcgaatatgaagagaaggccaagagtttgctgatgagaatgcgggactcagggaaataagccacacagccccggcggttgagaccagatccaggtgacgcatggtgtctgcactctgattaccaggccactctttcccatgtggaagccctgacatctgggtcacggtgcttcatgggtcttgctgcccatccctggccaaactctcccttttgaaagcctctcgccacagatgtgttccctccttttggcccctattgctgtgacttctactgaggaaataattaaacccaaacaaaacaccc

SEQ ID NO: 193469 - DNA, 525 bp, Homo sapiens
  Payload ID: 18195
  Gene Name: transmembrane protein 110
  ENST ID: ENST00000482155
  CDS Start-End: 1-120
ctgatctcagcggatgatgagatggaggagtccgacgtggaggaggacctccgcagactgacccccctcaagcctgtgaagaaaaagaagcaccgctttgggctacccggaccagagtgagaaggaaccttacgaagcctcatggcaggagtgggagccagcaactgcccagtgaaaagccaaacatgctcttgccatgtccatctccacttcttcgctagtgagaattaaagcaagtccgtctctgaggaggacatcgtgttggggaggtagagtataagcagtgagtagcccacatccttgtccctgaggctgcggggctggaaggaggtccctgggcagagccgcagcatcaggtgccatctgcaggggcacccctggaactagtggaaggcccccacaaggcctggcctgccctcagctgcctcttggcccatgtgccacatcctgggcattcctcatgtcagcacttgtctcagatcaagcctggcagtcctctcattggcctcctggagccagggtgtc

SEQ ID NO: 193470 - DNA, 458 bp, Homo sapiens
  Payload ID: 18195
  Gene Name: transmembrane protein 110
  ENST ID: ENST00000467979
  CDS Start-End: 94-291
tgggatcccggctgcgggtttggcggcgctgcgccggcaggcagcgaggccgggcgggccctgggccctcgcgcccctcccgcgaggcctgtcatgcagggccccgccgggaacgcgagccggggactgccaggcgggccgccctccacagtcgcgtccggggcgggccgctgcgagagcggcgcgctcatgcacagcttcggcatcttcctgcaggggctgctcggcgtcgtggccttcagcacgttaatgctaataatttgtgacaacttagccaaaatccgctgctgacttgggcgcatgtactgtacgtgtgtgttttcaagacatgtcaaacgcttcagagaaccaaagcatgaaagacgtccgtggaggatatggtttttagacacttccaaacaagccataggaatgctgttcatccactttgcaaatgtatacctagcagatctcactga

SEQ ID NO: 193471 - DNA, 899 bp, Homo sapiens
  Payload ID: 18196
  Gene Name: transmembrane protein 114
  ENST ID: ENST00000568335
  CDS Start-End: 198-626
gtgggttaaggtgctggtggggaaggactagagcttccaggagggtctgaaggcggaggtggaggtcggacagcacaagtgagagtgagggggtctgcaggtagagctggcattggaggggtgggaacgtggacggcggctgagcggggggcgcgtgcaggtcggagccggcagtgcagagcccgtgcacaccgctgatgaaccccttcaggctggagaacgtgacagtcagcgaatcgagccggcaacttctcaccatgcatgggacatttgtgattctgctgccgctcagcctgatcctgatggtttttggggggatgacggggtttctgagcttcctcctccaagcctacctcctcctcctgctcactggaattctcttcctctttggagccatggtgaccctcgctgggatcagcgtctacatagcgtattcagccgccgccttccgggaggcgctgtgtctcttggaggagaaggccctcctggaccaggtggacatcagcttcggctggtccctggccctgggctggatcagcttcatcgccgagctgctcaccggggcagccttcctggcagcagcccgcgagctcagcctgagacggaggcaggaccaggccatatgagcctgggcgctgggtcgtggaggggagggaggggcttggccccggagcttcaccgaccgatctccatcggctgcggcctcttcttcctcaaaggccactcggggaggccaggcacccccctccttcccccacaaatccccgcggactaagcttggggcctggctgttatcctagtacctgtgtgcttatgtccgtgtgtgtccgtgtggcctggaggagcccgagggagtgccaaaccgcttcgcgagaaataaaaacgatcctttaatcaca

SEQ ID NO: 193472 - DNA, 945 bp, Homo sapiens
  Payload ID: 18196
  Gene Name: transmembrane protein 114
  Uniprot ID: B3SHH9
  ENST ID: ENST00000620492
  CDS Start-End: 1-672
atgcgggtgcacctgggcgggctggccggcgcggctgcgctgaccggggcgctcagctttgtgctcctggcggccgccatcggcacggacttctggtatatcattgacaccgagcggctggagaggactggcccgggggcgcaggacctgctggggtccatcaatcgcagccagcccgagcctctgagctcccactccggcctctggcggacctgccgggtgcagagcccgtgcacaccgctgatgaaccccttcaggctggagaacgtgacagtcagcgaatcgagccggcaacttctcaccatgcatgggacatttgtgattctgctgccgctcagcctgatcctgatggtttttggggggatgacggggtttctgagcttcctcctccaagcctacctcctcctcctgctcactggaattctcttcctctttggagccatggtgaccctcgctgggatcagcgtctacatagcgtattcagccgccgccttccgggaggcgctgtgtctcttggaggagaaggccctcctggaccaggtggacatcagcttcggctggtccctggccctgggctggatcagcttcatcgccgagctgctcaccggggcagccttcctggcagcagcccgcgagctcagcctgagacggaggcaggaccaggccatatgagcctgggcgctgggtcgtggaggggagggaggggcttggccccggagcttcaccgaccgatctccatcggctgcggcctcttcttcctcaaaggccactcggggaggccaggcacccccctccttcccccacaaatccccgcggactaagcttggggcctggctgttatcctagtacctgtgtgcttatgtccgtgtgtgtccgtgtggcctggaggagcccgagggagtgccaaaccgcttcgcgagaaataaaaacgatcctttaatcaca

SEQ ID NO: 193473 - DNA, 560 bp, Homo sapiens
  Payload ID: 18196
  Gene Name: transmembrane protein 114
  ENST ID: ENST00000624696
  CDS Start-End: 1-534
atgcgggtgcacctgggcgggctggccggcgcggctgcgctgaccggggcgctcagctttgtgctcctggcggccgccatcggcacggacttctggtatatcattgacaccgagcggctggagaggactggcccgggggcgcaggacctgctggggtccatcaatcgcagccagcccgagcctctgagctcccactccggcctctggcggacctgccgggtgcagagcccgtgcacaccgctgatgaaccccttcaggctggagaacgtgacagtcagcgaatcgagccggcaacttctcaccatggtgaccctcgctgggatcagcgtctacatagcgtattcagccgccgccttccgggaggcgctgtgtctcttggaggagaaggccctcctggaccaggtggacatcagcttcggctggtccctggccctgggctggatcagcttcatcgccgagctgctcaccggggcagccttcctggcagcagcccgcgagctcagcctgagacggaggcaggaccaggccatatgagcctgggcgctgggtcgtggagggga

SEQ ID NO: 193474 - DNA, 2197 bp, Homo sapiens
  Payload ID: 18197
  Gene Name: transmembrane protein 115
  Uniprot ID: Q12893
  ENST ID: ENST00000266025
  CDS Start-End: 548-1603
ccaaggactccgtatcccagcatgcagaggagccggaagacaggcgcttagaggacagcccgctgccgccggggacgcgcaggcgcagcacccctgtttgtcggccccccgagagaagaggtacggtcgaagccaggagccaggccgagcgggagctgaccaggcttgactcgggtacagaacgaggcaccagtccccttgcgaaccgaagggcctcgcagtggatggaggaggcccagccctgaggtcaacgccaaccaggctagcctggcacggggcctacagggtgggtaggcgggcgtgccgcagccgtccagggccttccctcaggtcccgggcgaggggcctacgctgcggcccggcaacaaggcccgactcggcccctcgggaccagagccccacccgatcggaagcggatcctttaccagggccataggccagtgactaggccgggcctgggcctcccatcggggccggactaggacgaggccccggggaggcccctggcctaccagacccttttctcaggccgacagccgccaggaagatgcaacgtgccctgccaggcgcccgccagcacttgggggccattctggccagcgccagcgtggtggtgaaggctctgtgtgcggcggtactattcctctacctgctctccttcgccgtggacacaggctgcctggcggtcaccccgggctacctctttcctcccaacttctggatctggaccctggccacccatgggctgatggagcagcatgtgtgggacgtggccatcagcctgacaacggtggtggtggccgggcgtttgctggagcccctctggggggccttggagctgctcatcttcttctcagtggtgaatgtgtctgtagggctgctgggggccttcgcctacctcctcacctacatggcttccttcaacctggtctacctgttcactgtccgtatccacggcgccttgggcttcctaggtggcgtcctggtggcactcaagcaaaccatgggggactgtgtggtcctgcgagtgccccaggtgcgcgtcagtgtgatgcccatgctgctgctggcgctgctgctcctgctgcggctcgccacgctgctccagagcccggcgctggcttcctatggcttcgggctgctctccagttgggtatatcttcgcttctaccagcgccatagccggggccgaggggacatggctgaccactttgctttcgccactttcttccctgagatcctgcagcctgtggtgggtttgctggcgaacttggtgcacagcctcctggtgaaggtaaagatatgccagaagacggtgaagcgctacgatgtgggtgccccatcctccatcaccatcagcctgccaggcacagaccctcaagacgccgagcggagaaggcaactggccctgaaggcactcaatgagcggctgaagagagtggaagaccagtccatctggcccagcatggatgatgatgaagaggagtctggggccaaggtggacagccccctgccctcagacaaagctcccacacccccagggaagggggctgccccagaatccagtctaatcaccttcgaggcagctcccccgacgctgtaactccagaccaccttgagtgtggcacctcccctcccaagccccccttgacatcctctcagctactccagggcacctgactgctctgaggagagggaagaaggcctgctggggctttccatggccttctgctgtttctcgccaacactacccaggactcttgctacctggttccaactccagacaaccactatgccaggcccggagcctctgaggcatcggccagtccaggccctcatctgaggtaagaatgtacatcagctggcagccccaagcaagtggctgcagggacactgatgccacagctcctgggccggccctcacatctgaaactggttgccgagagccctgagccaaggcaaggatttgccaaaaatgttctgggggcccagcaaatgcaggagccgacctggggctgcacatccctgcccatccccagaaagactgttcctgtcaggatttgtttccctctgctgtggcggtgactgcttctggaccagaacagctccagctcccaggtattttctacaggaccacttgagtgggcagccaagcccaggctcgcagtatcaataaagcagttctctgaggaatgac

SEQ ID NO: 193475 - DNA, 1403 bp, Homo sapiens
  Payload ID: 18198
  Gene Name: transmembrane protein 116
  Uniprot ID: Q8NCL8
  ENST ID: ENST00000355445
  CDS Start-End: 172-1080
gaagcgccaagtgcgcatggggacgctatagcaattcgtttgctgtccttcctctccttcgaagatgacaaggcctaccatcgtttcttcctgcctttgggccgtcaggcagttggttgggacccgctccaaccctcggttcttcctgcaatacagtggatacaatttgtcatggctactctgagtgttataggttcaagttcacttattgcctatgctgtattccataatatacagaaatctccagagataagaccacttttttatctgagcttctgtgacctgctcctgggactttgctggctcacggagacacttctctatggagcttcagtagcaaataaggacatcatctgctataacctacaagcagttggacaggtgatagattatacttgtcgagtttgtcaaatggcctttgttttctcaagcctgatacctctgctattgatgacacctgtattctgtctgggaaatactagtgaatgtttccaaaacttcagtcagagccacaagtgtatcttgatgcactcaccaccatcagccatggctgaacttccaccttctgccaacacatctgtctgtagcacactttatttttatggtatcgccattttcctgggcagctttgtactcagcctccttaccattatggtcttacttatccgagcccagacattgtataagaagtttgtgaagtcaactggctttctggggagtgaacagtgggcagtgattcacattgtggaccaacgggtgcgcttctacccagtggccttcttttgctgctggggcccagctgtcattctaatgatcataaagctgactaagccacaggacaccaagcttcacatggccctttatgttctccaggctctaacggcaacatctcagggtctactcaactgtggagtatatggctggacgcagcacaaattccaccaactaaagcaggaggctcggcgtgatgcagatacccagacaccattattatgctcacagaagagattctatagcaggggcttaaattcactggaatccaccctgacttttcctgccagtacttctaccattttttgaaactacaatactggaacatccaggaactggagttattctacgctaatggattggaaagaatgttgggaaaggacatcttaaatcttttctaactatgccctaaactgcagaactcaaaggaaatatagtgccattgttagtagtcattctagatgaattgggagtatctctccagttattcccagattcactagtgatccttaaagtctctattcagggagaggaagacactttccatctcagagatagactcgtgttaccttgatggatattggatttgtctaagtctcttctagaaaaaataaattctagattattattta

SEQ ID NO: 193476 - DNA, 599 bp, Homo sapiens
  Payload ID: 18198
  Gene Name: transmembrane protein 116
  ENST ID: ENST00000546537
  CDS Start-End: 198-455
agttccgttcctgctccgcttgaggagaagcgccaagtgcgcatggggacgctatagcaattcgtttgctgtccttcctctccttcgaagatgacaaggcctaccatcgtttcttcctgcctttgggccgtcaggcagttggttgggacccgctccaaccctcggttcttcctgcaatacagtggatacaatttgtcatggctactctgagtgttataggttcaagttcacttattgcctatgctgtattccataatatacagaaatctccagagataagaccacttttttatctgagcttctgtgacctgctcctgggactttgctggctcacggagacacttctctatggagcttcagtagcaaataaggacatcatctgctataacctacaagcagttggacaggggagacggggtttcgccatgtttgccaggctggtcctgaatgcctgacctcaagtgattcaccgcttgggcctcccaaagtgctgggattacaggtgtgagccactgcacctggcctccttaaatgtatctttatggcctaattttcacctttgcacccagttggtgatagattatacttgtcgagtttgt

SEQ ID NO: 193477 - DNA, 640 bp, Homo sapiens
  Payload ID: 18198
  Gene Name: transmembrane protein 116
  ENST ID: ENST00000550037
  CDS Start-End: 116-640
cggctgctcaagggtagctgggactgaagtccctatgacctttccactagacgctagcattctggaggacagttgggacttggttcttcctgcaatacagtggatacaatttgtcatggctactctgagtgttataggttcaagttcacttattgcctatgctgtattccataatatacagaaatctccagagataagaccacttttttatctgagcttctgtgacctgctcctgggactttgctggctcacggagacacttctctatggagcttcagtagcaaataaggacatcatctgctataacctacaagcagttggacagatattctacatttcctcatttctctacaccgtcaattacatctggtatttgtacacagagctgaggatgaaacacacccagagtggacagagcacatctccactggtgatagattatacttgtcgagtttgtcaaatggcctttgttttctcaagcctgatacctctgctattgatgacacctgtattctgtctgggaaatactagtgaatgtttccaaaacttcagtcagagccacaagtgtatcttgatgcactcaccaccatcagccatggctgaacttccaccttctgccaacacatctgtctgtagcaca

SEQ ID NO: 193478 - DNA, 319 bp, Homo sapiens
  Payload ID: 18198
  Gene Name: transmembrane protein 116
  ENST ID: ENST00000546962
  CDS Start-End: 96-319
gaagtccctatgacctttccactagacgctagcattctggaggacagttgggacttggtaaggttcttcctgcaatacagtggatacaatttgtcatggctactctgagtgttataggttcaagttcacttattgcctatgctgtattccataatatacagaaatctccagagataagaccacttttttatctgagcttctgtgacctgctcctgggactttgctggctcacggagacacttctctatggagcttcagtagcaaataaggacatcatctgctataacctacaagcagttggacaggtgagtgctacaag

SEQ ID NO: 193479 - DNA, 660 bp, Homo sapiens
  Payload ID: 18198
  Gene Name: transmembrane protein 116
  ENST ID: ENST00000551297
  CDS Start-End: 175-417
ggagaagcgccaagtgcgcatggggacgctatagcaattcgtttgctgtccttcctctccttcgaagatgacaaggcctaccatcgtttcttcctgcctttgggccgtcaggcagttggttgggacccgctccaaccctcggttcttcctgcaatacagtggatacaatttgtcatggctactctgagtgttataggttcaagttcacttattgcctatgctgtattccataatatacagaaatctccagagataagaccacttttttatctgagcttctgtgacctgctcctgggactttgctggctcacggagacacttctctatggagcttcagtagcaaataaggacatcatctgctataacctacaagcagttggacagttctggaggctggaaggtccaagattaagataatcagcagatctggtgtctgatattctacatttcctcatttctctacaccgtcaattacatctggtatttgtacacagagctgaggatgaaacacacccagagtggacagagcacatctccactggtgatagattatacttgtcgagtttgtcaaatggcctttgttttctcaagcctgatacctctgctattgatgacacctgtattctgtctgggaaatactagtgaatgtttccaaaactt

SEQ ID NO: 193480 - DNA, 1408 bp, Homo sapiens
  Payload ID: 18198
  Gene Name: transmembrane protein 116
  Uniprot ID: Q8NCL8
  ENST ID: ENST00000552374
  CDS Start-End: 144-1157
tagcaattcgtttgctgtccttcctctccttcgaagatgacaaggcctaccatcgtttcttcctgcctttgggccgtcaggcagttggttgggacccgctccaaccctcggttcttcctgcaatacagtggatacaatttgtcatggctactctgagtgttataggttcaagttcacttattgcctatgctgtattccataatatacagaaatctccagagataagaccacttttttatctgagcttctgtgacctgctcctgggactttgctggctcacggagacacttctctatggagcttcagtagcaaataaggacatcatctgctataacctacaagcagttggacagatattctacatttcctcatttctctacaccgtcaattacatctggtatttgtacacagagctgaggatgaaacacacccagagtggacagagcacatctccactggtgatagattatacttgtcgagtttgtcaaatggcctttgttttctcaagcctgatacctctgctattgatgacacctgtattctgtctgggaaatactagtgaatgtttccaaaacttcagtcagagccacaagtgtatcttgatgcactcaccaccatcagccatggctgaacttccaccttctgccaacacatctgtctgtagcacactttatttttatggtatcgccattttcctgggcagctttgtactcagcctccttaccattatggtcttacttatccgagcccagacattgtataagaagtttgtgaagtcaactggctttctggggagtgaacagtgggcagtgattcacattgtggaccaacgggtgcgcttctacccagtggccttcttttgctgctggggcccagctgtcattctaatgatcataaagctgactaagccacaggacaccaagcttcacatggccctttatgttctccaggctctaacggcaacatctcagggtctactcaactgtggagtatatggctggacgcagcacaaattccaccaactaaagcaggaggctcggcgtgatgcagatacccagacaccattattatgctcacagaagagattctatagcaggggcttaaattcactggaatccaccctgacttttcctgccagtacttctaccattttttgaaactacaatactggaacatccaggaactggagttattctacgctaatggattggaaagaatgttgggaaaggacatcttaaatcttttctaactatgccctaaactgcagaactcaaaggaaatatagtgccattgttagtagtcattctagatgaattgggagtatctctccagttattcccagattcactagtgatccttaaagtctctattcagggagaggaagacactttccatctcagagatagac

SEQ ID NO: 193481 - DNA, 1716 bp, Homo sapiens
  Payload ID: 18198
  Gene Name: transmembrane protein 116
  ENST ID: ENST00000547878
  CDS Start-End: 164-406
aagtgcgcatggggacgctatagcaattcgtttgctgtccttcctctccttcgaagatgacaaggcctaccatcgtttcttcctgcctttgggccgtcaggcagttggttgggacccgctccaaccctcggttcttcctgcaatacagtggatacaatttgtcatggctactctgagtgttataggttcaagttcacttattgcctatgctgtattccataatatacagaaatctccagagataagaccacttttttatctgagcttctgtgacctgctcctgggactttgctggctcacggagacacttctctatggagcttcagtagcaaataaggacatcatctgctataacctacaagcagttggacagttctggaggctggaaggtccaagattaagataatcagcagatctggtgtctggggagacggggtttcgccatgtttgccaggctggtcctgaatgcctgacctcaagtgattcaccgcttgggcctcccaaagtgctgggattacaggtgtgagccactgcacctggcctccttaaatgtatctttatggcctaattttcacctttgcacccagttgatattctacatttcctcatttctctacaccgtcaattacatctggtatttgtacacagagctgaggatgaaacacacccagagtggacagagcacatctccactggtgatagattatacttgtcgagtttgtcaaatggcctttgttttctcaagcctgatacctctgctattgatgacacctgtattctgtctgggaaatactagtgaatgtttccaaaacttcagtcagagccacaagtgtatcttgatgcactcaccaccatcagccatggctgaacttccaccttctgccaacacatctgtctgtagcacactttatttttatggtatcgccattttcctgggcagctttgtactcagcctccttaccattatggtcttacttatccgagcccagacattgtataagaagtttgtgaagtcaactggctttctggggagtgaacagtgggcagtgattcacattgtggaccaacgggtgcgcttctacccagtggccttcttttgctgctggggcccagctgtcattctaatgatcataaagctgactaagccacaggacaccaagcttcacatggccctttatgttctccaggctctaacggcaacatctcagggtctactcaactgtggagtatatggctggacgcagcacaaattccaccaactaaagcaggaggctcggcgtgatgcagatacccagacaccattattatgctcacagaagagattctatagcaggggcttaaattcactggaatccaccctgacttttcctgccagtacttctaccattttttgaaactacaatactggaacatccaggaactggagttattctacgctaatggattggaaagaatgttgggaaaggacatcttaaatcttttctaactatgccctaaactgcagaactcaaaggaaatatagtgccattgttagtagtcattctagatgaattgggagtatctctccagttattcccagattcactagtgatccttaaagtctctattcagggagaggaagacactttccatctcagagatagactcgtgttaccttgatggatattggatttgtctaagtctcttctagaaaaaataaattctagattattattt

SEQ ID NO: 193482 - DNA, 1229 bp, Homo sapiens
  Payload ID: 18198
  Gene Name: transmembrane protein 116
  ENST ID: ENST00000549537
  CDS Start-End: 523-978
cgccaagtgcgcatggggacgctatagcaattcgtttgctgtccttcctctccttcgaagatgacaaggcctaccatcgtttcttcctgcctttgggccgtcaggcagttggttgggacccgctccaaccctcggttcttcctgcaatacagtggatacaatttgtcatggctactctgagataagaccacttttttatctgagcttctgtgacctgctcctgggactttgctggctcacggagacacttctctatggagcttcagtagcaaataaggacatcatctgctataacctacaagcagttggacagatattctacatttcctcatttctctacaccgtcaattacatctggtatttgtacacagagctgaggatgaaacacacccagagtggacagagcacatctccactggtgatagattatacttgtcgagtttgtcaaatggcctttgttttctcaagcctgatacctctgctattgatgacacctgtattctgtctgggaaatactagtgaatgtttccaaaacttcagtcagagccacaagtcttacttatccgagcccagacattgtataagaagtttgtgaagtcaactggctttctggggagtgaacagtgggcagtgattcacattgtggaccaacgggtgcgcttctacccagtggccttcttttgctgctggggcccagctgtcattctaatgatcataaagctgactaagccacaggacaccaagcttcacatggccctttatgttctccaggctctaacggcaacatctcagggtctactcaactgtggagtatatggctggacgcagcacaaattccaccaactaaagcaggaggctcggcgtgatgcagatacccagacaccattattatgctcacagaagagattctatagcaggggcttaaattcactggaatccaccctgacttttcctgccagtacttctaccattttttgaaactacaatactggaacatccaggaactggagttattctacgctaatggattggaaagaatgttgggaaaggacatcttaaatcttttctaactatgccctaaactgcagaactcaaaggaaatatagtgccattgttagtagtcattctagatgaattgggagtatctctccagttattcccagattcactagtgatccttaaagtctctattcagggagaggaagacactttccatctcagagatagac

SEQ ID NO: 193483 - DNA, 615 bp, Homo sapiens
  Payload ID: 18198
  Gene Name: transmembrane protein 116
  ENST ID: ENST00000549425
  CDS Start-End: 297-615
gtacagagcaggattcagtataggaggagcccagctgggataggggtggagccacctgttcactgcttcaggattcagaacctgactaggaaggatcggctgctcaagggtagctgggactgaagtccctatgacctttccactagacgctagcattctggaggacagttgggacttgttttctctcccaggtttcttttttcttaaactcctggcctcaagtgatcgtcttacctcagcctctcaaagtgtcgggattacaggttcttcctgcaatacagtggatacaatttgtcatggctactctgagtgttataggttcaagttcacttattgcctatgctgtattccataatatacagaaatctccagagataagaccacttttttatctgagcttctgtgacctgctcctgggactttgctggctcacggagacacttctctatggagcttcagtagcaaataaggacatcatctgctataacctacaagcagttggacagatattctacatttcctcatttctctacaccgtcaattacatctggtatttgtacacagagctgaggatgaaacacacccagagtggacagagcacatctccactggtaa

SEQ ID NO: 193484 - DNA, 571 bp, Homo sapiens
  Payload ID: 18198
  Gene Name: transmembrane protein 116
  ENST ID: ENST00000550233
  CDS Start-End: 418-571
actagacgctagcattctggaggacagttgggacttggtaaggtcagaagctctccctgtcttcctttgtattttccctttcttctttcctgttctgcatttttcactcacaatctcttttcatactactaacttttcttcagtttctctgttttactagtctatctttcctctttctacctatcagtgaactctagtatttgtctcttctgttacctattctttccacacatctctgtattctctctcaacatttaactttttctacccactctacattttgttcttccttttattagttttctctcccaggtttcttttttcttaaactcctggcctcaagtgatcgtcttacctcagcctctcaaagtgtcgggattacaggttcttcctgcaatacagtggatacaatttgtcatggctactctgagtgttataggttcaagttcacttattgcctatgctgtattccataatatacagaaatctccagagataagaccacttttttatctgagcttctgtgacctgctcctgggactttgctggctcacggagacacttctctatg

SEQ ID NO: 193485 - DNA, 1446 bp, Homo sapiens
  Payload ID: 18198
  Gene Name: transmembrane protein 116
  Uniprot ID: Q8NCL8
  ENST ID: ENST00000550831
  CDS Start-End: 370-1107
gcatggggacgctatagcaattcgtttgctgtccttcctctccttcgaagatgacaaggcctaccatcgtttcttcctgcctttgggccgtcaggcagttggttgggacccgctccaaccctcggttcttcctgcaatacagtggatacaatttgtcatggctactctgagataagaccacttttttatctgagcttctgtgacctgctcctgggactttgctggctcacggagacacttctctatggagcttcagtagcaaataaggacatcatctgctataacctacaagcagttggacagatattctacatttcctcatttctctacaccgtcaattacatctggtatttgtacacagagctgaggatgaaacacacccagagtggacagagcacatctccactggtgatagattatacttgtcgagtttgtcaaatggcctttgttttctcaagcctgatacctctgctattgatgacacctgtattctgtctgggaaatactagtgaatgtttccaaaacttcagtcagagccacaagtgtatcttgatgcactcaccaccatcagccatggctgaacttccaccttctgccaacacatctgtctgtagcacactttatttttatggtatcgccattttcctgggcagctttgtactcagcctccttaccattatggtcttacttatccgagcccagacattgtataagaagtttgtgaagtcaactggctttctggggagtgaacagtgggcagtgattcacattgtggaccaacgggtgcgcttctacccagtggccttcttttgctgctggggcccagctgtcattctaatgatcataaagctgactaagccacaggacaccaagcttcacatggccctttatgttctccaggctctaacggcaacatctcagggtctactcaactgtggagtatatggctggacgcagcacaaattccaccaactaaagcaggaggctcggcgtgatgcagatacccagacaccattattatgctcacagaagagattctatagcaggggcttaaattcactggaatccaccctgacttttcctgccagtacttctaccattttttgaaactacaatactggaacatccaggaactggagttattctacgctaatggattggaaagaatgttgggaaaggacatcttaaatcttttctaactatgccctaaactgcagaactcaaaggaaatatagtgccattgttagtagtcattctagatgaattgggagtatctctccagttattcccagattcactagtgatccttaaagtctctattcagggagaggaagacactttccatctcagagatagactcgtgttaccttgatggatattggatttgtctaagtctcttctagaaaaaataaattctagattattatttatatgtgtcatttcaaa

SEQ ID NO: 193486 - DNA, 718 bp, Homo sapiens
  Payload ID: 18198
  Gene Name: transmembrane protein 116
  ENST ID: ENST00000550800
  CDS Start-End: 407-718
ctcaagggtagctgggactgaagtccctatgacctttccactagacgctagcattctggaggacagttgggacttgttttctctcccaggtttcttttttcttaaactcctggcctcaagtgatcgtcttacctcagcctctcaaagtgtcgggattacaggttcttcctgcaatacagtggatacaatttgtcatggctactctgagataagaccacttttttatctgagcttctgtgacctgctcctgggactttgctggctcacggagacacttctctatggagcttcagtagcaaataaggacatcatctgctataacctacaagcagttggacagatattctacatttcctcatttctctacaccgtcaattacatctggtatttgtacacagagctgaggatgaaacacacccagagtggacagagcacatctccactggtgatagattatacttgtcgagtttgtcaaatggcctttgttttctcaagcctgatacctctgctattgatgacacctgtattctgtctgggaaatactagtgaatgtttccaaaacttcagtcagagccacaagtgtatcttgatgcactcaccaccatcagccatggctgaacttccaccttctgccaacacatctgtctgtagcacactttatttttatggtatcgccattttcctgggcagctttgtactcagcctccttaccattatg

SEQ ID NO: 193487 - DNA, 2758 bp, Homo sapiens
  Payload ID: 18199
  Gene Name: transmembrane protein 117
  Uniprot ID: Q9H0C3
  ENST ID: ENST00000266534
  CDS Start-End: 128-1672
gtctcgccgcgcttcccagcgaggccgccggcgcgccgagggctgtgctcgaccgcgaatcccgtgtgcagtcgccccgcgccccgcgcgacccttcgggtaaactacgaactgggagttctgaagaatgggtaaagactttcgttactatttccagcatccctggtctcgcatgattgtggcttacttggtgatcttctttaacttcttaatatttgcggaggacccagtttctcatagccaaacagaagccaatgttattgttgttggaaactgtttttcatttgttacaaataaataccctagaggagttggctggaggattttgaaggtgcttctatggctacttgccattctcacaggactaatagctggcaaatttctgttccatcagcgtttgtttggtcagttgctccgattaaaaatgtttcgagaagatcatgggtcgtggatgacaatgttcttcagcacaattctctttctcttcatattttctcacatatacaacacgattcttctaatggatgggaacatgggagcatatatcattacagactatatgggcatccgaaatgaaagtttcatgaaattagctgcagtagggacctggatgggggactttgtcacagcttggatggtcactgatatgatgcttcaggacaaaccctatcctgactggggaaaatcagcaagagctttctggaagaaaggaaatgttaggatcactttattctggacagttctttttactctgacgtctgtggttgtacttgtgattacaacggactggatcagctgggacaagctgaatcggggatttttgcccagtgatgaagtttccagagcattccttgcttcttttatcttggtctttgaccttcttattgtgatgcaggactgggaattcccacatttcatgggagatgttgatgtaaatctccctggtttgcacacccctcacatgcagttcaagattcctttcttccagaaaatcttcaaggaggaatatcgtattcacataacaggcaaatggtttaactatggaattatcttcctcgtcttgattttggatcttaatatgtggaagaaccaaatattttataaacctcatgaatatgggcaatatatcggcccggggcagaagatatatacagtgaaagactcagaaagtttaaaagatttgaacagaaccaagctatcctgggaatggaggtccaatcacactaaccctcggactaataaaacatatgttgagggagacatgttcttacacagcaggttcataggagccagtcttgatgtcaagtgtctggcctttgttccaagcctgatagcctttgtgtggtttggattctttatttggttctttggacgatttttgaaaaatgagccacgcatggagaatcaagacaaaacttacactcgcatgaaaagaaaatctccatcagaacatagcaaagacatgggaatcactcgagaaaacacccaggcttcagtagaagaccccttgaatgacccttctttggtttgcatcaggtctgacttcaatgagatcgtctacaagtcttcccacctaacctcggaaaacttgagctcacagttgaacgaatctactagtgcaacagaagctgatcaagacccaacgacttctaaaagtacacctacgaactagactcggagatagacttggagataacacaaaaagcaaccttgagtgtaactttaaaaatttagtctttccttttgtatatgtaaggtttacgtagtgttaggtaaaaatatgaacaatgccacaacggtgctcaacatgctttttctaggattcattgttttctatttgtattataatacacgtgcctactgtatactcaacagtcctctagagattgcttttcacaattgcacaagctattactgactttacagcatagtggaagattagctgatgacccatgtatctgatgttcaaccatagtggtgccttgagacattaaactgtttttaactgtaccagaaatgaagtgtggaacagttacctaacctatttcacatgggcgttttgtatacaactattttgatctacacttgatgtctgagcagaaaacagaaatagctaaatgtgactcaggaagtatctcttggtttcttattcagcagcagagttggtgactttgacaactggactgcagagaaacatggtgatcaccttttaatttttattggctgtctgccaaatataaatacagatgcaaaattcagtaataggagatccataacccaacatgggtcactactcgtgaaatgtgactttctcccaccagtaattgaaatgaggtgatgatacctaattatgttttcctaattaaagataaattgctacttgattaaaaatcctgcccttcacctttgggaacaaaggttaagagacacagttgggcgaactctcaaatttattggcatttacacaaagtcccagacaaccaaggaactgaagttttcatcatatgagagcagcacatcccaccatttacaatattcgtatatctttctgcaaatatggctctggatagtgaaaattgaaaaacatatgccaaccctgagcaagggaactcctcaaaaaatcatgcagcggaaccttgtcaggtagagaagccgtgcatgaaagaatttgtttaatgtcttgttttgcgtatgtgttttttgtttttgttttttaagaactaaatattgcacattaataaataagaattatacagca

SEQ ID NO: 193488 - DNA, 2607 bp, Homo sapiens
  Payload ID: 18199
  Gene Name: transmembrane protein 117
  ENST ID: ENST00000546868
  CDS Start-End: 73-495
cgaatcccgtgtgcagtcgccccgcgccccgcgcgacccttcgggtaaactacgaactgggagttctgaagaatgggtaaagactttcgttactatttccagcatccctggtctcgcatgattgtggcttacttggtgatcttctttaacttcttaatatttgcggaggacccagtttctcatagccaaacagaagccaatgttattgttgttggaaactgtttttcatttgttacaaataaataccctagaggagttggctggaggattttgaaggtgcttctatggctacttgccattctcacaggactaatagctggcaaatttctgttccatcagcgtttgtttggtcagttgctccgattaaaaatgtttcgagaagatcatgggtcgtggatgacaatgttcttcagcacaattctctttctcttcatattttctcacatatacaacacgattcttctaatggatgggaacatggggtcactgatatgatgcttcaggacaaaccctatcctgactggggaaaatcagcaagagctttctggaagaaaggaaatgttaggatcactttattctggacagttctttttactctgacgtctgtggttgtacttgtgattacaacggactggatcagctgggacaagctgaatcggggatttttgcccagtgatgaagtttccagagcattccttgcttcttttatcttggtctttgaccttcttattgtgatgcaggactgggaattcccacatttcatgggagatgttgatgtaaatctccctggtttgcacacccctcacatgcagttcaagattcctttcttccagaaaatcttcaaggaggaatatcgtattcacataacaggcaaatggtttaactatggaattatcttcctcgtcttgattttggatcttaatatgtggaagaaccaaatattttataaacctcatgaatatgggcaatatatcggcccggggcagaagatatatacagtgaaagactcagaaagtttaaaagatttgaacagaaccaagctatcctgggaatggaggtccaatcacactaaccctcggactaataaaacatatgttgagggagacatgttcttacacagcaggttcataggagccagtcttgatgtcaagtgtctggcctttgttccaagcctgatagcctttgtgtggtttggattctttatttggttctttggacgatttttgaaaaatgagccacgcatggagaatcaagacaaaacttacactcgcatgaaaagaaaatctccatcagaacatagcaaagacatgggaatcactcgagaaaacacccaggcttcagtagaagaccccttgaatgacccttctttggtttgcatcaggtctgacttcaatgagatcgtctacaagtcttcccacctaacctcggaaaacttgagctcacagttgaacgaatctactagtgcaacagaagctgatcaagacccaacgacttctaaaagtacacctacgaactagactcggagatagacttggagataacacaaaaagcaaccttgagtgtaactttaaaaatttagtctttccttttgtatatgtaaggtttacgtagtgttaggtaaaaatatgaacaatgccacaacggtgctcaacatgctttttctaggattcattgttttctatttgtattataatacacgtgcctactgtatactcaacagtcctctagagattgcttttcacaattgcacaagctattactgactttacagcatagtggaagattagctgatgacccatgtatctgatgttcaaccatagtggtgccttgagacattaaactgtttttaactgtaccagaaatgaagtgtggaacagttacctaacctatttcacatgggcgttttgtatacaactattttgatctacacttgatgtctgagcagaaaacagaaatagctaaatgtgactcaggaagtatctcttggtttcttattcagcagcagagttggtgactttgacaactggactgcagagaaacatggtgatcaccttttaatttttattggctgtctgccaaatataaatacagatgcaaaattcagtaataggagatccataacccaacatgggtcactactcgtgaaatgtgactttctcccaccagtaattgaaatgaggtgatgatacctaattatgttttcctaattaaagataaattgctacttgattaaaaatcctgcccttcacctttgggaacaaaggttaagagacacagttgggcgaactctcaaatttattggcatttacacaaagtcccagacaaccaaggaactgaagttttcatcatatgagagcagcacatcccaccatttacaatattcgtatatctttctgcaaatatggctctggatagtgaaaattgaaaaacatatgccaaccctgagcaagggaactcctcaaaaaatcatgcagcggaaccttgtcaggtagagaagccgtgcatgaaagaatttgtttaatgtcttgttttgcgtatgtgttttttgtttttgttttttaagaactaaatattgcacattaataaataagaattatacagcagtga

SEQ ID NO: 193489 - DNA, 2643 bp, Homo sapiens
  Payload ID: 18199
  Gene Name: transmembrane protein 117
  ENST ID: ENST00000551577
  CDS Start-End: 143-949
cgacgccgccggcccgtctcgccgcgcttcccagcgaggccgccggcgcgccgagggctgtgctcgaccgcgaatcccgtgtgcagtcgccccgcgccccgcgcgacccttcgggtaaactacgaactgggagttctgaagaatgggtaaagactttcgttactatttccagcatccctggtctcgcatgattgtggcttacttggtgatcttctttaacttcttaatatttgcggaggacccagtttctcatagccaaacagaagccaatgttattgttgttggaaactgtttttcatttgttacaaataaataccctagaggagttggctggaggattttgaaggtgcttctatggctacttgccattctcacaggactaatagctggcaaatttctgttccatcagcgtttgtttggtcagttgctccgattaaaaatgtttcgagaagatcatgggtcgtggatgacaatgttcttcagcacaattctctttctcttcatattttctcacatatacaacacgattcttctaatggatgggaacatgggagcatatatcattacagactatatgggcatccgaaatgaaagtttcatgaaattagctgcagtagggacctggatgggggactttgtcacagcttggatggtcactgatatgatgcttcaggacaaaccctatcctgactggggaaaatcagcaagagctttctggaagaaaggaaatgttaggatcactttattctggacagttctttttactctgacgtctgtggttgtacttgtgattacaacggactggatcagctgggacaagctgaatcggggatttttgcccagtgatgaagtttccagagcattccttgcttcttttatcttggtctttgaccttcttattgtgatgcaggcaaatggtttaactatggaattatcttcctcgtcttgattttggatcttaatatgtggaagaaccaaatattttataaacctcatgaatatgggcaatatatcggcccggggcagaagatatatacagtgaaagactcagaaagtttaaaagatttgaacagaaccaagctatcctgggaatggaggtccaatcacactaaccctcggactaataaaacatatgttgagggagacatgttcttacacagcaggttcataggagccagtcttgatgtcaagtgtctggcctttgttccaagcctgatagcctttgtgtggtttggattctttatttggttctttggacgatttttgaaaaatgagccacgcatggagaatcaagacaaaacttacactcgcatgaaaagaaaatctccatcagaacatagcaaagacatgggaatcactcgagaaaacacccaggcttcagtagaagaccccttgaatgacccttctttggtttgcatcaggtctgacttcaatgagatcgtctacaagtcttcccacctaacctcggaaaacttgagctcacagttgaacgaatctactagtgcaacagaagctgatcaagacccaacgacttctaaaagtacacctacgaactagactcggagatagacttggagataacacaaaaagcaaccttgagtgtaactttaaaaatttagtctttccttttgtatatgtaaggtttacgtagtgttaggtaaaaatatgaacaatgccacaacggtgctcaacatgctttttctaggattcattgttttctatttgtattataatacacgtgcctactgtatactcaacagtcctctagagattgcttttcacaattgcacaagctattactgactttacagcatagtggaagattagctgatgacccatgtatctgatgttcaaccatagtggtgccttgagacattaaactgtttttaactgtaccagaaatgaagtgtggaacagttacctaacctatttcacatgggcgttttgtatacaactattttgatctacacttgatgtctgagcagaaaacagaaatagctaaatgtgactcaggaagtatctcttggtttcttattcagcagcagagttggtgactttgacaactggactgcagagaaacatggtgatcaccttttaatttttattggctgtctgccaaatataaatacagatgcaaaattcagtaataggagatccataacccaacatgggtcactactcgtgaaatgtgactttctcccaccagtaattgaaatgaggtgatgatacctaattatgttttcctaattaaagataaattgctacttgattaaaaatcctgcccttcacctttgggaacaaaggttaagagacacagttgggcgaactctcaaatttattggcatttacacaaagtcccagacaaccaaggaactgaagttttcatcatatgagagcagcacatcccaccatttacaatattcgtatatctttctgcaaatatggctctggatagtgaaaattgaaaaacatatgccaaccctgagcaagggaactcctcaaaaaatcatgcagcggaaccttgtcaggtagagaagccgtgcatgaaagaatttgtttaatgtcttgttttgcgtatgtgttttttgtttttgttttttaagaactaaatattgcacattaataaataagaattatacagca

SEQ ID NO: 193490 - DNA, 576 bp, Homo sapiens
  Payload ID: 18199
  Gene Name: transmembrane protein 117
  ENST ID: ENST00000550495
  CDS Start-End: 101-576
tgaaggtgcttctatggctacttgccattctcacaggactaatagctggcaaatttctgttccatcagcgtttgtttgagcatatatcattacagactatatgggcatccgaaatgaaagtttcatgaaattagctgcagtagggacctggatgggggactttgtcacagcttggatggtcactgatatgatgcttcaggacaaaccctatcctgactggggaaaatcagcaagagctttctggaagaaaggaaatgttaggatcactttattctggacagttctttttactctgacgtctgtggttgtacttgtgattacaacggactggatcagctgggacaagctgaatcggggatttttgcccagtgatgaagtttccagagcattccttgcttcttttatcttggtctttgaccttcttattgtgatgcaggactgggaattcccacatttcatgggagatgttgatgtaaatctccctggtttgcacacccctcacatgcagttcaagattcctttcttccagaaaatcttcaaggaggaatatcgtattcacataacaggcaaatggtt

SEQ ID NO: 193491 - DNA, 2707 bp, Homo sapiens
  Payload ID: 18200
  Gene Name: transmembrane protein 119
  Uniprot ID: Q4V9L6
  ENST ID: ENST00000392806
  CDS Start-End: 170-1021
aggagggacgggaggagggacgggaggagggagggcgggcaggcgccagcccagagcagccccgggcaccagcacggactctctcttccagcccaggtgccccccactctcgctccattcggcgggagcacccagtcctgtacgccaaggaactggtcctgggggcaccatggtttcggcggcagcccccagcctcctcatccttctgttgctgctcctggggtctgtgcctgctaccgacgcccgctctgtgcccctgaaggccacgttcctggaggatgtggcgggtagtggggaggccgagggctcgtcggcctcctccccgagcctcccgccaccctggaccccggccctcagccccacatcgatggggccccagcccataaccctggggggcccatcaccccccaccaacttcctggatgggatagtggacttcttccgccagtacgtgatgctgattgctgtggtgggctccctggcctttctgctgatgttcatcgtctgtgccgcggtcatcacccggcagaagcagaaggcctcggcctattacccatcgtccttccccaagaagaagtacgtggaccagagtgaccgggccgggggcccccgggccttcagtgaggtccccgacagagcccccgacagcaggcccgaggaagccctggattcctcccggcagctccaggccgacatcttggccgccacccagaacctcaagtcccccaccagggctgcactgggcggtggggacggagccaggatggtggagggcaggggcgcagaggaagaggagaagggcagccaggagggggaccaggaagtccagggacatggggtcccagtggagacaccagaggcgcaggaggagccgtgctcaggggtccttgagggggctgtggtggccggtgagggccaaggggagctggaagggtctctcttgttagcccaggaagcccagggaccagtgggtccccccgaaagcccctgtgcttgcagcagtgtccaccccagtgtctaacagtcctcccgggctgccagccctgactgtcgggcccccaagtggtcacctccccgtgtatgaaaaggccttcagccctgactgcttcctgacactccctccttggcctccctgtggtgccaatcccagcatgtgctgattctacagcaggcagaaatgctggtccccggtgccccggaggaatcttaccaagtgccatcatccttcacctcagcagccccaaagggctacatcctacagcacagctcccctgacaaagtgagggagggcacgtgtccctgtgacagccaggataaaacatccctcaaggctgggtgtggaggctcacacctgtaatctcagcattttgggaggccaagtgcggacatcacttgagaccaggagttccaaaccagccctggcaacattgtgagacccatctctataaaaacaaaaaacagtccactaaatcagccacattaattgggaatcatatgtcacaggtcatttgtggggcaaacatcactgcttttccatcaagggagcaaagaataagtgggagttttggaagagtttggatgagagacgccaaggtgcccagcgttcgtaaggcaacatgcagcctggcgtgaagcagtattttgaaactgcaaatggttcccttcttgtgtcctttcaatgctgaatattttagtgtcattctgcctgtgctcagagctccagcagcagaagtgtgtgtggttaattaggacacttctgtgagaggacccctgcacacattacgacaggtccctaaatgagcatttcccaaactaggttccccgaggcactctacggaaacaagatttttttttttgagacggagtctcggtctgtcacccaggctggagtgcagtggtgcaatcttggtgcaatcttggctcagtgcaatccgcctcccaggttcaagcgattctcccgcctcagtagctgggattacaggtgcccaccactgcgcccagctaaattttgtatttttagtagagatggggcttcaccatgttggccaggctggtctggaactcctgaccttcaggtgatccacctgcctctgcctcccaaagtgctgggattacaggcgtgagccaccgtgcccggcccaaactactttttaaaacagctacagggtaaaatcctgcagcacccactctggaaaatactgctcttaattttcctgaaggtggccccctgtttctagttggtccaggattagggatgtggggtatagggcatttaaatcctctcaagcgctctccaagcacccccggcctgggggtgagtttctcatcccgctactgctgctgggatcaggttgaatgaatggaactcttcctgtctggcctccaaagcagcctagaagctgaggggctgtgtttgaggggacctccaccctggggaagtccgaggggctggggaagggtttctgacgcccagcctggagcaggggggccctggccaccccctgttgctcacacattgtctggcagcctgtgtccacaatattcgtcagtcctcgacagggagcctgggctccgtcctgctttagggaggctctggcaggaggtcctctcccccatccctccatctggggctcccccaacctctgcacagctctccaggtgctgagatataatgcaccagcacaataaacctttattccggcctgaa

SEQ ID NO: 193492 - DNA, 567 bp, Homo sapiens
  Payload ID: 18200
  Gene Name: transmembrane protein 119
  ENST ID: ENST00000549447
  CDS Start-End: 436-567
attcggcgggagcacccagtcctgtacgccaaggaactggttcttgctctgtcacccaggctggagtgcagtgccaactccgctcactgcagcctcaacttcccgggctcaggcgattctcccacctcggtctcctcggtacctgggaccacaagtgtgcgccactaggcctggctaatttttggtgtttttagtagagacagaattttgccgtgttgaccaggctggtcttgaactcctgagctcaggtgatcctcccaccttggcctcccaaagtgctgggattacaggcatgagccaccgcacccagctgatgcgatccatttcaatgaaagctgtgtcacagagaagcctcaggtcacctggaacaagcccctcaatggcccaacctggttcctacctcacctccagaatcctcacggtcctgggggcaccatggtttcggcggcagcccccagcctcctcatccttctgttgctgctcctggggtctgtgcctgctaccgacgcccgctctgtgcccctgaaggccacgttcctggaggatgtggcgggtagtggggaggcc

SEQ ID NO: 193493 - DNA, 486 bp, Homo sapiens
  Payload ID: 18200
  Gene Name: transmembrane protein 119
  ENST ID: ENST00000547567
  CDS Start-End: 403-486
ggcccagccggggagggaggaaggaggagggacgggaggagggacgggaggagggagggcgggcaggcgccagcccagagcagccccgggcaccagcacggactctctcttccagcccaggtgccccccactctcgctccattcggcgggagcacccagtcctgtacgccaaggaactggttcttgctctgtcacccaggctggagtgcagtgccaactccgctcactgcagcctcaacttcccgggctcaggcgattctcccacctcggtctcctcggtacctgggaccacaagtgtgcgccactaggcctggctaatttttggtgtttttagtagagacagaattttgccgtgttgaccaggctggtcttgaactcctgagctcaggtcctgggggcaccatggtttcggcggcagcccccagcctcctcatccttctgttgctgctcctggggtctgtgcctgctaccgacgcccgctctgtg

SEQ ID NO: 193494 - DNA, 575 bp, Homo sapiens
  Payload ID: 18200
  Gene Name: transmembrane protein 119
  ENST ID: ENST00000549031
  CDS Start-End: 155-575
ctgtctgtctcagcctgccctggggacccgaggtcagggaggaagtgccgcatctggtcttccccagagcgagagtcccaggtgccccccactctcgctccattcggcgggagcacccagtcctgtacgccaaggaactggtcctgggggcaccatggtttcggcggcagcccccagcctcctcatccttctgttgctgctcctggggtctgtgcctgctaccgacgcccgctctgtgcccctgaaggccacgttcctggaggatgtggcgggtagtggggaggccgagggctcgtcggcctcctccccgagcctcccgccaccctggaccccggccctcagccccacatcgatggggccccagcccataaccctggggggcccatcaccccccaccaacttcctggatgggatagtggacttcttccgccagtacgtgatgctgattgctgtggtgggctccctggcctttctgctgatgttcatcgtctgtgccgcggtcatcacccggcagaagcagaaggcctcggcctattacccatcgtccttccccaagaagaagtacgtggaccaga

SEQ ID NO: 193495 - DNA, 1456 bp, Homo sapiens
  Payload ID: 18201
  Gene Name: transmembrane protein 120A
  Uniprot ID: Q9BXJ8
  ENST ID: ENST00000493111
  CDS Start-End: 90-1121
cggaagcggacgggggcggtggcggaggagcctcgggtgggccggggttgctgcgccgtcctccactactggctactggcgctgcagccatgcagcccccgcccccgggcccgctgggcgactgcctgcgggactgggaggatctacagcaggacttccagaacatccaggagacccatcggctctaccgcctgaagctggaggagctgaccaaacttcagaacaattgcaccagctccatcacgcggcagaagaagcggctccaggagctggccctcgccctgaagaaatgcaaaccctccctcccagcagaggccgagggggccgcacaggagctggagaaccagatgaaagagcgccaaggcctcttctttgacatggaggcctatttgcctaagaagaatggattgtacctgagcctggttctggggaacgtcaacgtcacgctcctgagcaagcaggctaagtttgcctacaaggacgagtatgagaagttcaagctctacctcaccatcatcctcatcctcatctccttcacttgccgcttcctgctcaactccagggtgacagatgctgccttcaacttcctgctggtctggtactactgcaccctgaccatccgggagagcatcctcatcaacaacggctcccggatcaaaggctggtgggtgttccatcactacgtgtccaccttcctgtcgggagtcatgctgacgtggcccgacggtctcatgtaccagaaattccggaaccaattcctctccttttccatgtaccagagcttcgtgcagtttctccagtactactaccagagcggctgcctctaccgcctgcgggcgctgggcgagcggcacaccatggacctcactgtggagggcttccagtcctggatgtggcggggcctcaccttcctgctgccttttcttttctttggacacttctggcagctttttaacgcgctgacgttgttcaacctggcccaggaccctcagtgcaaggagtggcaggtgcttatgtgcggctttcccttcctcctccttttcctcggcaatttcttcaccaccctgagggttgtgcaccacaagtttcacagtcagcggcacgggagcaagaaggattgaggctgggccttcccctgccggcccagaggggcttctgtcctgtgtgttgtgggaggggatgggaggcgcccctcgagtgtgcgtgtatcagggggtctcttctattctcccttgggttttatgggcgctgtgggccctgaaggaagacctgggcccagtgccctcaataaagagaggcccagaggtggcctgagcgtgtgtgttctcctgggggaggggagggctgggtggccccaccacatgggttcctggggtctgagttagttaagttgatgcaggtggaggtcccagatctactcacacaataccaggcaaatacagaaaacagaacttta

SEQ ID NO: 193496 - DNA, 765 bp, Homo sapiens
  Payload ID: 18201
  Gene Name: transmembrane protein 120A
  ENST ID: ENST00000480899
  CDS Start-End: 1-690
agcaagcaggctaagtttgcctacaaggacgagtatgagaagttcaagctctacctcaccatcatcctcatcctcatctccttcacttgccgcttcctgctcaactccagggtgacagatgctgccttcaacttcctgctggtctggtactactgcaccctgaccatccgggagagcatcctcatcaacaacggctcccggatcaaaggctggtgggtgttccatcactacgtgtccaccttcctgtcgggagtcatgctgacgtggcccgacggtctcatgtaccagaaattccggaaccaattcctctccttttccatgtaccagagcttcgtgcagtttctccagtactactaccagagcggctgcctctaccgcctgcgggcgctgggcgagcggcacaccatggacctcactgtggagggcttccagtcctggatgtggcggggcctcaccttcctgctgccttttcttttctttggacacttctggcagctttttaacgcgctgacgttgttcaacctggcccaggaccctcagtgcaaggagtggcaggtgagccggggtccctggacaggatggatggggggccaggcccatgtccagccctcaccctattcctccggcaggtgcttatgtgcggctttcccttcctcctccttttcctcggcaatttcttcaccaccctgagggttgtgcaccacaagtttcacagtcagcggcacgggagcaagaaggattgaggctgggccttcccctgccggc

SEQ ID NO: 193497 - DNA, 641 bp, Homo sapiens
  Payload ID: 18201
  Gene Name: transmembrane protein 120A
  ENST ID: ENST00000493251
  CDS Start-End: 1-300
ggtgccaggaccctccgggaagcaggaacaggcgctgggggtgatggtggctctctgctccaggatcaaaggctggtgggtgttccatcactacgtgtccaccttcctgtcgggagtcatgctgacgtggcccgacggtctcatgtaccagaaattccggaaccaattcctctccttttccatgtaccagagcttcgtgcagtttctccagtactactaccagagcggctgcctctaccgcctgcgggcgctgggcgagcggcacaccatggacctcactgtggctttttaacgcgctgacgttgttcaacctggcccaggaccctcagtgcaaggagtggcaggtgcttatgtgcggctttcccttcctcctccttttcctcggcaatttcttcaccaccctgagggttgtgcaccacaagtttcacagtcagcggcacgggagcaagaaggattgaggctgggccttcccctgccggcccagaggggcttctgtcctgtgtgttgtgggaggggatgggaggcgcccctcgagtgtgcgtgtatcagggggtctcttctattctcccttgggttttatgggcgctgtgggccctgaaggaagacctgggcccagtgccctcaataaagagaggcccaga

SEQ ID NO: 193498 - DNA, 1444 bp, Homo sapiens
  Payload ID: 18201
  Gene Name: transmembrane protein 120A
  ENST ID: ENST00000417509
  CDS Start-End: 47-1015
ggggttgctgcgccgtcctccactactggctactggcgctgcagccatgcagcccccgcccccgggcccgctgggcgactgcctgcgggactgggaggatctacagcaggacttccagaacatccaggagacccatcggctctaccgcctgaagctggaggagctgaccaaacttcagaacaattgcaccagctccatcacgcggcagaagaagcggctccaggagctggccctcgccctgaagaaatgcaaaccctccctcccagcagaggccgagggggccgcacaggagctggagaaccagatgaaagagcgccaaggcctcttctttgacatggaggcctatttgcctaagaagaatggattgtacctgagcctggttctggggaacgtcaacgtcacgctcctgagcaagcaggctaagtttgcctacaaggacgagtatgagaagttcaagctctacctcaccatcatcctcatcctcatctccttcacttgccgcttcctgctcaactccagggtgacagatgctgccttcaacttcctgctggtctggtactactgcaccctgaccatccgggagagcatcctcatcaacaacggctcccggtgggcagggcgggccctgagggaggggagcatggaatggggtgccaggaccctccgggaagcaggaacaggcgctgggggtgatggtggctctctgctccaggatcaaaggctggtgggtgttccatcactacgtgtccaccttcctgtcgggagtcatgctgacgtggcccgacggtctcatgtaccagaaattccggaaccaattcctctccttttccatgtaccagagcttcgtgcagtttctccagtactactaccagagcggctgcctctaccgcctgcgggcgctgggcgagcggcacaccatggacctcactgtggagggcttccagtcctggatgtggcggggcctcaccttcctgctgccttttcttttctttggacacttctggcagctttttaacgcgctgacgttgttcaacctggcccaggaccctcagtgcaaggagtggcaggtgagccggggtccctggacaggatggatggggggccaggcccatgtccagccctcaccctattcctccggcaggtgcttatgtgcggctttcccttcctcctccttttcctcggcaatttcttcaccaccctgagggttgtgcaccacaagtttcacagtcagcggcacgggagcaagaaggattgaggctgggccttcccctgccggcccagaggggcttctgtcctgtgtgttgtgggaggggatgggaggcgcccctcgagtgtgcgtgtatcagggggtctcttctattctcccttgggttttatgggcgctgtgggccctgaaggaagacctgggcccagtgccctcaataaagagaggcccagaggtggc

SEQ ID NO: 193499 - DNA, 1352 bp, Homo sapiens
  Payload ID: 18201
  Gene Name: transmembrane protein 120A
  ENST ID: ENST00000440632
  CDS Start-End: 87-1055
aagcggacgggggcggtggcggaggagcctcgggtgggccggggttgctgcgccgtcctccactactggctactggcgctgcagccatgcagcccccgcccccgggcccgctgggcgactgcctgcgggactgggaggatctacagcaggacttccagaacatccaggagacccatcggctctaccgcctgaagctggaggagctgaccaaacttcagaacaattgcaccagctccatcacgcggcagaagaagcggctccaggagctggccctcgccctgaagaaatgcaaaccctccctcccagcagaggccgagggggccgcacaggagctggagaaccagatgaaagagcgccaaggcctcttctttgacatggaggcctatttgcctaagaagaatggattgtacctgagcctggttctggggaacgtcaacgtcacgctcctgagcaagcaggctaagtttgcctacaaggacgagtatgagaagttcaagctctacctcaccatcatcctcatcctcatctccttcacttgccgcttcctgctcaactccagggtgacagatgctgccttcaacttcctgctggtctggtactactgcaccctgaccatccgggagagcatcctcatcaacaacggctcccggtgggcagggcgggccctgagggaggggagcatggaatggggtgccaggaccctccgggaagcaggaacaggcgctgggggtgatggtggctctctgctccaggatcaaaggctggtgggtgttccatcactacgtgtccaccttcctgtcgggagtcatgctgacgtggcccgacggtctcatgtaccagaaattccggaaccaattcctctccttttccatgtaccagagcttcgtgcagtttctccagtactactaccagagcggctgcctctaccgcctgcgggcgctgggcgagcggcacaccatggacctcactgtggagggcttccagtcctggatgtggcggggcctcaccttcctgctgccttttcttttctttggacacttctggcagctttttaacgcgctgacgttgttcaacctggcccaggaccctcagtgcaaggagtggcaggtgcttatgtgcggctttcccttcctcctccttttcctcggcaatttcttcaccaccctgagggttgtgcaccacaagtttcacagtcagcggcacgggagcaagaaggattgaggctgggccttcccctgccggcccagaggggcttctgtcctgtgtgttgtgggaggggatgggaggcgcccctcgagtgtgcgtgtatcagggggtctcttctattctcccttgggttttatgggcgctgt

SEQ ID NO: 193500 - DNA, 590 bp, Homo sapiens
  Payload ID: 18201
  Gene Name: transmembrane protein 120A
  ENST ID: ENST00000485200
  CDS Start-End: 69-590
gcggaggagcctcgggtgggccggggttgctgcgccgtcctccactactggctactggcgctgcagccatgcagcccccgcccccgggcccgctgggcgactgcctgcgggactgggaggatctacagcaggacttccagaacatccaggagacccatcggctctaccgcctgaagctggaggagctgaccaaacttcagaacaattgcaccagctccatcacgcggcagaagaagcggctccaggagctggccctcgccctgaagaaatgcaaaccctccctcccagcagaggccgagggggccgcacaggagctggagaaccagatgaaagagcgccaaggcctcttctttgacatggaggcctatttgcctaagaagaatgggtttgcctacaaggacgagtatgagaagttcaagctctacctcaccatcatcctcatcctcatctccttcacttgccgcttcctgctcaactccagggtgacagatgctgccttcaacttcctgctggtctggtactactgcaccctgaccatccgggagagcatcctcatcaacaacggctcccggatcaaaggctggtgggtg

SEQ ID NO: 193501 - DNA, 660 bp, Homo sapiens
  Payload ID: 18201
  Gene Name: transmembrane protein 120A
  ENST ID: ENST00000490656
  CDS Start-End: 1-307
cttcctgctggtctggtactactgcaccctgaccatccgggagagcatcctcatcaacaacggctcccggatcaaaggctggtgggtgttccatcactacgtgtccaccttcctgtcgggagtcatgctgacgtggcccgacggtctcatgtaccagaaattccggaaccaattcctctccttttccatgtaccagagcttcgtgcagtttctccagtactactaccagagcggctgcctctaccgcctgcgggcgctgggcgagcggcacaccatggacctcactgtggttctggcagctttttaacgcgctgacgttgttcaacctggcccaggaccctcagtgcaaggagtggcaggtgcttatgtgcggctttcccttcctcctccttttcctcggcaatttcttcaccaccctgagggttgtgcaccacaagtttcacagtcagcggcacgggagcaagaaggattgaggctgggccttcccctgccggcccagaggggcttctgtcctgtgtgttgtgggaggggatgggaggcgcccctcgagtgtgcgtgtatcagggggtctcttctattctcccttgggttttatgggcgctgtgggccctgaaggaagacctgggcccagtgccctcaataaagagaggcccagaggtg

SEQ ID NO: 193502 - DNA, 1161 bp, Homo sapiens
  Payload ID: 18201
  Gene Name: transmembrane protein 120A
  ENST ID: ENST00000439537
  CDS Start-End: 5-1114
agccatgcagcccccgcccccgggcccgctgggcgactgcctgcgggactgggaggatctacagcaggacttccagaacatccaggagacccatcggctctaccgcctgaagctggaggagctgaccaaacttcagaacaattgcaccagctccatcacgcggcagaagaagcggctccaggagctggccctcgccctgaagaaatgcaaaccctccctcccagcagaggccgagggggccgcacaggagctggagaaccagatgaaagagcgccaaggcctcttctttgacatggaggcctatttgcctaagaagaatggattgtacctgagcctggttctggggaacgtcaacgtcacgctcctgagcaagcaggctaagtttgcctacaaggacgagtatgagaagttcaagctctacctcaccatcatcctcatcctcatctccttcacttgccgcttcctgctcaactccagggtgacagatgctgccttcaacttcctgctggtctggtactactgcaccctgaccatccgggagagcatcctcatcaacaacggctcccggatcaaaggctggtgggtgttccatcactacgtgtccaccttcctgtcgggagtcatgctgacgtggcccgacggtctcatgtaccagaaattccggaaccaattcctctccttttccatgtaccagagcttcgtgcagtttctccagtactactaccagagcggctgcctctaccgcctgcgggcgctgggcgagcggcacaccatggacctcactgtggagggcttccagtcctggatgtggcggggcctcaccttcctgctgccttttcttttctttggacacttctggcagctttttaacgcgctgacgttgttcaacctggcccaggaccctcagtgcaaggagtggcagggttgtgcaccacaagtttcacagtcagcggcacgggagcaagaaggattgaggctgggccttcccctgccggcccagaggggcttctgtcctgtgtgttgtgggaggggatgggaggcgcccctcgagtgtgcgtgtatcagggggtctcttctattctcccttgggttttatgggcgctgtgggccctgaaggaagacctgggcccagtgccctcaataaagagaggcccagaggtg

SEQ ID NO: 193503 - DNA, 2766 bp, Homo sapiens
  Payload ID: 18202
  Gene Name: transmembrane protein 120B
  Uniprot ID: A0PK00
  ENST ID: ENST00000342607
  CDS Start-End: 145-1164
agttgcgcgcgtggctctggctgcgcaggaacagctggtgcctccgagggcggtcggcgagcgcgcgggcgtggggcgctggggggccggtcgggcagcgctgcgggagcagccgccggcaccgccgccttgcaccatcgcatcatgtccgggcagctggagcgttgcgagcgcgaatggcacgagctggagggagaatttcaagaactgcaggagacgcacaggatctacaagcagaagctggaggagctggctgcgctgcagacgctgtgtagcagttccatcagtaagcagaagaagcacctcaaggacttgaagcttacactccagaggtgcaaacgccatgccagtcgggaggaggcggagctcgttcagcagatggcagcgaacatcaaggagcggcaggacgtcttcttcgacatggaggcctacctgcccaagaagaacgggctctacttgaacctggtcctcggcaatgtgaacgtgaccctcctcagcaaccaggccaagttcgcctacaaggacgaatatgagaagttcaagctctacctgaccatcatcctgctcctgggtgccgtggcatgtcgatttgtccttcactacagggtgactgacgaagtcttcaacttcctgctggtgtggtattactgcaccctgaccattcgggagagcattctcatcagcaacggctcaagaattaaaggctggtgggtgtctcaccactacgtctccacattcctgtccggagtgatgctgacctggcctaatggacccatttatcagaagtttcgcaaccagttcttagcattttccatttttcagagctgcgtccagttcctgcaatattattaccagaggggctgcctctaccggctgcgggccctgggggagaggaaccacctggatctcacagtggaagggttccagtcctggatgtggcggggcctcacctttctcctgcccttcctcttctgtggccatttctggcagctctacaatgccgtcacgctgtttgagctctccagccacgaggaatgcagagaatggcaggtgttcgtactggcgttcaccttcctcatcctcttcctcggcaacttcctgaccacgctcaaagtcgtgcatgccaagctccagaagaacagaggcaagacaaagcagccgtgagcctcgggctcctgtgccctcggcccggacttcagactgcagggggctcccgggctccttcccagcagccctctcaggcccgtggcatcgctgggagagggcccaggccctggtcccccagtggaccccagtggtctagaggaatgtgagccccgcctgtccgcacagtgtccgcccacctatttatgacatatttaatgctgggtcccccatcgtccctggaacccgaggcctcactcctgtgcttgaaggtggctgaggccgggccagtcttcctggggatggggcctgaagcctcagggagcccctctgttcccactcctgtcatttgaacccctctgggtggggtttggatgtgcctcgcggggttggatttatgctgacctgctacttaccaggcccaggctggggtggtgtgaaccctcagtgtcctgtggcgcccccaccccggggccactctgcttctgctgtgagccccctcctcgcccaccccgccacgtggtgagggttattttaagttctcagagacccaccgcgtctgcctcgtgctcttcttgcccctggagcgctgggggcatcctgagtcaggctgtgagaagattcgccaccagagggcgccccgggccctgggtcgtccaaggggacaaggacgttcccgtctgtgcttcggggttccctgacccccccatcctgcagcccaccttcctgcagtgtcgtggcaggcgacaccgactcctaggcgccctccagagccaagcagcttgcgacttctggtaggcaccggaatcccctgggatgcttgttttaaaagtcctgggccgggcacggtggctcacgcctgtaatcccagcactttgggaggctaaggcgggtggatcacgaggtcaggagttcaagaccagcctggccaacatggtgaaaccctgtctctactaaaaatacaaaaattagccggacgtggtggtgtgcgcatgtagtcccagctactcaggaggctgaggcaagagaatcgcttgaacccaggaggtggagcttgcagtgagccaagatcatgccactgcactctagcctgagtgacagaatgagactctgtcccaaaaaaaaaaaaaaaaaaaaattcccagaccctcggccccagaccttcccaaaggaggctcagggattaggtatctggctgttggtgacacaggtggtctatgaaccagttctgagaaactgtcccgcgtggacagggggtagatcccatcagttctcaaaggaggccaggatgtctcgcctcctgaactccacaggctggtagaagcggggcttgagggacagcaggttgggagcttgaggactaagtgggccagtcctgtcctaccacagtggggggaacagtccacagaaaacttgctcatgaccacactgggagccgactgttcttcccatcccaagtctctgacactgggggctttgggtgaaaccttaaggagatggtcagatgggtggtccagggtatacttttaacaactgagaagccattttttctgccccctgggcacatgtgcccagctctgcaaagacagtggccaagttgaagacaagtcttccatgtggggt

SEQ ID NO: 193504 - DNA, 7461 bp, Homo sapiens
  Payload ID: 18202
  Gene Name: transmembrane protein 120B
  Uniprot ID: A0PK00
  ENST ID: ENST00000449592
  CDS Start-End: 102-1121
ccgagggcggtcggcgagcgcgcgggcgtggggcgctggggggccggtcgggcagcgctgcgggagcagccgccggcaccgccgccttgcaccatcgcatcatgtccgggcagctggagcgttgcgagcgcgaatggcacgagctggagggagaatttcaagaactgcaggagacgcacaggatctacaagcagaagctggaggagctggctgcgctgcagacgctgtgtagcagttccatcagtaagcagaagaagcacctcaaggacttgaagcttacactccagaggtgcaaacgccatgccagtcgggaggaggcggagctcgttcagcagatggcagcgaacatcaaggagcggcaggacgtcttcttcgacatggaggcctacctgcccaagaagaacgggctctacttgaacctggtcctcggcaatgtgaacgtgaccctcctcagcaaccaggccaagttcgcctacaaggacgaatatgagaagttcaagctctacctgaccatcatcctgctcctgggtgccgtggcatgtcgatttgtccttcactacagggtgactgacgaagtcttcaacttcctgctggtgtggtattactgcaccctgaccattcgggagagcattctcatcagcaacggctcaagaattaaaggctggtgggtgtctcaccactacgtctccacattcctgtccggagtgatgctgacctggcctaatggacccatttatcagaagtttcgcaaccagttcttagcattttccatttttcagagctgcgtccagttcctgcaatattattaccagaggggctgcctctaccggctgcgggccctgggggagaggaaccacctggatctcacagtggaagggttccagtcctggatgtggcggggcctcacctttctcctgcccttcctcttctgtggccatttctggcagctctacaatgccgtcacgctgtttgagctctccagccacgaggaatgcagagaatggcaggtgttcgtactggcgttcaccttcctcatcctcttcctcggcaacttcctgaccacgctcaaagtcgtgcatgccaagctccagaagaacagaggcaagacaaagcagccgtgagcctcgggctcctgtgccctcggcccggacttcagactgcagggggctcccgggctccttcccagcagccctctcaggcccgtggcatcgctgggagagggcccaggccctggtcccccagtggaccccagtggtctagaggaatgtgagccccgcctgtccgcacagtgtccgcccacctatttatgacatatttaatgctgggtcccccatcgtccctggaacccgaggcctcactcctgtgcttgaaggtggctgaggccgggccagtcttcctggggatggggcctgaagcctcagggagcccctctgttcccactcctgtcatttgaacccctctgggtggggtttggatgtgcctcgcggggttggatttatgctgacctgctacttaccaggcccaggctggggtggtgtgaaccctcagtgtcctgtggcgcccccaccccggggccactctgcttctgctgtgagccccctcctcgcccaccccgccacgtggtgagggttattttaagttctcagagacccaccgcgtctgcctcgtgctcttcttgcccctggagcgctgggggcatcctgagtcaggctgtgagaagattcgccaccagagggcgccccgggccctgggtcgtccaaggggacaaggacgttcccgtctgtgcttcggggttccctgacccccccatcctgcagcccaccttcctgcagtgtcgtggcaggtacttggagagtgggaccaagacccttggcccctgtggaggggaaccacctcccccctccttcccagagcttctggatgttgtgggagggaggtgggggtgcctggcaggctcacccccaggggccgcaccctgaggcggggtcagagccactgggcatcgcttgggtgagattctgcattcgacgggaggcagagaggccaccaggtttggctgagtgctctgccccaccattcatatatgggcctcagctccccctaactgtggccctacaaatccctaggccagacctcacagcagtgcccacaggcatgccttgtttagccctcctcaaggaattttaaaatttttaattactttttttttttttgagacagggtctgttgcctaggcgggagtgcagtggcatcataggtcactgtagcctccgcctccagggctcaagggatcctcccacctcagcctctggagtagctgggaccacaatcacacaccaccatgccctgctccttttttttttttttttttgagatgggagtctcgatctgttacccaggctggagtgcagtgacacaatctcagctcactgcaacctctgcctcccaggttcaagtgattctcctgcctcagcctcccgagtaactgggactacaggcgcgtgccaccatgcctggcttttgttttgttttgttttgttttgtatttttagtagagacagggtttcaccatgtttgccaggatagtctcgatctcttgaccttgtgatctgcctgcctcagcctcccaaagtgctgggattacaggtgtgagccaccatgcctggtcaccctgctactttttaatactttttagtagagatggggtctcactatgttgcccaggctggtctccaactcatgggctcaactcatcctcctatcttggcctcccaaagcgctgggattacaggtgtgagccactgtgcctggcctgattacatttttaaaatgagatttccccacccctacagtgagattccacataaaaatccagatttctgctttccctagaaaaacggacctggcaacattcccgtggcacaggacgcctactctccagttgccacaggccctgccacccccctgcccttcattctggtctcctttctggtcctttttaggcacctgcgtttgccctagattaggagtcagctagctgtctgtaaagggccagatggcaactattttgagctttatgggccaggtggtttgtggcagctactcttcacctgcagccccagagcacaaggcaatgcagaaaggaatgggtgttgctgtgttccaataaaactttatttacaaatcaggctgtggccagatgtggcccacaggctgtagttgttggacctctaccgtagaccatcatgaggcctggggttcttcgagaacaagaactccttggttgattccccagggtacggcagggccttgggaacctgggtgggttggggagggtctcagaaggctccttcctttggcaacctgacttcttggaagctcaggtttagctgacgccccagcactgggccaggggggctgaggcaggagatatggggaaggctaggagttgcctgaagccattatcccatcttaggcgacaccgactcctaggcgccctccagagccaagcagcttgcgacttctggtaggcaccggaatcccctgggatgcttgttttaaaagtcctgggccgggcacggtggctcacgcctgtaatcccagcactttgggaggctaaggcgggtggatcacgaggtcaggagttcaagaccagcctggccaacatggtgaaaccctgtctctactaaaaatacaaaaattagccggacgtggtggtgtgcgcatgtagtcccagctactcaggaggctgaggcaagagaatcgcttgaacccaggaggtggagcttgcagtgagccaagatcatgccactgcactctagcctgagtgacagaatgagactctgtcccaaaaaaaaaaaaaaaaaaaaattcccagaccctcggccccagaccttcccaaaggaggctcagggattaggtatctggctgttggtgacacaggtggtctatgaaccagttctgagaaactgtcccgcgtggacagggggtagatcccatcagttctcaaaggaggccaggatgtctcgcctcctgaactccacaggctggtagaagcggggcttgagggacagcaggttgggagcttgaggactaagtgggccagtcctgtcctaccacagtggggggaacagtccacagaaaacttgctcatgaccacactgggagccgactgttcttcccatcccaagtctctgacactgggggctttgggtgaaaccttaaggagatggtcagatgggtggtccagggtatacttttaacaactgagaagccattttttctgccccctgggcacatgtgcccagctctgcaaagacagtggccaagttgaagacaagtcttccatgtggggtggagatgggaggggtgggtgccaggctgcagcctgtgtcctcctgataggcccagccccctcggtggcctccgtgttcctgggggaaggaaggaaggagctggaggatacagtggtgcctatctcgggagcccagggaggcagggacacaggagtggcaggcttggggcgcccgcgtggaacagtgccaggtctacgtttacccactaccagatagactttttcatttcaagcataacttgagtctgcactggggagacactcgtggtgggggtggctgtgatgagggcacttgcgagtcccgacaacagacactggctcctgcacccacatcaccaccatgtcccaggggcagcctggaggggagtttgtggtcagagccccagccaggaaaggagagagttccagaatgttccaagagtctagccgcaggccccagacaccatgagctggagggtcgggatggggcagcctccctggtgcaatcggcacctgggcccccgggccctgtcagtgctgtcgtgaggtctgtctgccctgggtcagagcagcaggcagagccggcgcttcttctgccgttgcgccttcttcagagcgctgagagccaccttggcggcctcccggaagacgtcctccacattctcccgaaacttggcggaacattccaggtagagagcagctcggatctgttcgcaggcgctcaggccctgggtggggggaggagccagcattaggtgaggggcccctggaggtctcctagcaccacctggtgggtttgggactggctctgaggactctgcagggatggaggccttggtttgggcctgtctgtctcctccatcctggctgcccctcacagtgtgtgggtggaatggagggccagggcagtgcagcccgcaggttggaagaagccctgtccaggcccccaccctggcctctctccagctccgggcagggaggggctgaatcctgagacccggggttggttcccccaggtgtctcccaggcctgtgagaagagttggaggcctcaagacagaaaggacttccagccacctctctcccttctctgaaagtaccatttaggcaaattaatttgcccttttatttatttatttttgagatggagttttgctcttgttacccaggctggagtgcaatggcgcgatcttggttcatcacaacctctgccacccaggttcaagcgattctcctgcctcagcctcccgagtagctgggattacaggcatgcgccaccatgcccggctaatgttgtatttttagtagagatggggtttctctcatgttggtcaggctggtctcaaactcccaacctcaggtgattcgcccgcctcggcctcccaaagtgctgggattacaggcgtgagccactatgcccggccggatttgcccttattaatggttatttcttgtgaaagtttctttttgcctttgcattccttttattctgtttattcccccatgcctcacccaaagagttgcacggtcaattggcccgtgaaggggacgcctactttcaaacaaggcagacaggacacgacaggacggcggctcatagcacagactttggattgcagtggatgggaccagatcctggctccacttctcgctagctgtgtggccctgggcaagctgcttaacctctctgggcctcagtttctccccctgtaaactgggggatgtgaacagcgcctgcctccgagtcctaaggattgggagtagtcgtgtaaagtgctcaggtccacaggccatcaatactaatagttaaaaattattcttagaatcttgcttccctcagctccctgaaaggccactaaggcaccccagttgcagaggccaaaggtccgggaggcttcacagccacggctgtgccccagggtcttggccccggcccacctgcatgtaggtgatgggctccagctgggcggcccggagcttccgcagctgctccttgtccttcctcaggtctgtcttgcagccgatgagcaccatggggatcccgcggcagaaatgcgtgacctcagggaaccactgtggagggaggaggcgggatcaggggtgcggccgggcccagatgtggggccaccacccaggaggccggcctcaccttgatgaggacgttgtcgtagctggtgggattcatgacgtcatagcagatgagcacgaggtgggtgttctggtaggacaggggccgcagccggtcatagtcttcttgccctgaaagcacagagcagcgggggtcaggggacgtcccctccctgtctggactctgacgggtgaaggggaaggggccaggcaagtgaccctgccttagggcctcaatttcctcatctatacaatgggcagcaagccaggagtgctggcacaggcctgtggtcgcagctactcgggaggctgaggccggaggatcgcttgagcccaggaggtcaaggctacagtgagccgtgatcatgccactgcactccagcctgggtgacagagcgagaccctgtctcttaacaacaaaacccatgagcggcagccccccagtcctggatggtggtaaagaatcctcaagatcaaacccacgcagtgctgagagcttggcctgattctagggctggggctggagaaactgctagagatgatgccgatagccagtgtgatccccctgccctgatggtcaagggcagagtgcagactggaaccctcccctccccaaagattcagacctgtggggctgagtgggctcatagtgtccccaagtcctgagaggctggtgtctggcttcagcctccagcttctcaggttctgatgcagtcagctgagttccctgcctattcttgcaagcactaggaggagggtggtgggttgctgggaacagcaccgagcgccctccccacccagattcacagagcacactccctggggggatactttaatccggaggccgtgacgcctggctccgccccgagacgagctgaatccaaatacggatctaggcttgagcttggttgggtttgcttttttcttcttcttctttataaacaattctttgtaactttttgtattgacagtttcaaacttacagtaaaattgcaacacgag

SEQ ID NO: 193505 - DNA, 2959 bp, Homo sapiens
  Payload ID: 18202
  Gene Name: transmembrane protein 120B
  ENST ID: ENST00000541467
  CDS Start-End: 1-744
cttcaggagacgcacaggatctacaagcagaagctggaggagctggctgcgctgcagacgctgtgtagcagttccatcagtaagcagaagaagcacctcaaggacttgaagcttacactccagaggtgcaaacgccatgccagtcgggaggaggcggagctcgttcagcagatggcagcgaacatcaaggagcggcaggacgtcttcttcgacatggaggcctacctgcccaagaagaacgggctctacttgaacctggtcctcggcaatgtgaacgtgaccctcctcagcaaccaggccaagttcgcctacaaggacgaatatgagaagttcaagctctacctgaccatcatcctgctcctgggtgccgtggcatgtcgatttgtccttcactacagggtgactgacgaagtcttcaacttcctgctggtgtggtattactgcaccctgaccattcgggagagcattctcatcagcaacggctcaagaattaaaggctggtgggtgtctcaccactacgtctccacattcctgtccggagtgatgctgacctggcctaatggacccatttatcagaagtttcgcaaccagttcttagcattttccatttttcagagctgcgtccagttcctgcaatattattaccagaggggctgcctctaccggctgcgggccctgggggagaggaaccacctggatctcacagtggttctggcagctctacaatgccgtcacgctgtttgagctctccagccacgaggaatgcagagaatggcaggtgttcgtactggcgttcaccttcctcatcctcttcctcggcaacttcctgaccacgctcaaagtcgtgcatgccaagctccagaagaacagaggcaagacaaagcagccgtgagcctcgggctcctgtgccctcggcccggacttcagactgcagggggctcccgggctccttcccagcagccctctcaggcccgtggcatcgctgggagagggcccaggccctggtcccccagtggaccccagtggtctagaggaatgtgagccccgcctgtccgcacagtgtccgcccacctatttatgacatatttaatgctgggtcccccatcgtccctggaacccgaggcctcactcctgtgcttgaaggtggctgaggccgggccagtcttcctggggatggggcctgaagcctcagggagcccctctgttcccactcctgtcatttgaacccctctgggtggggtttggatgtgcctcgcggggttggatttatgctgacctgctacttaccaggcccaggctggggtggtgtgaaccctcagtgtcctgtggcgcccccaccccggggccactctgcttctgctgtgagccccctcctcgcccaccccgccacgtggtgagggttattttaagttctcagagacccaccgcgtctgcctcgtgctcttcttgcccctggagcgctgggggcatcctgagtcaggctgtgagaagattcgccaccagagggcgccccgggccctgggtcgtccaaggggacaaggacgttcccgtctgtgcttcggggttccctgacccccccatcctgcagcccaccttcctgcagtgtcgtggcaggtacttggagagtgggaccaagacccttggcccctgtggaggggaaccacctcccccctccttcccagagcttctggatgttgtgggagggaggtgggggtgcctggcaggctcacccccaggggccgcaccctgaggcggggtcagagccactgggcatcgcttgggtgagattctgcattcgacgggaggcagagaggccaccaggtttggctgagtgctctgccccaccattcatatatgggcctcagctccccctaactgtggccctacaaatccctaggccagacctcacagcagtgcccacaggcatgccttgtttagccctcctcaaggaattttaaaatttttaattactttttttttttttgagacagggtctgttgcctaggcgggagtgcagtggcatcataggtcactgtagcctccgcctccagggctcaagggatcctcccacctcagcctctggagtagctgggaccacaatcacacaccaccatgccctgctccttttttttttttttttttgagatgggagtctcgatctgttacccaggctggagtgcagtgacacaatctcagctcactgcaacctctgcctcccaggttcaagtgattctcctgcctcagcctcccgagtaactgggactacaggcgcgtgccaccatgcctggcttttgttttgttttgttttgttttgtatttttagtagagacagggtttcaccatgtttgccaggatagtctcgatctcttgaccttgtgatctgcctgcctcagcctcccaaagtgctgggattacaggtgtgagccaccatgcctggtcaccctgctactttttaatactttttagtagagatggggtctcactatgttgcccaggctggtctccaactcatgggctcaactcatcctcctatcttggcctcccaaagcgctgggattacaggtgtgagccactgtgcctggcctgattacatttttaaaatgagatttccccacccctacagtgagattccacataaaaatccagatttctgctttccctagaaaaacggacctggcaacattcccgtggcacaggacgcctactctccagttgccacaggccctgccacccccctgcccttcattctggtctcctttctggtcctttttaggcacctgcgtttgccctagattaggagtcagctagctgtctgtaaagggccagatggcaactattttgagctttatgggccaggtggtttgtggcagctactcttcacctgcagccccagagcacaaggcaatgcagaaaggaatgggtgttgctgtgttccaataaaactttatttacaaatcag

SEQ ID NO: 193506 - DNA, 962 bp, Homo sapiens
  Payload ID: 18202
  Gene Name: transmembrane protein 120B
  ENST ID: ENST00000540377
  CDS Start-End: 397-675
ttcgcctacaaggacgaatatgagaagttcaagctctacctgaccatcatcctgctcctgggtgccgtggcatgtcgatttgtccttcactacagggtgactgacgaagtcttcaacttcctgctggtgtggtattactgcaccctgaccattcgggagagcattctcatcagcaacggctcaaggctgcgtccagttcctgcaatattattaccagaggggctgcctctaccggctgcgggccctgggggagaggaaccacctggatctcacagtggaagggttccagtcctggatgtggcggggcctcacctttctcctgcccttcctcttctgtggccatttctggcagctctacaatgccgtcacgctgtttgagctctccagccacgaggaatgcagagaatggcaggtgttcgtactggcgttcaccttcctcatcctcttcctcggcaacttcctgaccacgctcaaagtcgtgcatgccaagctccagaagaacagaggcaagacaaagcagccgtgagcctcgggctcctgtgccctcggcccggacttcagactgcagggggctcccgggctccttcccagcagccctctcaggcccgtggcatcgctgggagagggcccaggccctggtcccccagtggaccccagtggtctagaggaatgtgagccccgcctgtccgcacagtgtccgcccacctatttatgacatatttaatgctgggtcccccatcgtccctggaacccgaggcctcactcctgtgcttgaaggtggctgaggccgggccagtcttcctggggatggggcctgaagcctcagggagcccctctgttcccactcctgtcatttgaacccctctgggtggggtttggatgtgcctcgcggggttggatttatgctgacctgctacttaccaggcccaggctggggtggtgtgaaccctcagtgtcctgtg

SEQ ID NO: 193507 - DNA, 1532 bp, Homo sapiens
  Payload ID: 18203
  Gene Name: transmembrane protein 121
  Uniprot ID: Q9BTD3
  ENST ID: ENST00000392519
  CDS Start-End: 165-1124
agaggctgggcgggcgggcccgggagcggcgcagcatctgcgggcggcggggtttcgagctcgccgggccgtgtcgcgccatgcccgctggctgagcgccgcagggcctcgtcccgccaggcgtgggggccgcgcgcgcccaggccggggcccggcggccgaccatggtgctgccgcccccggaccggcgccacgtgtgcctgaccacgctggtgatcatgggcagcatggccgtcatggacgcgtacctggtggagcagaaccagggcccgcgcaagatcggcgtgtgcatcatcgtgctggtgggcgacgtgtgcttcctgctggtgctgcgctacgtggccgtgtgggtgggcgccgaggtgcgcacggccaagcgcggctacgccatgatcctgtggttcctttacatcttcgtgctggagatcaagctctacttcatcttccagaactacaaggcggcgcggcgcggcgcggcggaccccgtggcgcgcaaggcgctgacgctgctgctgtctgtgtgtgtgcccggcctgttcctgctgctcgtggcgctggaccgcatggagtacgtgcgcaccttccgcaagcgcgaggacctgcgcggccgcctgttttgggtggcgctggacctgctggacctgctggacatgcaggccagcctgtgggagccgccgcgctccgggctgccgctgtgggccgagggcctcaccttcttctactgctacatgctgctgctggtgctgccgtgcgtggcgctcagcgaggtcagcatgcagggcgagcacatagcgccgcagaagatgatgctgtacccggtgctcagcctcgccaccgtcaatgtggtggccgtgctggcgcgcgccgccaacatggcgctgttccgggacagccgtgtctcggccatcttcgtcggcaaaaacgtggtggcgctcgccaccaaggcctgcaccttcctggagtaccgccgccaggtgcgcgacttcccgccgcctgcgctatcactggagctgcagccgccacccccgcagcgcaactcggtgccgccgccgccgccgccgctgcacggcccgcctgggcgcccccacatgtcctcgcccacgcgtgaccccctggacacgtgacagggcccgcgcggcccccgacacgcccctggggcgcagagacaccgggttggcttggggcgcgcggtttgcatgggatggggtgggggcgggctcccctagggacaggtgcctcgagtgcccgtgcctggggtcccgcggccgcttcttcatctcaggaatctctcggaccgcggatcctcagcccccgctccaccagcccgccccagcgcgtgggtctgtttgggaggcctgggccggagcagagcagaggtgatccggcccctgcctgctgggccgcccgggttggaagggagggcagtgtgggcggagatctgctccttcggtgggggcctctggctcagatttggggccaaggaggcctctgtcattttaaagactcgtgtttacagttttgtatccaaggcc

SEQ ID NO: 193508 - DNA, 1519 bp, Homo sapiens
  Payload ID: 18203
  Gene Name: transmembrane protein 121
  Uniprot ID: Q9BTD3
  ENST ID: ENST00000431372
  CDS Start-End: 152-1111
cgcgcctggtgggaagcacgcggggtgcggggggcggggtttcgagctcgccgggccgtgtcgcgccatgcccgctggctgagcgccgcagggcctcgtcccgccaggcgtgggggccgcgcgcgcccaggccggggcccggcggccgaccatggtgctgccgcccccggaccggcgccacgtgtgcctgaccacgctggtgatcatgggcagcatggccgtcatggacgcgtacctggtggagcagaaccagggcccgcgcaagatcggcgtgtgcatcatcgtgctggtgggcgacgtgtgcttcctgctggtgctgcgctacgtggccgtgtgggtgggcgccgaggtgcgcacggccaagcgcggctacgccatgatcctgtggttcctttacatcttcgtgctggagatcaagctctacttcatcttccagaactacaaggcggcgcggcgcggcgcggcggaccccgtggcgcgcaaggcgctgacgctgctgctgtctgtgtgtgtgcccggcctgttcctgctgctcgtggcgctggaccgcatggagtacgtgcgcaccttccgcaagcgcgaggacctgcgcggccgcctgttttgggtggcgctggacctgctggacctgctggacatgcaggccagcctgtgggagccgccgcgctccgggctgccgctgtgggccgagggcctcaccttcttctactgctacatgctgctgctggtgctgccgtgcgtggcgctcagcgaggtcagcatgcagggcgagcacatagcgccgcagaagatgatgctgtacccggtgctcagcctcgccaccgtcaatgtggtggccgtgctggcgcgcgccgccaacatggcgctgttccgggacagccgtgtctcggccatcttcgtcggcaaaaacgtggtggcgctcgccaccaaggcctgcaccttcctggagtaccgccgccaggtgcgcgacttcccgccgcctgcgctatcactggagctgcagccgccacccccgcagcgcaactcggtgccgccgccgccgccgccgctgcacggcccgcctgggcgcccccacatgtcctcgcccacgcgtgaccccctggacacgtgacagggcccgcgcggcccccgacacgcccctggggcgcagagacaccgggttggcttggggcgcgcggtttgcatgggatggggtgggggcgggctcccctagggacaggtgcctcgagtgcccgtgcctggggtcccgcggccgcttcttcatctcaggaatctctcggaccgcggatcctcagcccccgctccaccagcccgccccagcgcgtgggtctgtttgggaggcctgggccggagcagagcagaggtgatccggcccctgcctgctgggccgcccgggttggaagggagggcagtgtgggcggagatctgctccttcggtgggggcctctggctcagatttggggccaaggaggcctctgtcattttaaagactcgtgtttacagttttgtatccaaggcc

SEQ ID NO: 193509 - DNA, 3321 bp, Homo sapiens
  Payload ID: 18204
  Gene Name: transmembrane protein 123
  Uniprot ID: Q8N131
  ENST ID: ENST00000361236
  CDS Start-End: 217-786
cccagcccggccccgccgccccggctgcgcacgcgacgccccctccaggccccgctcctgcgccctatttggtcattcggggggcaagcggcgggaggggaaacgtgcgcggccgaaggggaagcggagccggcgccggctgcgcagaggagccgctctcgccgccgccacctcggctgggagcccacgaggctgccgcatcctgccctcggaacaatgggactcggcgcgcgaggtgcttgggccgcgctgctcctggggacgctgcaggtgctagcgctgctgggggccgcccatgaaagcgcagccatggcggagactctccaacatgtgccttctgaccatacaaatgaaacttccaacagtactgtgaaaccaccaacttcagttgcctcagactccagtaatacaacggtcaccaccatgaaacctacagcggcatctaatacaacaacaccagggatggtctcaacaaatatgacttctaccaccttaaagtctacacccaaaacaacaagtgtttcacagaacacatctcagatatcaacatccacaatgaccgtaacccacaatagttcagtgacatctgctgcttcatcagtaacaatcacaacaactatgcattctgaagcaaagaaaggatcaaaatttgatactgggagctttgttggtggtattgtattaacgctgggagttttatctattctttacattggatgcaaaatgtattactcaagaagaggcattcggtatcgaaccatagatgaacatgatgccatcatttaaggaaatccatggaccaaggatggaatacagattgatgctgccctatcaattaattttggtttattaatagtttaaaacaatattctctttttgaaaatagtataaacaggccatgcatataatgtacagtgtattacgtaaatatgtaaagattcttcaaggtaacaagggtttgggttttgaaataaacatctggatccttatagaccgttcatacaatggttttagcaagttcatagtaagacaaacaagtcctatctttttttttttggctggggtgggggcattggtcacatatgaccagtaattgaaagacgtcatcactgaaagacagaatgccatctgggcatacaaataagaagtttgtcacagcactcaggattttgggtatcttttgtagctcacataaagaacttcagtgcttttcagagctggatatatcttaattactaatgccacacagaaattatacaatcaaactagatctgaagcataatttaagaaaaacatcaacattttttgtgctttaaactgtagtagttggtctagaaacaaaatactccaagaaaaagaaaattttcaaataaaacccaaaataatagctttgcttagccctgttagggatccattggagcattaaggagcacatatttttattaacttcttttgagctttcaatgttgatgtaatttttgttctctgtgtaatttaggtaaactgcagtgtttaacataataatgttttaaagacttagttgtcagtattaaataatcctggcattatagggaaaaaacctcctagaagttagattatttgctactgtgagaatattgtcaccactggaagttactttagttcatttaattttaattttatattttgtgaatattttaagaactgtagagctgctttcaatatctagaaatttttaattgagtgtaaacacacctaactttaagaaaaagaaccgcttgtatgattttcaaaagaacatttagaattctatagagtcaaaactatagcgtaatgctgtgtttattaagccagggattgtgggacttcccccaggcaactaaacctgcaggatgaaaatgctatattttctttcatgcactgtcgatattactcagatttggggaaatgacatttttatactaaaacaaacaccaaaatattttagaataaattcttagaaagttttgagaggaatttttagagaggacatttcctccttcctgatttggatattccctcaaatccctcctcttactccatgctgaaggagaagtactctcagatgcattatgttaatggagagaaaaagcacagtattgtagagacaccaatattagctaatgtattttggagtgttttccattttacagtttatattccagcactcaaaactcagggtcaagttttaacaaaagaggtatgtagtcacagtaaatactaagatggcatttctatctcagagggccaaagtgaatcacaccagtttctgaaggtcctaaaaatagctcagatgtcctaatgaacatgcacctacatttaataggagtacaataaaactgttgtcagcttttgttttacagagaacgctagatattaagaattttgaaatggatcatttctacttgctgtgcattttaaccaataatctgatgaatatagaaaaaaatgatccaaaatatggatatgattggatgtatgtaacacatacatggagtatggaggaaattttctgaaaaatacatttagattagtttagtttgaaggagaggtgggctgatggctgagttgtatgttactaacttggccctgactggttgtgcaaccattgcttcatttctttgcaaaatgtagttaagatatactttattctaatgaaggccttttaaatttgtccactgcattcttggtatttcactacttcaagtcagtcagaacttcgtagaccgacctgaagtttctttttgaatacttgtttctttagcactttgaagatagaaaaaccactttttaagtactaagtcatcatttgccttgaaagtttcctctgcattgggtttgaagtagtttagttatgtctttttctctgtatgtaagtagtataatttgttactttcaaatacccgtactttgaatgtaggtttttttgttgttgttatctataaaaattgagggaaatggttatgcaaaaaaatattttgctttggaccatatttcttaagcataaaaaaaatgctcagttttgcttgcattccttgagaatgtatttatctgaagatcaaaacaaacaatccagatgtataagtactaggcagaagccaattttaaaatttccttgaataatccatgaaaggaataattcaaatacagataaacagagttggcagtatattatagtgataattttgtattttcacaaaaaaaaagttaaactcttcttttctttttattataatgaccagcttttggtatttcattgttaccaagttctatttttagaataaaattgttctccttctaaaa

SEQ ID NO: 193510 - DNA, 3579 bp, Homo sapiens
  Payload ID: 18204
  Gene Name: transmembrane protein 123
  Uniprot ID: Q8N131
  ENST ID: ENST00000398136
  CDS Start-End: 422-1048
aaaggcttccttccgggcaccgcgaagccagcgtgctcagcattcagggaggcagcggcgctcgccttcatccaggacaacaaaactgccatttccgaagagaaaggaaacggctcgcggtttctggggttcccaagcgcgcgcctgcgagggaggccgcgagccgagtcgccacgcccagaaccccgagcccgcccccgcgccacccagcccggccccgccgccccggctgcgcacgcgacgccccctccaggccccgctcctgcgccctatttggtcattcggggggcaagcggcgggaggggaaacgtgcgcggccgaaggggaagcggagccggcgccggctgcgcagaggagccgctctcgccgccgccacctcggctgggagcccacgaggctgccgcatcctgccctcggaacaatgggactcggcgcgcgaggtgcttgggccgcgctgctcctggggacgctgcaggtgctagcgctgctgggggccgcccatgaaagcgcagccatggcggcatctgcaaacatagagaattctgggcttccacacaactccagtgctaactcaacagagactctccaacatgtgccttctgaccatacaaatgaaacttccaacagtactgtgaaaccaccaacttcagttgcctcagactccagtaatacaacggtcaccaccatgaaacctacagcggcatctaatacaacaacaccagggatggtctcaacaaatatgacttctaccaccttaaagtctacacccaaaacaacaagtgtttcacagaacacatctcagatatcaacatccacaatgaccgtaacccacaatagttcagtgacatctgctgcttcatcagtaacaatcacaacaactatgcattctgaagcaaagaaaggatcaaaatttgatactgggagctttgttggtggtattgtattaacgctgggagttttatctattctttacattggatgcaaaatgtattactcaagaagaggcattcggtatcgaaccatagatgaacatgatgccatcatttaaggaaatccatggaccaaggatggaatacagattgatgctgccctatcaattaattttggtttattaatagtttaaaacaatattctctttttgaaaatagtataaacaggccatgcatataatgtacagtgtattacgtaaatatgtaaagattcttcaaggtaacaagggtttgggttttgaaataaacatctggatccttatagaccgttcatacaatggttttagcaagttcatagtaagacaaacaagtcctatctttttttttttggctggggtgggggcattggtcacatatgaccagtaattgaaagacgtcatcactgaaagacagaatgccatctgggcatacaaataagaagtttgtcacagcactcaggattttgggtatcttttgtagctcacataaagaacttcagtgcttttcagagctggatatatcttaattactaatgccacacagaaattatacaatcaaactagatctgaagcataatttaagaaaaacatcaacattttttgtgctttaaactgtagtagttggtctagaaacaaaatactccaagaaaaagaaaattttcaaataaaacccaaaataatagctttgcttagccctgttagggatccattggagcattaaggagcacatatttttattaacttcttttgagctttcaatgttgatgtaatttttgttctctgtgtaatttaggtaaactgcagtgtttaacataataatgttttaaagacttagttgtcagtattaaataatcctggcattatagggaaaaaacctcctagaagttagattatttgctactgtgagaatattgtcaccactggaagttactttagttcatttaattttaattttatattttgtgaatattttaagaactgtagagctgctttcaatatctagaaatttttaattgagtgtaaacacacctaactttaagaaaaagaaccgcttgtatgattttcaaaagaacatttagaattctatagagtcaaaactatagcgtaatgctgtgtttattaagccagggattgtgggacttcccccaggcaactaaacctgcaggatgaaaatgctatattttctttcatgcactgtcgatattactcagatttggggaaatgacatttttatactaaaacaaacaccaaaatattttagaataaattcttagaaagttttgagaggaatttttagagaggacatttcctccttcctgatttggatattccctcaaatccctcctcttactccatgctgaaggagaagtactctcagatgcattatgttaatggagagaaaaagcacagtattgtagagacaccaatattagctaatgtattttggagtgttttccattttacagtttatattccagcactcaaaactcagggtcaagttttaacaaaagaggtatgtagtcacagtaaatactaagatggcatttctatctcagagggccaaagtgaatcacaccagtttctgaaggtcctaaaaatagctcagatgtcctaatgaacatgcacctacatttaataggagtacaataaaactgttgtcagcttttgttttacagagaacgctagatattaagaattttgaaatggatcatttctacttgctgtgcattttaaccaataatctgatgaatatagaaaaaaatgatccaaaatatggatatgattggatgtatgtaacacatacatggagtatggaggaaattttctgaaaaatacatttagattagtttagtttgaaggagaggtgggctgatggctgagttgtatgttactaacttggccctgactggttgtgcaaccattgcttcatttctttgcaaaatgtagttaagatatactttattctaatgaaggccttttaaatttgtccactgcattcttggtatttcactacttcaagtcagtcagaacttcgtagaccgacctgaagtttctttttgaatacttgtttctttagcactttgaagatagaaaaaccactttttaagtactaagtcatcatttgccttgaaagtttcctctgcattgggtttgaagtagtttagttatgtctttttctctgtatgtaagtagtataatttgttactttcaaatacccgtactttgaatgtaggtttttttgttgttgttatctataaaaattgagggaaatggttatgcaaaaaaatattttgctttggaccatatttcttaagcataaaaaaaatgctcagttttgcttgcattccttgagaatgtatttatctgaagatcaaaacaaacaatccagatgtataagtactaggcagaagccaattttaaaatttccttgaataatccatgaaaggaataattcaaatacagataaacagagttggcagtatattatagtgataattttgtattttcacaaaaaaaaagttaaactcttcttttctttttattataatgaccagcttttggtatttcattgttaccaagttctatttttagaataaaattgttctccttct

SEQ ID NO: 193511 - DNA, 568 bp, Homo sapiens
  Payload ID: 18204
  Gene Name: transmembrane protein 123
  ENST ID: ENST00000531103
  CDS Start-End: 503-568
aacgaataaagcactctgaaaagttgcttaattgggacatagaaatctcttacattttttccaaatctaaaggtgtactaatttaaaaattaaaaccctactgagaaggtgcagttaaataagaaaatcctattttatccctccattgtatgaaattaggggtgttggttgggtggtgcaagacctagagatgcctgtgagtagaatcggcctctcctgaaatggtccactccactcagaagagcagagtcctcagtggcagaaattggcccatctgtccccaattgtgtgggtaaatgaattttggcaaagctgttgcattcggtggctggtatatacatctgcaaacatagagaattctgggcttccacacaactccagtgctaactcaacagagactctccaacatgtgccttctgaccatacaaatgaaacttccaacagtactgtgaaaccaccaacttcagttgcctcagactccagtaatacaacggtcaccaccatgaaacctacagcggcatctaatacaacaacaccagggatggtctcaacaaatatgacttctacc

SEQ ID NO: 193512 - DNA, 568 bp, Homo sapiens
  Payload ID: 18204
  Gene Name: transmembrane protein 123
  ENST ID: ENST00000528969
  CDS Start-End: 195-557
tgtttcaatgaattaccgattagagaaactcatctgcaaacatagagaattctgggcttccacacaactccagtgctaactcaacagagactctccaacatgtgccttctgaccatacaaatgaaacttccaacagtactgtgaaaccaccaacttcagttgcctcagactccagtaatacaacggtcaccaccatgaaacctacagcggcatctaatacaacaacaccagggatggtctcaacaaatatgacttctaccaccttaaagtctacacccaaaacaacaagtgtttcacagaacacatctcagatatcaacatccacaatgaccgtaacccacaatagttcagtgacatctgctgcttcatcagtaacaatcacaacaactatgcattctgaagcaaagaaaggatcaaaatttgatactgggagctttgttggtggtattgtattaacgctgggagttttatctattctttacattggatgcaaaatgtattactcaagaagaggcattcggtatcgaaccatagatgaacatgatgccatcatttaaggaaatccatg

SEQ ID NO: 193513 - DNA, 743 bp, Homo sapiens
  Payload ID: 18204
  Gene Name: transmembrane protein 123
  ENST ID: ENST00000532161
  CDS Start-End: 338-700
aggtttggaccagtcacccgctggccccggggccgcctgctgaggaaattgcctggtgcttcccctctcgctttttggatgcggcggtcgcaggccgggacgggtgcgcataacctgttgagttaccgcaagttggtttttacagcctttccctgaagttaatgtttgccgagcatctgcaaacatagagaattctgggcttccacacaactccagtgctaactcaacagagactctccaacatgtgccttctgaccatacaaatgaaacttccaacagtactgtgaaaccaccaacttcagttgcctcagactccagtaatacaacggtcaccaccatgaaacctacagcggcatctaatacaacaacaccagggatggtctcaacaaatatgacttctaccaccttaaagtctacacccaaaacaacaagtgtttcacagaacacatctcagatatcaacatccacaatgaccgtaacccacaatagttcagtgacatctgctgcttcatcagtaacaatcacaacaactatgcattctgaagcaaagaaaggatcaaaatttgatactgggagctttgttggtggtattgtattaacgctgggagttttatctattctttacattggatgcaaaatgtattactcaagaagaggcattcggtatcgaaccatagatgaacatgatgccatcatttaaggaaatccatggaccaaggatggaatacagattgatgctgccc

SEQ ID NO: 193514 - DNA, 467 bp, Homo sapiens
  Payload ID: 18204
  Gene Name: transmembrane protein 123
  ENST ID: ENST00000526676
  CDS Start-End: 329-467
agtcacccgctggccccggggccgcctgctgaggaaattgcctggtgcttcccctctcgctttttggatgcggcggtcgcaggccgggacgggtgcgcataacctgttgagttaccgcaagttggtttttacagcctttccctgaagttaatgtttgccgagcatctgcaaacatagagaattctgggcttccacacaactccagtgctaactcaacaggcagactcaacccaaacacttggtgaggcccttaccctgtgattttagtttgggacaaagccttgggcctctgagttcactaacatggaaagatgcaagaaccaggctgatgtcatcaatatcagtagtaaatcatcaagagactctccaacatgtgccttctgaccatacaaatgaaacttccaacagtactgtgaaaccaccaacttcagttgcctcagactccagtaatacaacggtcaccacca

SEQ ID NO: 193515 - DNA, 567 bp, Homo sapiens
  Payload ID: 18205
  Gene Name: transmembrane protein 125
  ENST ID: ENST00000456751
  CDS Start-End: 521-567
ggaatgctgggactgactccacggccacgcccacctcccccacttccttgagagcatcggcaccagcccccgcccacctcgggggtaggggtcagcctctgcagaggagtctccgggaggacagatacctcgtcaggatgtaacctgtgcacggccacatagtaatattcccagaatgacccaggacctacgtcttctgccctgtcctgccttggagggctcctcccgaggaaccagtggtgacagctgaggccatgtgagtaggatcctgaatgaggctttatctctggctgttcgtcccatcgtccaccgtggcaccagctccctcagccagccgggatgggaccagcgactgagagagccagaggcagagaggtgagggtgaccatatcctggactgtgagaggaatgggactctgggcctgtagctgccaagcaggtggcaggtgctccaggctgtgatctgaaccctctgacccctgacattgacctcctaccctgacccctgcctgaccaagccatgtctgaacaggaggctcaagccccagggggccgggggctgccccc

SEQ ID NO: 193516 - DNA, 1850 bp, Homo sapiens
  Payload ID: 18205
  Gene Name: transmembrane protein 125
  Uniprot ID: Q96AQ2
  ENST ID: ENST00000432792
  CDS Start-End: 571-1230
catttgagggagaatgagcacggggcttttggaggctgcagcctagggccaagggatggaggaatgcctcagcccagcagaaggagcagtgccacgtcagccaatcggctcaggccctgccctggaaacgacacctgttcatcctcctcccggcaggctcacctgagtgcaggttaggcaggtgaagtgtctccccggaaaccaagctagagtgccccacctgctcggccctgccttctcggatcggatccagcacatccaggcttctcctcctcccgaggaaccagtggtgacagctgaggccatgtgagtaggatcctgaatgaggctttatctctggctgttcgtcccatcgtccaccgtggcaccagctccctcagccagccgggatgggaccagcgactgagagagccagaggcagagaggtgagggtgaccatatcctggactgtgagaggaatgggactctgggcctgtagctgccaagcaggtggcaggtgctccaggctgtgatctgaaccctctgacccctgacattgacctcctaccctgacccctgcctgaccaagccatgtctgaacaggaggctcaagccccagggggccgggggctgcccccggacatgctggcagagcaggtggagctgtggtggtcccagcagccgcggcgctcggcgctctgcttcgtcgtggccgtgggcctcgtggcaggctgtggcgcgggcggcgtggcactgctgtcaaccaccagcagccgctcaggtgaatggcggctagcaacgggcactgtgctctgtttgctggctctgctggttctggtgaaacagctgatgagctcggctgtgcaggacatgaactgcatccgccaggcccaccatgtggccctgctgcgcagtggtggaggggccgacgccctcgtggtgctgctcagtggcctcgtgctgctggtcaccggcctgaccctggccgggctggccgccgcccctgcccctgctcggccgctggccgccatgctgtctgtgggcattgctctggctgccttgggctcgcttttgctgctgggcctgctgctgtatcaagtgggtgtgagcggacactgcccctccatctgtatggccactccctccacccacagtggccatggcggccatggcagcatcttcagcatctcaggacagttgtctgctggccggcgtcacgagaccacatccagcattgccagcctcatctgacggagccagagccgtccttcttctcacagcggcctcagcgtccccagagccgagccagggtgtgagtgcatgtgaacgttgagtacacatgagtgcgtgtatgcccccaggctgggtcagctcttctgtggattgcatggcgtgtgattaaaagcccatgtgttcccacacatccacatcatgggaaggttaatgtgtgcctccttggaactgggtgttggtgtccatggaacttcctctctgtatctcaggtcagtaggcgcagaaacgcctcatgatgaagattcttgagccccatttccaagacccctcacatccaatcctgtcctgtaacatccatcaaggatttccataggggtgactggtgcccacccaagactgcaccagtgcctgctcattgaggagagtaactgctggccaggcagaaagaatatgggctctgcaatgagacagacctggaggggactctcccgttgagcactagcagctggaggagttgggagttcatggctatcatggttgtgttaatcgattgtggggatgaaatgtcattgtgtatggaaggcggggctcatggctgattggcaataaaatggcggctgccgttgtcattgtctcca

SEQ ID NO: 193517 - DNA, 1786 bp, Homo sapiens
  Payload ID: 18205
  Gene Name: transmembrane protein 125
  Uniprot ID: Q96AQ2
  ENST ID: ENST00000439858
  CDS Start-End: 507-1166
gcttccccagtaggatccagtctgtggggctcatttgagggagaatgagcacggggcttttggaggctgcagcctagggccaagggatggaggctcacctgagtgcaggttaggcaggtgaagtgtctccccggaaaccaagctagagtgccccacctgctcggccctgccttctcggatcggatccagcacatccaggcttctcctcctcccgaggaaccagtggtgacagctgaggccatgtgagtaggatcctgaatgaggctttatctctggctgttcgtcccatcgtccaccgtggcaccagctccctcagccagccgggatgggaccagcgactgagagagccagaggcagagaggtgagggtgaccatatcctggactgtgagaggaatgggactctgggcctgtagctgccaagcaggtggcaggtgctccaggctgtgatctgaaccctctgacccctgacattgacctcctaccctgacccctgcctgaccaagccatgtctgaacaggaggctcaagccccagggggccgggggctgcccccggacatgctggcagagcaggtggagctgtggtggtcccagcagccgcggcgctcggcgctctgcttcgtcgtggccgtgggcctcgtggcaggctgtggcgcgggcggcgtggcactgctgtcaaccaccagcagccgctcaggtgaatggcggctagcaacgggcactgtgctctgtttgctggctctgctggttctggtgaaacagctgatgagctcggctgtgcaggacatgaactgcatccgccaggcccaccatgtggccctgctgcgcagtggtggaggggccgacgccctcgtggtgctgctcagtggcctcgtgctgctggtcaccggcctgaccctggccgggctggccgccgcccctgcccctgctcggccgctggccgccatgctgtctgtgggcattgctctggctgccttgggctcgcttttgctgctgggcctgctgctgtatcaagtgggtgtgagcggacactgcccctccatctgtatggccactccctccacccacagtggccatggcggccatggcagcatcttcagcatctcaggacagttgtctgctggccggcgtcacgagaccacatccagcattgccagcctcatctgacggagccagagccgtccttcttctcacagcggcctcagcgtccccagagccgagccagggtgtgagtgcatgtgaacgttgagtacacatgagtgcgtgtatgcccccaggctgggtcagctcttctgtggattgcatggcgtgtgattaaaagcccatgtgttcccacacatccacatcatgggaaggttaatgtgtgcctccttggaactgggtgttggtgtccatggaacttcctctctgtatctcaggtcagtaggcgcagaaacgcctcatgatgaagattcttgagccccatttccaagacccctcacatccaatcctgtcctgtaacatccatcaaggatttccataggggtgactggtgcccacccaagactgcaccagtgcctgctcattgaggagagtaactgctggccaggcagaaagaatatgggctctgcaatgagacagacctggaggggactctcccgttgagcactagcagctggaggagttgggagttcatggctatcatggttgtgttaatcgattgtggggatgaaatgtcattgtgtatggaaggcggggctcatggctgattggcaataaaatggcggctgccgttgtcattgtctcca

SEQ ID NO: 193518 - DNA, 739 bp, Homo sapiens
  Payload ID: 18206
  Gene Name: transmembrane protein 126A
  Uniprot ID: Q9H061
  ENST ID: ENST00000304511
  CDS Start-End: 110-697
aaagatggctgcgcccaggtaatttgagcaaaggccacagtgaactccggcgtggctgaggaaggaggaggcacccacaggctgctgggaggagagcataaggctcaaaatggaaaatcataaatccaataataaggaaaacataacaattgttgatatatccagaaaaattaaccagcttccagaagcagaaaggaatctacttgaaaatggatcggtttatgttggattaaatgctgctctttgtggcctcatagcaaacagtctttttcgacgcatcttgaatgtgacaaaggctcgcatagctgctggcttaccaatggcagggataccttttcttacaacagacttaacttacagatgttttgtaagttttcctttgaatacaggtgatttggattgtgaaacctgtaccataacacggagtggactgactggtcttgttattggtggtctataccctgttttcttggctatacctgtaaatggtggtctagcagccaggtatcaatcagctctgttaccacacaaagggaacatcttaagttactggattagaacttctaagcctgtctttagaaagatgttatttcctattttgctccagactatgttttcagcataccttgggtctgaacaatataaactacttataaaggcccttcagttatctgaacctggcaaagaaattcactgattttaaacaaatatgtaaacaaaaataaaatggtaaaaacag

SEQ ID NO: 193519 - DNA, 726 bp, Homo sapiens
  Payload ID: 18206
  Gene Name: transmembrane protein 126A
  ENST ID: ENST00000525353
  CDS Start-End: 131-250
acgccgcgtcacgagtcagccaaagatggctgcgcccaggtaatttgagcaaaggccacagtgaactccggcgtggctgaggaaggaggaggcacccacaggctgctgggaggagagcataaggctcaaaatggaaaatcataaatccaataataaggaaaacataacaattgttgatatatccagaaaaattaaccagcttccagaagcagaaagttctttcttctcaccctttcaggaatctacttgaaaatggatcggtttatgttggattaaatgctgctctttgtggcctcatagcaaacagtctttttcgacgcatcttgaatgtgacaaaggctcgcatagctgctggcttaccaatggcagggataccttttcttacaacagacttaacttacagatgttttgtgatttggattgtgaaacctgtaccataacacggagtggactgactggtcttgttattggtggtctataccctgttttcttggctatacctgtaaatggtggtctagcagccaggtatcaatcagctctgttaccacacaaagggaacatcttaagttactggattagaacttctaagcctgtctttagaaagatgttatttcctattttgctccagactatgttttcagcataccttgggtctgaacaatataaactacttataaaggcccttcagttatctgaacctggcaaagaaattcactgattttaaac

SEQ ID NO: 193520 - DNA, 643 bp, Homo sapiens
  Payload ID: 18206
  Gene Name: transmembrane protein 126A
  Uniprot ID: Q9H061
  ENST ID: ENST00000532180
  CDS Start-End: 224-601
gccacagtgaactccggcgtggctgaggaaggaggaggcacccacaggctgctgggaggagagcataagaaaaattaaccagcttccagaagcagaaaggaatctacttgaaaatggatcggtttatgttggattaaatgctgctctttgtggcctcatagcaaacagtctttttcgacgcatcttgaatgtgacaaaggctcgcatagctgctggcttaccaatggcagggataccttttcttacaacagacttaacttacagatgttttgtaagttttcctttgaatacaggtgatttggattgtgaaacctgtaccataacacggagtggactgactggtcttgttattggtggtctataccctgttttcttggctatacctgtaaatggtggtctagcagccaggtatcaatcagctctgttaccacacaaagggaacatcttaagttactggattagaacttctaagcctgtctttagaaagatgttatttcctattttgctccagactatgttttcagcataccttgggtctgaacaatataaactacttataaaggcccttcagttatctgaacctggcaaagaaattcactgattttaaacaaatatgtaaacaaaaataaaatggtaaaaacag

SEQ ID NO: 193521 - DNA, 656 bp, Homo sapiens
  Payload ID: 18206
  Gene Name: transmembrane protein 126A
  Uniprot ID: Q9H061
  ENST ID: ENST00000528105
  CDS Start-End: 238-615
acgagtcagccaaagatggctgcgcccaggtaatttgagcaaaggccacagtgaactccggcgtggctgaggaaggaggaggcacccacaggctgctgggaggagagcataaggaatctacttgaaaatggatcggtttatgttggattaaatgctgctctttgtggcctcatagcaaacagtctttttcgacgcatcttgaatgtgacaaaggctcgcatagctgctggcttaccaatggcagggataccttttcttacaacagacttaacttacagatgttttgtaagttttcctttgaatacaggtgatttggattgtgaaacctgtaccataacacggagtggactgactggtcttgttattggtggtctataccctgttttcttggctatacctgtaaatggtggtctagcagccaggtatcaatcagctctgttaccacacaaagggaacatcttaagttactggattagaacttctaagcctgtctttagaaagatgttatttcctattttgctccagactatgttttcagcataccttgggtctgaacaatataaactacttataaaggcccttcagttatctgaacctggcaaagaaattcactgattttaaacaaatatgtaaacaaaaataaaatggtaaaaaca

SEQ ID NO: 193522 - DNA, 722 bp, Homo sapiens
  Payload ID: 18206
  Gene Name: transmembrane protein 126A
  ENST ID: ENST00000531366
  CDS Start-End: 111-398
caaagatggctgcgcccaggtaatttgagcaaaggccacagtgaactccggcgtggctgaggaaggaggaggcacccacaggctgctgggaggagagcataaggctcaaaatggaaaatcataaatccaataataaggaaaacataacaattgttgatatatccagaaaaattaaccagcttccagaagcagaaaggaatctacttgaaaatggatcggtttatgttggattaaatgctgctctttgtggcctcatagcaaacagtctttttcgacgcatcttgaatgtgacaaaggctcgcatagctgctggcttaccaatggcagggataccttttcttacaacagacttaacttacagatgttttgtgatttggattgtgaaacctgtaccataacacggagtggactgactggtcttgttattggtggtctataccctgttttcttggctatacctgtaaatggtggtctagcagccaggtatcaatcagctctgttaccacacaaagggaacatcttaagttactggattagaacttctaagcctgtctttagaaagatgttatttcctattttgctccagactatgttttcagcataccttgggtctgaacaatataaactacttataaaggcccttcagttatctgaacctggcaaagaaattcactgattttaaacaaatatgtaaacaaaaataaaatggtaaaaacagttta

SEQ ID NO: 193523 - DNA, 989 bp, Homo sapiens
  Payload ID: 18207
  Gene Name: transmembrane protein 126B
  Uniprot ID: Q8IUX1
  ENST ID: ENST00000358867
  CDS Start-End: 24-716
ggcaagtcacatgagccaccaaaatggtggtgttcgggtatgaggctgggactaagccaagggattcaggtgtggtgccggtgggaactgaggaagcgcccaaggttttcaagatggcagcatctatgcatggtcagcccagtccttctctagaagatgcaaaactcagaagaccaatggtcatagaaatcatagaaaaaaattttgactatcttagaaaagaaatgacacaaaatatatatcaaatggcgacatttggaacaacagctggtttctctggaatattctcaaacttcctgttcagacgctgcttcaaggttaaacatgatgctttgaagacatatgcatcattggctacacttccatttttgtctactgttgttactgacaagctttttgtaattgatgctttgtattcagataatataagcaaggaaaactgtgttttcagaagctcactgattggcatagtttgtggtgttttctatcccagttctttggcttttactaaaaatggacgcctggcaaccaagtatcataccgttccactgccaccaaaaggaagggttttaatccattggatgacgctttgtcaaacacaaatgaaattaatggcgattcctctagtctttcagattatgtttggaatattaaatggtctataccattatgcagtatttgaagagacacttgagaaaactatacatgaagagtaaccaaaaaaatgaatggttgctaacttagcaaaatgaagtttctataaagaggactcaggcattgctgaaagagttaaaagtaactgtgaacaaataatttgttctgtgccttttgcctggtatatagcaaatactcaaaaagtattcaataattcaatcaataaatataagtttcatcttacacgtaagatacaggtcttatctcctgatggtgtgtccattttgcctggtatataacagataataaatatccagtgtcaataaatgtaacaa

SEQ ID NO: 193524 - DNA, 1210 bp, Homo sapiens
  Payload ID: 18207
  Gene Name: transmembrane protein 126B
  Uniprot ID: Q8IUX1
  ENST ID: ENST00000393375
  CDS Start-End: 298-900
tccccgcccaccggcaagtcacatgagccaccaaaatggtggtgttcgggtatgaggctgggactaagccaagggattcaggtgtggtgccggtgggaactgaggaagcgcccaaggaaatgaaacacgatttccaaaatgaacttaatctttcatgagaaactgaggatagagatgtcaataagcagccactgtttccacctccccacctgaagagctaggaggacaactacaaagagcctgactgccttctcggaatgaggagagaggaaaacagcaacagtatcagttttcaagatggcagcatctatgcatggtcagcccagtccttctctagaagatgcaaaactcagaagaccaatggtcatagaaatcatagaaaaaaattttgactatcttagaaaagaaatgacacaaaatatatatcaaatggcgacatttggaacaacagctggtttctctggaatattctcaaacttcctgttcagacgctgcttcaaggttaaacatgatgctttgaagacatatgcatcattggctacacttccatttttgtctactgttgttactgacaagctttttgtaattgatgctttgtattcagataatataagcaaggaaaactgtgttttcagaagctcactgattggcatagtttgtggtgttttctatcccagttctttggcttttactaaaaatggacgcctggcaaccaagtatcataccgttccactgccaccaaaaggaagggttttaatccattggatgacgctttgtcaaacacaaatgaaattaatggcgattcctctagtctttcagattatgtttggaatattaaatggtctataccattatgcagtatttgaagagacacttgagaaaactatacatgaagagtaaccaaaaaaatgaatggttgctaacttagcaaaatgaagtttctataaagaggactcaggcattgctgaaagagttaaaagtaactgtgaacaaataatttgttctgtgccttttgcctggtatatagcaaatactcaaaaagtattcaataattcaatcaataaatataagtttcatcttacacgtaagatacaggtcttatctcctgatggtgtgtccattttgcctggtatataacagataataaatatccagtgtcaataaatgtaacaataaaagtttcatctttcctctttgtatgtggaaatgg

SEQ ID NO: 193525 - DNA, 376 bp, Homo sapiens
  Payload ID: 18207
  Gene Name: transmembrane protein 126B
  ENST ID: ENST00000531274
  CDS Start-End: 1-376
ctgggactaagccaagggattcaggtgtggtgccggtgggaactgaggaagcgcccaaggacacaaaatatatatcaaatggcgacatttggaacaacagctggtttctctggaatattctcaaacttcctgttcagacgctgcttcaagataatataagcaaggaaaactgtgttttcagaagctcactgattggcatagtttgtggtgttttctatcccagttctttggcttttactaaaaatggacgcctggcaaccaagtatcataccgttccactgccaccaaaaggaagggttttaatccattggatgacgctttgtcaaacacaaatgaaattaatggcgattcctctagtctttcagattatgtttgg

SEQ ID NO: 193526 - DNA, 1388 bp, Homo sapiens
  Payload ID: 18207
  Gene Name: transmembrane protein 126B
  ENST ID: ENST00000528361
  CDS Start-End: 12-134
gagccaccaaaatggtggtgttcgggtatgaggctgggactaagccaagggattcaggtgtggtgccggtgggaactgaggaagcgcccaaggaaatgaaacacgatttccaaaatgaacttaatctttcatgagaaactgaggatagagatgtcaataagcagccactgtttccacctccccacctgaagagctaggaggacaactacaaagagcctgactgccttctcggaatgaggagagaggaaaacagcaacagtatcagttttcaagatggcagcatctatgcatggtcagcccagtccttctctagaagatgcaaaactcagaagaccaatggtcatagaaatcatagaaaaaaattttgactatcttagaaaagaaatgacacaaaatatatatcaaatggcgacatttggaacaacagctggtttctctggaatattctcaaacttcctgttcagacgctgcttcaaggttaaacatgatgctttgaagacatatgcatcattggctacacttccatttttgtctactgttgttactgacaagctttttgtaattgatgctttgtattcaggtgaatttaaattcactaatgtataacgtagttatgtctaagtaaagttacttattaacatatactgttgctactgctaataataattctttacatttatatattgctatacagtttacaaagtccatataccttgtcatatttaatccctgcaacaatcctcctaatcaggtaaactgtatttttttatttctgtagataagcaacccaaactgaggcatgttcaagtacgctaataagcaacatactgggaaaagaattggctgtggcatacaacgcacatcatttcagtatgctacctcctgccacttaagttttgtgacattcagtaaggcatttcatctctgagcctccgttgtcttatctataagttaggactaatagtacttacctcacaggattgttgtgagaattaaaagatactgtaggttaaatgactaccacaatatctgtcatattatgggcttttaatgttatttcctgcccctcaccttaccttgagtttcacaactagtaattgatagagcatctatcccttgttcattcttcaggttcctgcttaagtatcttttccccagggagacctctgattgcctcattgtacactaggtgtctggatacattctctatatagtttatcttcaaagtattgtgtacactgataattatctatttaaatatttatctcgtgtctttcatctctgtaaactggccagaaggtcagagatcaggtctcttttatgtaccaccgtattcctagctcctagcacgttcctgatatatagtagataataaaaatgtattaacc

SEQ ID NO: 193527 - DNA, 853 bp, Homo sapiens
  Payload ID: 18207
  Gene Name: transmembrane protein 126B
  ENST ID: ENST00000526822
  CDS Start-End: 5-181
caaaatggtggtgttcgggtatgaggctgggactaagccaagggattcaggtgtggtgccggtgggaactgaggaagcgcccaaggacacaaaatatatatcaaatggcgacatttggaacaacagctggtttctctggaatattctcaaacttcctgttcagacgctgcttcaaggttaaacatgatgctttgaagacatatgcatcattggctacacttccatttttgtctactgttgttactgacaagctttttgtaattgatgctttgtattcagataatataagcaaggaaaactgtgttttcagaagctcactgattggcatagtttgtggtgttttctatcccagttctttggcttttactaaaaatggacgcctggcaaccaagtatcataccgttccactgccaccaaaaggaagggttttaatccattggatgacgctttgtcaaacacaaatgaaattaatggcgattcctctagtctttcagattatgtttggaatattaaatggtctataccattatgcagtatttgaagagacacttgagaaaactatacatgaagagtaaccaaaaaaatgaatggttgctaacttagcaaaatgaagtttctataaagaggactcaggcattgctgaaagagttaaaagtaactgtgaacaaataatttgttctgtgccttttgcctggtatatagcaaatactcaaaaagtattcaataattcaatcaataaatataagtttcatcttacacgtaagatacaggtcttatctcctgatggtgtgtccattttgcctggtatataacagataataaatatccagtgtcaataaatgtaacaataaaa

SEQ ID NO: 193528 - DNA, 1273 bp, Homo sapiens
  Payload ID: 18207
  Gene Name: transmembrane protein 126B
  Uniprot ID: Q8IUX1
  ENST ID: ENST00000534341
  CDS Start-End: 7-519
accaaaatggtggtgttcgggtatgaggctgggactaagccaagggattcaggtgtggtgccggtgggaactgaggaagcgcccaaggttttcaagatggcagcatctatgcatggtcagcccagtccttctctagaagatgcaaaactcagaagaccaatggtcatagaaatcatagaaaaaaattttgactatcttagaaaagaaatgacacaaaatatatatcaaatggcgacatttggaacaacagctggtttctctggaatattctcaaacttcctgttcagacgctgcttcaaggttaaacatgatgctttgaagacatatgcatcattggctacacttccatttttgtctactgttgttactgacaagctttttgtaattgatgctttgtattcagataatataagcaaggaaaactgtgttttcagaagctcactgattggcatagtttgtggtgttttctatcccagttctttggcttttactaaaaatggacgcctggcaaccaagtaagttcttccttttccttcttttttcttttcttttcttttcttttttttttttttttttaggttaataaactctctttcttctttagctgtctatgatatatttgaatcaaaatgtggtagtttggtatttcagatagctaacttttaacttttttgctctctacattatagatctagaaaggcaattatcaatttaggagaagtcaacaaacttctaatagcattcatatccaggagaggtgattaactcttttttctttttaggtatcataccgttccactgccaccaaaaggaagggttttaatccattggatgacgctttgtcaaacacaaatgaaattaatggcgattcctctagtctttcagattatgtttggaatattaaatggtctataccattatgcagtatttgaagagacacttgagaaaactatacatgaagagtaaccaaaaaaatgaatggttgctaacttagcaaaatgaagtttctataaagaggactcaggcattgctgaaagagttaaaagtaactgtgaacaaataatttgttctgtgccttttgcctggtatatagcaaatactcaaaaagtattcaataattcaatcaataaatataagtttcatcttacacgtaagatacaggtcttatctcctgatggtgtgtccattttgcctggtatataacagataataaatatccagtgtcaataaatgtaacaataaaagtttcatctttcctctttgtatgtggaaa

SEQ ID NO: 193529 - DNA, 675 bp, Homo sapiens
  Payload ID: 18207
  Gene Name: transmembrane protein 126B
  ENST ID: ENST00000530783
  CDS Start-End: 12-143
gagccaccaaaatggtggtgttcgggtatgaggctgggactaagccaagggattcaggtgtggtgccggtgggaactgaggaagcgcccaagcttttttgttctgaactcccactgcgttgtggattcctgaggatgggatgactgtatcttgattacccggaggttttcaagatggcagcatctatgcatggtcagcccagtccttctctagaagatgcaaaactcagaagaccaatggtcatagaaatcatagaaaaaaattttgactatcttagaaaagaaatgacacaaaatatatatcaaatggcgacatttggaacaacagctggtttctctggaatattctcaaacttcctgttcagacgctgcttcaaggttaaacatgatgctttgaagacatatgcatcattggctacacttccatttttgtctactgttgttactgacaagctttttgtaattgatgctttgtattcagataatataagcaaggaaaactgtgttttcagaagctcactgattggcatagtttgtggtgttttctatcccagttctttggcttttactaaaaatggacgcctggcaaccaagtatcataccgttccactgccaccaaaaggaagggttttaatccattggatgacgctttgtcaaacacaaatgaaattaatgg

SEQ ID NO: 193530 - DNA, 478 bp, Homo sapiens
  Payload ID: 18207
  Gene Name: transmembrane protein 126B
  ENST ID: ENST00000530901
  CDS Start-End: 1-121
cgggtatgaggctgggactaagccaagggattcaggtgtggtgccggtgggaactgaggaagcgcccaagcttttttgttctgaactcccactgcgttgtggattcctgaggatgggatgactgtatcttgattacccggaggtctggcatataccacgtgctccctaaattatgagcgaatgttgaataaaattctaaaggaaatgaaacacgatttccaaaatgaacttaatctttcatgagaaactgaggatagagatgtcaataagcagccactgtttccacctccccacctgaagagctaggaggacaactacaaagagcctgactgccttctcggaatgaggagagaggaaaacagcaacagtatcagttttcaagatggcagcatctatgcatggtcagcccagtccttctctagaagatgcaaaactcagaagaccaatggtcatagaaatcatagaaaaaaattttgac

SEQ ID NO: 193531 - DNA, 575 bp, Homo sapiens
  Payload ID: 18207
  Gene Name: transmembrane protein 126B
  ENST ID: ENST00000531718
  CDS Start-End: 16-138
acatgagccaccaaaatggtggtgttcgggtatgaggctgggactaagccaagggattcaggtgtggtgccggtgggaactgaggaagcgcccaaggaaatgaaacacgatttccaaaatgaacttaatctttcatgagaaactgaggatagagatgtcaataagcagccactgtttccacctccccacctgaagagctaggaggacaactacaaagagcctgactgccttctcggaatgaggagagaggaaaacagcaacagtatcagttttcaagatggcagcatctatgcatggtcagcccagtccttctctagaagatgcaaaactcagaagaccaatggtcatagaaatcatagaaaaaaattttgactatcttagaaaagaaatgacacaaaatatatatcaaatggcgacatttggaacaacagctggtttctctggaatattctcaaacttcctgttcagacgctgcttcaagataatataagcaaggaaaactgtgttttcagaagctcactgattggcatagtttgtggtgttttctatcccagttctttggcttttactaaaaa

SEQ ID NO: 193532 - DNA, 820 bp, Homo sapiens
  Payload ID: 18207
  Gene Name: transmembrane protein 126B
  ENST ID: ENST00000531477
  CDS Start-End: 16-147
acatgagccaccaaaatggtggtgttcgggtatgaggctgggactaagccaagggattcaggtgtggtgccggtgggaactgaggaagcgcccaagcttttttgttctgaactcccactgcgttgtggattcctgaggatgggatgactgtatcttgattacccggaggtctggcatataccacgtgctccctaaattatgagcgaatgttgaataaaattctaaaggttttcaagatggcagcatctatgcatggtcagcccagtccttctctagaagatgcaaaactcagaagaccaatggtcatagaaatcatagaaaaaaattttgactatcttagaaaagaaatgacacaaaatatatatcaaatggcgacatttggaacaacagctggtttctctggaatattctcaaacttcctgttcagacgctgcttcaaggttaaacatgatgctttgaagacatatgcatcattggctacacttccatttttgtctactgttgttactgacaagctttttgtaattgatgctttgtattcagataatataagcaaggaaaactgtgttttcagaagctcactgattggcatagtttgtggtgttttctatcccagttctttggcttttactaaaaatggacgcctggcaaccaagtatcataccgttccactgccaccaaaaggaagggttttaatccattggatgacgctttgtcaaacacaaatgaaattaatggcgattcctctagtctttcagattatgtttggaatattaaatggtctataccattatgcagtatttgaagagacacttgagaa

SEQ ID NO: 193533 - DNA, 1149 bp, Homo sapiens
  Payload ID: 18207
  Gene Name: transmembrane protein 126B
  ENST ID: ENST00000529197
  CDS Start-End: 4-126
aaaatggtggtgttcgggtatgaggctgggactaagccaagggattcaggtgtggtgccggtgggaactgaggaagcgcccaaggaaatgaaacacgatttccaaaatgaacttaatctttcatgagaaactgaggatagagatgtcaataagcagccactgtttccacctccccacctgaagagctaggaggacaactacaaagagcctgactgccttctcggaatgaggagagaggaaaacagcaacagtatcagttttcaagatggcagcatctatgcatggtcagcccagtccttctctagaagatgcaaaactcagaagaccaatggtcatagaaatcatagaaaaaaattttgactatcttagaaaagaaatgacacaaaatatatatcaaatggcgacatttggaacaacagctggtttctctggaatattctcaaacttcctgttcagacgctgcttcaaggttaaacatgatgctttgaagacatatgcatcattggctacacttccatttttgtctactgttgttactgacaagctttttgtaattgatgctttgtattcagataatataagcaaggaaaactgtgttttcagaagctcactgattggcatagtttgtggtgttttctatcccagttctttggcttttactaaaaatggacgcctggcaaccaagtatcataccgttccactgccaccaaaaggaagggttttaatccattggatgacgctttgtcaaacacaaatgaaattaatggcgattcctctagtctttcagattatgtttggaatattaaatggtctataccattatgcagtatttgaagagacacttgagaaaactatacatgaagagtaaccaaaaaaatgaatggttgctaacttagcaaaatgaagtttctataaagaggactcaggcattgctgaaagagttaaaagtaactgtgaacaaataatttgttctgtgccttttgcctggtatatagcaaatactcaaaaagtattcaataattcaatcaataaatataagtttcatcttacacgtaagatacaggtcttatctcctgatggtgtgtccattttgcctggtatataacagataataaatatccagtgtcaataaatgtaacaataaaagtt

SEQ ID NO: 193534 - DNA, 6266 bp, Homo sapiens
  Payload ID: 18208
  Gene Name: transmembrane protein 127
  Uniprot ID: O75204
  ENST ID: ENST00000258439
  CDS Start-End: 258-974
agtgcatcggccccgggtctgtccgggcgttgcgggattggggcctgggaacgctcggcccccggcagccgagaagcccgtgactgggctgagcagcaccatcccagccctggggcctgctgactgcccagtcccggcttcacctgcagcgaacccggagcgttgctatcctccaccggactgtcaggctctgcgcgccccgcggaggtcggcggcgaccagcagcgactgcggagcgacggcgggcggccccgggcatgtacgcccccggaggcgcagggctgcccggcgggcgccggcggaggagcccgggaggcagcgctctgcccaagcagccggagcgtagcctggcctcggccctgcctggcgccctgtctatcacggcgctgtgcactgccctcgccgagcccgcctggttgcacatccacggaggcacctgttcgcgccaggagctgggggtctccgacgtgttgggctatgtgcacccggacctgctgaaagatttctgcatgaatccccagacagtgctgctcctgcgggtcatcgccgccttctgtttcctgggcatcctgtgtagtctctccgctttccttctggatgtctttgggccgaagcatcctgctctgaagatcactcgtcgctatgccttcgcccatatcctaacggttctgcagtgtgccaccgtcattggcttttcttattgggcttctgaactcatcttggcccagcagcagcagcataagaagtaccatggatcccaggtctatgtcaccttcgccgttagcttctacctggtggcaggagctggtggagcctcaatcctggccacggcagccaacctcctgcgccactaccccacagaggaagaggagcaggcgctggagctgctctcagagatggaagagaacgagccctacccggcggaatatgaggtcatcaaccagttccagccaccccctgcttacacaccctaatgccagccctgggctctcttcctcggcagcccctccctcaactctgcagctcctctcgcacccagaggagctcctttccccagcaggcctcactggtaggatcctgaccatcttctccaaaccttccccaggagagactctgcctttagggtcatccaagtatccctgctctcagaaccggaggtccactggttttctataatgtactctttccctcctgccacatcctgcccccttcacattcacgagtcattaccagccagggaaggtcatccaagtttcctccagcatgggcgatatctttgggaccgagactttccttggagagctgctgagagcggacagtcccaaaaacaagtgtcaaagggcccaagggaaaggggactgtgccctggaggctcacttcacagggatcagtgtttgctccacagctgtagctctgggctgacgccccccagaccccttccttctcggagtgacccgcccccaggccacctgctccggggagttctgtgcactttactctttggacttctcctcacgtgtgccctggttttatggggagagggaatcgctgttgggaaggcagagcagttgcaaccctctctgcccttgcttcatgtggctggagcccaggcaaggagagcaggagccagcgtgagactgaggccccctggtgcctatcaaggaccagagtgaaggggactacatctcccagcccttcaccttttaaatatgagtggttttaaaaggaaaaaaatgaaaccaggcaacagcaacaatattctgtttttaaaatagggacaagactgttgtcactttttagacatgtatcccattccttttggctctgcaatatttggggctgtagctccttccaagcccatggtagtccctccccgagtctctcccagtagaatgcagcctcccttccctggccccttccctctcagtgacggtgactccctggggccttctcgtggaacccagaggggctgaggactgtggcctggctggcgggccagcgtggtgctcctcaggactgcagcactgagatggaacctggcctcagtttaggaacaggggccacaacagggcaggaacccaccaccctccacataggaatacaaccagtggggccacatcatgtgaggcatcagacccacactgtcagcccagcaggccgggctgtgtccttcagacccagtgctgccctagactctgactcgggactccagcttgccacgtgccctctcccctcttgaatgtactctggtcttgcagtgtgctgctgggactttcttgctcagccatcactctggtcaccttgtttgctctgggtctggctgaattttctgccctgagatctgggcataaagtggatgaaacttgaaagaccttcagtgtagatccagatggccaacctgtccttgttaagttacttgcttcttgggaatcagtgtcccctgctgagctgaaaaggaaatggattccaatctcttccaacctttaaggtgatagatagtttgagcaagactggagaatggacaacactatgaagctgtggctagaaagggactgtcatgtcccatcctttggccagattgactggggatgtccggacagatgcctgcatgggtggtgagggccacatctgcacacgagccagtggctgcttgcagttcactgctgtgatgccagagtgtgttcaaaggtgactctcctgctcttctggactcttctctcaggcaagaaaggctgcaggctgcctgctatgtgatgcctgagcacaaagccaaggaactgaactaagtctttctgttaagtcctgagtttgtcattggcaggtttacttgtggccagctctctctgcccttgggtgtctgagcaggcagaccagaagaccaggcactggacctgcatgccaaagggactggtcatctcctgaggacctgtaaatgaccctgtggactgttccgcacgatccggaacccactttttattcactccccatgtctttggccttcctcttctttctctttccctctgccatcctgacactgatagtttgtcatataaattccccgggttgtgtttttttttctagaaaaaaattaaaagggaaaacaaaaccaaaaaaaccagaaaccacgaataagaatggaaatgacaatggctgcctgtcatttttctgtcacgattttcctgatttggtttgttccctttgtctcagagaagcaggagatgttgatgaggctgtatttttttttctttttcttgtttttgagacaagagtctcgctctgtcacccgggctggagtgtaacgtggcatgatctcagctcactgcaacctctgcctcctgggttcaagcgattatcctgcctcagcctcctgagtagctgggattacaggcatgcgccactatgcccagataatttttttgtatttttagtagagacagggtttcaccatgttggccaggctggtctggaactcctaacctcaggttatccacccaccttggcctcccaaagtgctgggattataggcatgaaccaccgtgcctggccaaagatgtaatttaaaatagttagaagggacttggcatgggccagctccgtgcatggcattttcacccccagagcttcctaatcctgttttcacacaggaagtttctaggtctttctagaacagctagaaatagtagctgactcccgcccaaggcccaaccttcaaaccctgagctcttcaggctgcatcctctggtgagctatagaggagaacgtggctcctaaactctagccatcctgtgggaggaaatagacttctttgggctgtggcttgcagaacaaactacactttttttccctctattgtttaaattttatttaataatttgtgtgtttttctgtctttattttctgtatttcacgtgttccttcactccctagaaactgcactttctttgaaaccataggtaatgaatcttactaggagaggcatggggatagagacagttctgggagtgtgacctgtaagcctcctgtagggcagtgccaggccttgattgcccacgttctctccgttccttcttccttcatacatttgatcacacagcctacacccagccccgagtgtgcatcacggtaaaagagctgagggctctcttcagggagcagcccatttaggtctcttttgttgttgttagggagaatacacatctttcttggaagctgggagtgtgttctcatttcatgtccattcagacaaagcaccattaggcaccatgaaatatacagtgacggacaggaccctgtctgcaaggattttatgtccttagttcaggagatggacttgtccacagaaaggcagagtgaagtgggcggccggctcggaaaagtcctgtgcccagaagggagccagttctgacctgagtgataatgaaaggcttcctggaggacgcagcttgagccacacttgatgtgggagtgaactgggatagggacactcctgctgagagaatggcaagagcaaaagcacactggtggccaggaggtggtaagagccgaggttagaaaggtgaggggtgctcatttaaggcactaacagcagaaggagcccaggaaggattttcagaagggaagggagggatgcaaccttattttaatgactggtgacagtaggaagggttctgcctggccttaagtgagggtgttgaaagtgggagacaggacctgccaaaggggaagagggcggtcacagtcaatcccagggcccagtgtctcagccaggtgctggagttgggaatgcgggagccccagtctctgcccacctgtcacgtggcagctggaaggtggcatcaactgcacaggcgaagaggggcccgcacacgagaagccatgggatgtgaagggccgcaaggagaggaccctgggacacaggaagaggtggtgcatctggggcagggcggctttcccaagatgactagagaatcttcagctggcatcttgcctgaaatatccacgctctcagccactacactaatggaacacagatgctatggggagacagaagggaactgacaaacttcatgcccctgttttcaaatagcctgcaatcttacctcttcctctgcattttttggggggagtgacattttaatgggaggcaggaggtttgtggagaagagaaaatgttttttttgtgggggtgggtagagacagtctcaccatgttgcccaggctggtctcaaactactggcttcaggcaatccttctgcctcccttcccaaagggttgggattacaggcttgagccactgcaccaagcctgaaaatgtcgttttgaatgagcccacctgaaacgaagacgcttcattagggttactggtttgagaattaagatcagttctggccgggtgcggtggctcacgcctattatcccagcactttgggaggccgaggtgggtggatcacaaggtcaggagatcgagaccattctggccaacatggtgaaaccccgtctctactaaaaatacaaaaattaaccaggcatggtggcaggtgcctgtagtcccagctactcgggaggctgaggcaggagaatcacttgaacccgggaggcagaggttgcagtgagccgagatcatgccactggactccagcctgacagagtgagactccatctcaaacacacacacacacacacacacacaccacacacacacacacaggttcctcaccataagctttggggaaaattcttggcttttttgctgggggagagagcagtgcccagggaagattggctgatctcagagctggagggtttatgcgggactggccagccccttcagctgagtgggacagcaacacagtgggtggtaaggggcttcataagatgtacaagatgagggagaggcccctccagccaaccctgtgtctaaagagtcaggtaacgaagaactttccagagacagctgtgagtccgtctggcttaaggggttgtacaggtgtctgagaatggggcctgaaggtgcagggcctgcaggctgccctgtttggaaggttcctgtccttctgtcttggtagaaaatggcagctagccttgtaaagggcctccttgtgtagcgagatagaccatgtagccccagatgcccccatggcttcacttccctcttgggggtctctcagtatatgtctagtgccaccactattggtggagagtttccttctggaataaccttggggtggtggatgggttttattttaataaaagaagaatgtctcatt

SEQ ID NO: 193535 - DNA, 582 bp, Homo sapiens
  Payload ID: 18208
  Gene Name: transmembrane protein 127
  ENST ID: ENST00000435268
  CDS Start-End: 110-574
agttccatgggatcctattacagctgcctacttccctgatgactagagggcaccgccaagcagtgtttaccaaaatcaacaggccagagcacagctggaagatttctgcatgaatccccagacagtgctgctcctgcgggtcatcgccgccttctgtttcctgggcatcctgtgtagtctctccgctttccttctggatgtctttgggccgaagcatcctgctctgaagatcactcgtcgctatgccttcgcccatatcctaacggttctgcagtgtgccaccgtcattggcttttcttattgggcttctgaactcatcttggcccagcagcagcagcataagaagtaccatggatcccaggtctatgtcaccttcgccgttagcttctacctggtggcaggagctggtggagcctcaatcctggccacggcagccaacctcctgcgccactaccccacagaggaagaggagcaggcgctggagctgctctcagagatggaagagaacgagccctacccggcggaatatgaggtcatcaaccagttccagccaccccctgcttacacaccctaatgccagcc

SEQ ID NO: 193536 - DNA, 3099 bp, Homo sapiens
  Payload ID: 18208
  Gene Name: transmembrane protein 127
  Uniprot ID: O75204
  ENST ID: ENST00000432959
  CDS Start-End: 235-951
agtgcatcggccccgggtctgtccgggcgttgcgggattggggcctgggaacgctcggcccccggcagccgagaagcccgtgactgggctgagcagcaccatcccagccctggggcctgctgactgcgaacccggagcgttgctatcctccaccggactgtcaggctctgcgcgccccgcggaggtcggcggcgaccagcagcgactgcggagcgacggcgggcggccccgggcatgtacgcccccggaggcgcagggctgcccggcgggcgccggcggaggagcccgggaggcagcgctctgcccaagcagccggagcgtagcctggcctcggccctgcctggcgccctgtctatcacggcgctgtgcactgccctcgccgagcccgcctggttgcacatccacggaggcacctgttcgcgccaggagctgggggtctccgacgtgttgggctatgtgcacccggacctgctgaaagatttctgcatgaatccccagacagtgctgctcctgcgggtcatcgccgccttctgtttcctgggcatcctgtgtagtctctccgctttccttctggatgtctttgggccgaagcatcctgctctgaagatcactcgtcgctatgccttcgcccatatcctaacggttctgcagtgtgccaccgtcattggcttttcttattgggcttctgaactcatcttggcccagcagcagcagcataagaagtaccatggatcccaggtctatgtcaccttcgccgttagcttctacctggtggcaggagctggtggagcctcaatcctggccacggcagccaacctcctgcgccactaccccacagaggaagaggagcaggcgctggagctgctctcagagatggaagagaacgagccctacccggcggaatatgaggtcatcaaccagttccagccaccccctgcttacacaccctaatgccagccctgggctctcttcctcggcagcccctccctcaactctgcagctcctctcgcacccagaggagctcctttccccagcaggcctcactggtaggatcctgaccatcttctccaaaccttccccaggagagactctgcctttagggtcatccaagtatccctgctctcagaaccggaggtccactggttttctataatgtactctttccctcctgccacatcctgcccccttcacattcacgagtcattaccagccagggaaggtcatccaagtttcctccagcatgggcgatatctttgggaccgagactttccttggagagctgctgagagcggacagtcccaaaaacaagtgtcaaagggcccaagggaaaggggactgtgccctggaggctcacttcacagggatcagtgtttgctccacagctgtagctctgggctgacgccccccagaccccttccttctcggagtgacccgcccccaggccacctgctccggggagttctgtgcactttactctttggacttctcctcacgtgtgccctggttttatggggagagggaatcgctgttgggaaggcagagcagttgcaaccctctctgcccttgcttcatgtggctggagcccaggcaaggagagcaggagccagcgtgagactgaggccccctggtgcctatcaaggaccagagtgaaggggactacatctcccagcccttcaccttttaaatatgagtggttttaaaaggaaaaaaatgaaaccaggcaacagcaacaatattctgtttttaaaatagggacaagactgttgtcactttttagacatgtatcccattccttttggctctgcaatatttggggctgtagctccttccaagcccatggtagtccctccccgagtctctcccagtagaatgcagcctcccttccctggccccttccctctcagtgacggtgactccctggggccttctcgtggaacccagaggggctgaggactgtggcctggctggcgggccagcgtggtgctcctcaggactgcagcactgagatggaacctggcctcagtttaggaacaggggccacaacagggcaggaacccaccaccctccacataggaatacaaccagtggggccacatcatgtgaggcatcagacccacactgtcagcccagcaggccgggctgtgtccttcagacccagtgctgccctagactctgactcgggactccagcttgccacgtgccctctcccctcttgaatgtactctggtcttgcagtgtgctgctgggactttcttgctcagccatcactctggtcaccttgtttgctctgggtctggctgaattttctgccctgagatctgggcataaagtggatgaaacttgaaagaccttcagtgtagatccagatggccaacctgtccttgttaagttacttgcttcttgggaatcagtgtcccctgctgagctgaaaaggaaatggattccaatctcttccaacctttaaggtgatagatagtttgagcaagactggagaatggacaacactatgaagctgtggctagaaagggactgtcatgtcccatcctttggccagattgactggggatgtccggacagatgcctgcatgggtggtgagggccacatctgcacacgagccagtggctgcttgcagttcactgctgtgatgccagagtgtgttcaaaggtgactctcctgctcttctggactcttctctcaggcaagaaaggctgcaggctgcctgctatgtgatgcctgagcacaaagccaaggaactgaactaagtctttctgttaagtcctgagtttgtcattggcaggtttacttgtggccagctctctctgcccttgggtgtctgagcaggcagaccagaagaccaggcactggacctgcatgccaaagggactggtcatctcctgaggacctgtaaatgaccctgtggactgttccgcacgatccggaacccactttttattcactccccatgtctttggccttcctcttctttctctttccctctgccatcctgacactgatagtttgtcatataaattccccgggttgtgtttttttttctagaaaaaaattaaaagggaaaacaaaaccaaaaaaaccagaaa

SEQ ID NO: 193537 - DNA, 1737 bp, Homo sapiens
  Payload ID: 18209
  Gene Name: transmembrane protein 128
  Uniprot ID: Q5BJH2
  ENST ID: ENST00000254742
  CDS Start-End: 588-1013
cggtaccaagatggactcctcgcgggcccggcagcagctccggcggcgattcctcctcctgccggacgccgaggcccagctggaccgcgagggtgacgccgggccgggtgaggcgcgcaccaagccgccccgaggttctcagaggcgaggcgtcggaaaacggccggcctccggcagccctggcccagtctggaaggactgagtttcggctttgcaagtcgaatatttaatgtcagggaagatccttagaatcgcggagtgctgtgcatcgtcatttcagctgcgcttcagaattctctggagagctgatttgacacctatttggaaatagcgattaaaattaaaaatacccaccagttttaagtcttaaggatttaccagaaacatgcgtgtaccgcagtgtacaatgatgtgcgcagtgtttcacttcaggattgcttgtaatagcgaattactggaaatatctgccttgcccgtcagcagaaagctgtttaagtaaatttgggtatatgtatacctgacacatcaggtcgactcgtatgtaccaatggggatgattttcaaagggaagtgtggaacactatggtatgccgccatttgggtacaaaacagaaacctccacagctgttgagaaaaaggagaaacctcttccaagacttaatatccattctggattctggattttggcatccattgttgtgacctattatgttgacttctttaaaacccttaaagaaaacttccacactagcagctggtttctctgtggcagtgccttgttgcttgtcagtttatcaattgcattttactgcatagtctacctggaatggtattgtggaattggagaatatgatgtcaagtatccagccttgatacccattaccactgcctcctttattgcagcaggaatttgcttcaacattgctttatggcatgtgtggtcgtttttcactccattgttgttgtttacccagtttatgggggttgtcatgtttatcacactccttggatgatttccgaagagacagggtcttctatgttgcccaggctgtctttgaactcctgggatcaagtgatcctcctgcctcagccttcgaagtagttgggactacaggcccacgccaccgtgcctggctggacatgtaaatttgaagtgaatggttaaacatccagctagctgaaagcatggcagaccctaacagaaaagctacagtgtgtttttgcagctatgaagtgaatggtttcctggggaaaattgtgactttgtataactgttgttgaaaccagaataaattatatttcacttgcatatgcataaattattaaaattttcagaagtcagtgatacagaagtactattttgcaatgttaatctgtttgagtctttggagaaagtggtttcattgtaggtacatagtgcactgttaatattttaaacaagtagttcactcttccatttaagggatagcagttccttgtataaaatgactggatgtgtataaaggaattatgttgtcatgtgcctttaaccagctttagtaattactataatctcatatttatgatagttttgttaggtgacaggaccaaatgaaaatattttatgttttctcatcactttagattttatcattatgtacattactgggtttttagcatttcctaatgtgaagttttaatcacttttaagtatacatttttttctgtatcatttaaataaaatatttttataacttt

SEQ ID NO: 193538 - DNA, 1221 bp, Homo sapiens
  Payload ID: 18209
  Gene Name: transmembrane protein 128
  ENST ID: ENST00000382753
  CDS Start-End: 11-508
cggtaccaagatggactcctcgcgggcccggcagcagctccggcggcgattcctcctcctgccggacgccgaggcccagctggaccgcgagggtgacgccgggccggaaacctccacagctgttgagaaaaaggagaaacctcttccaagacttaatatccattctggattctggattttggcatccattgttgtgacctattatgttgacttctttaaaacccttaaagaaaacttccacactagcagctggtttctctgtggcagtgccttgttgcttgtcagtttatcaattgcattttactgcatagtctacctggaatggtattgtggaattggagaatatgatgtcaagtatccagccttgatacccattaccactgcctcctttattgcagcaggaatttgcttcaacattgctttatggcatgtgtggtcgtttttcactccattgttgttgtttacccagtttatgggggttgtcatgtttatcacactccttggatgatttccgaagagacagggtcttctatgttgcccaggctgtctttgaactcctgggatcaagtgatcctcctgcctcagccttcgaagtagttgggactacaggcccacgccaccgtgcctggctggacatgtaaatttgaagtgaatggttaaacatccagctagctgaaagcatggcagaccctaacagaaaagctacagtgtgtttttgcagctatgaagtgaatggtttcctggggaaaattgtgactttgtataactgttgttgaaaccagaataaattatatttcacttgcatatgcataaattattaaaattttcagaagtcagtgatacagaagtactattttgcaatgttaatctgtttgagtctttggagaaagtggtttcattgtaggtacatagtgcactgttaatattttaaacaagtagttcactcttccatttaagggatagcagttccttgtataaaatgactggatgtgtataaaggaattatgttgtcatgtgcctttaaccagctttagtaattactataatctcatatttatgatagttttgttaggtgacaggaccaaatgaaaatattttatgttttctcatcactttagattttatcattatgtacattactgggtttttagcatttcctaatgtgaagttttaatcacttttaagtatacatttttttctgtatcatttaaataaaatatt

SEQ ID NO: 193539 - DNA, 2678 bp, Homo sapiens
  Payload ID: 18210
  Gene Name: transmembrane protein 129, E3 ubiquitin protein ligase
  Uniprot ID: A0AVI4
  ENST ID: ENST00000303277
  CDS Start-End: 522-1220
cggttccgtttccggagtggagggcacgccagggtgtctgaagctgagaccccgggctcgcagtcgccccatgaatttcgagttccgcaactgacgctactgggcggggcttcatggccagggcctcgctcaggcctaagtttccccacctgtgctcaatgcacaggtgcggtgccgcctccagggccggccgagaagagaggccgcacccgcacggggactgcatctcccagagcgccccgcgagcggccgagcggcgggactccatgccctagagtgccccgcgggcggccgggcggcgggactccatgtcctagagtgccccgcgggcggccgggcggcgggactccatgtcctagagtgccccgcgggcggccgggcggcgggactccatgtcctagagtgccccgcgggcggccgggcggcggccgccgcaaccgacaggtccgggactgggcgctgcggcctcgtccgcgcgccggggcgggggcctagctcgacagcttcccggcggctgcgcgatggacagccccgaggtgaccttcactctcgcctatctggtgttcgccgtgtgcttcgtgttcacgcccaacgagttccacgcggcggggctcacggtgcagaacctgctgtcgggctggctgggcagcgaggacgccgccttcgtgcccttccacttgcgccgcacggccgccacgctgttgtgccactcgctgctgccgctcggctactatgtgggcatgtgccttgcggcttcagaaaagcggctccacgccctcagccaggcccctgaggcctggcggctcttcctgctgctggccgtgaccctcccctccatcgcctgcatcctgatctactactggtcccgtgaccggtgggcctgccacccactggcgcgcaccctggccctctacgccctcccacagtctggctggcaggctgttgcctcctctgtcaacactgagttccggcggattgacaagtttgccaccggtgcaccaggtgcccgtgtgattgtgacagacacgtgggtgatgaaggtaaccacctaccgagtgcacgtggcccagcagcaggacgtgcacctgactgtgacggagtctcggcagcatgagctctcgccagactcgaacttgcccgtgcagctcctcaccatccgtgtggccagcaccaaccctgctgtgcaggcctttgacatctggagctggaggcctgcataggctgcatgcagacacgtgccagcgtgaagctggtgaagacctgccaggaggcagccacaggcgagtgccagcagtgttactgccgccccatgtggtgcctcacctgcatgggcaagtggttcgccagccgccaggaccccctgcgccctgacacctggctggccagccgcgtgccctgccccacctgccgcgcacgcttctgcatcctggatgtgtgcaccgtgcgctgagtgggctggggccttgaggtgactctgtgtctccccccaaagccacagggcagggaagggggtggctgggcctcctggctggcaaagggctctacttaaagcacatgatgtagagcaactcgcctctgccctgggtctgcagaaggctgaggacttttggttaaaagcaatcctcatgaaaacaccccaccctgcttggcagccagggtacaagtcctgggcacctcctctttgcctccctcctgcccctttcctgctggtgggggcagatcctgcacacacagacacagcgtctgcccccgagccattccctggagaccctgggtctaccccaggtggtcgtcatctgggccatttgccttacttctctggagcatacccaccctcagttacgtgccagacctggaccgcattctcctgccctgtcctggagctggcccctggctgcctggaggaccctgggtaggtcctgagggtgggatggagaagagggcactgctgtggtgtgggagcagtcctggggcttcctggtggctgtgaccagttgaggggctgttcctgggtggggtggcaatgggaggacaggtcagagcgccctcatttgtggggctgcccctccgggtttctcatcctgtccttggtgcctttttctgcccaacaagtccagggaaggccgaggtctcagactcctgggtaggggtgggggtttgagttgaggaccaaagtgccatagcgacatccagaacacaagcccaccaggggtccagcccaggctacccactcccctagggtctcccaggctcagaaggggatgcacgccccctgtggtcaagcctctggtgggcgtcttgcccagttcctgatggttcaaggggaggggggatgttggccaggccccagggcacagccctgacacaggtgtggctactggaggggccttcatacctgcggccccaaagcccctgggcttggctgtttgaggcagaggtgatggactccgggggcctgacacttgggatttgggaggcttcctagagcgctcagcaggtgaaggcagcaggggccatggccgggagccaggcctagctttgaactgagtttcaagggctgccaaagaggggcagtgggttggggttgtttttactacaaaataagttacttagttttataaagacaaaccgattgtagccaaatgacaccatatttaataaaatttagtctgaagtga

SEQ ID NO: 193540 - DNA, 2810 bp, Homo sapiens
  Payload ID: 18210
  Gene Name: transmembrane protein 129, E3 ubiquitin protein ligase
  Uniprot ID: A0AVI4
  ENST ID: ENST00000382936
  CDS Start-End: 495-1583
gccagggtgtctgaagctgagaccccgggctcgcagtcgccccatgaatttcgagttccgcaactgacgctactgggcggggcttcatggccagggcctcgctcaggcctaagtttccccacctgtgctcaatgcacaggtgcggtgccgcctccagggccggccgagaagagaggccgcacccgcacggggactgcatctcccagagcgccccgcgagcggccgagcggcgggactccatgccctagagtgccccgcgggcggccgggcggcgggactccatgtcctagagtgccccgcgggcggccgggcggcgggactccatgtcctagagtgccccgcgggcggccgggcggcgggactccatgtcctagagtgccccgcgggcggccgggcggcggccgccgcaaccgacaggtccgggactgggcgctgcggcctcgtccgcgcgccggggcgggggcctagctcgacagcttcccggcggctgcgcgatggacagccccgaggtgaccttcactctcgcctatctggtgttcgccgtgtgcttcgtgttcacgcccaacgagttccacgcggcggggctcacggtgcagaacctgctgtcgggctggctgggcagcgaggacgccgccttcgtgcccttccacttgcgccgcacggccgccacgctgttgtgccactcgctgctgccgctcggctactatgtgggcatgtgccttgcggcttcagaaaagcggctccacgccctcagccaggcccctgaggcctggcggctcttcctgctgctggccgtgaccctcccctccatcgcctgcatcctgatctactactggtcccgtgaccggtgggcctgccacccactggcgcgcaccctggccctctacgccctcccacagtctggctggcaggctgttgcctcctctgtcaacactgagttccggcggattgacaagtttgccaccggtgcaccaggtgcccgtgtgattgtgacagacacgtgggtgatgaaggtaaccacctaccgagtgcacgtggcccagcagcaggacgtgcacctgactgtgacggagtctcggcagcatgagctctcgccagactcgaacttgcccgtgcagctcctcaccatccgtgtggccagcaccaaccctgctgtgcaggcctttgacatctggctgaactccactgagtacggggagctctgcgagaagctccgggcacccatccgcagggcagcccatgtggtcatccaccagagcctgggcgacctgttcctggagacatttgcctccctggtagaggtcaacccggcctactcagtgcccagcagccaggagctggaggcctgcataggctgcatgcagacacgtgccagcgtgaagctggtgaagacctgccaggaggcagccacaggcgagtgccagcagtgttactgccgccccatgtggtgcctcacctgcatgggcaagtggttcgccagccgccaggaccccctgcgccctgacacctggctggccagccgcgtgccctgccccacctgccgcgcacgcttctgcatcctggatgtgtgcaccgtgcgctgagtgggctggggccttgaggtgactctgtgtctccccccaaagccacagggcagggaagggggtggctgggcctcctggctggcaaagggctctacttaaagcacatgatgtagagcaactcgcctctgccctgggtctgcagaaggctgaggacttttggttaaaagcaatcctcatgaaaacaccccaccctgcttggcagccagggtacaagtcctgggcacctcctctttgcctccctcctgcccctttcctgctggtgggggcagatcctgcacacacagacacagcgtctgcccccgagccattccctggagaccctgggtctaccccaggtggtcgtcatctgggccatttgccttacttctctggagcatacccaccctcagttacgtgccagacctggaccgcattctcctgccctgtcctggagctggcccctggctgcctggaggaccctgggtaggtcctgagggtgggatggagaagagggcactgctgtggtgtgggagcagtcctggggcttcctggtggctgtgaccagttgaggggctgttcctgggtggggtggcaatgggaggacaggtcagagcgccctcatttgtggggctgcccctccgggtttctcatcctgtccttggtgcctttttctgcccaacaagtccagggaaggccgaggtctcagactcctgggtaggggtgggggtttgagttgaggaccaaagtgccatagcgacatccagaacacaagcccaccaggggtccagcccaggctacccactcccctagggtctcccaggctcagaaggggatgcacgccccctgtggtcaagcctctggtgggcgtcttgcccagttcctgatggttcaaggggaggggggatgttggccaggccccagggcacagccctgacacaggtgtggctactggaggggccttcatacctgcggccccaaagcccctgggcttggctgtttgaggcagaggtgatggactccgggggcctgacacttgggatttgggaggcttcctagagcgctcagcaggtgaaggcagcaggggccatggccgggagccaggcctagctttgaactgagtttcaagggctgccaaagaggggcagtgggttggggttgtttttactacaaaataagttacttagttttataaagacaaaccgattgtagccaaatgacaccatatttaataaaatttagtctgaagtg

SEQ ID NO: 193541 - DNA, 761 bp, Homo sapiens
  Payload ID: 18210
  Gene Name: transmembrane protein 129, E3 ubiquitin protein ligase
  ENST ID: ENST00000480360
  CDS Start-End: 1-277
cgtgttcacgcccaacgagttccacgcggcggggctcacggtgcagaacctgctgtcgggctggctgggcagcgaggacgccgccttcgtgcccttccacttgcgccgcacggccgccacgctgttgtgccactcgctgctgccgctcgtgactgggccaactccaaatgtggactattactttttgccaactggaacctgctggtgcaactcctcaccatctccatggcttatttggaccttcaaattgtcctcgatctggccagcagggccctgaagctggctccgtgtcctctggacatgtcccatcattctttgagacttgcttcctttctcgcacataacttttcagctctgggatgcaccacatttgatcagcctcctcagagcgggcttttgtagttttttcaacacttacgtattgtgtgaaactaaagcagcaaattaaaaaccttttccgctaatatatcctgcctttgccacaggcagggagagagtggccggctggggaagtgcagagctactatgtgggcatgtgccttgcggcttcagaaaagcggctccacgccctcagccaggcccctgaggcctggcggctcttcctgctgctggccgtgaccctcccctccatcgcctgcatcctgatctactactggtcccgtgaccggtgggcctgccacccactggcgcgcaccctggccctctacgccctcccacagtctggctggcaggctgttgcctcctctgtcaacactgagttc

SEQ ID NO: 193542 - DNA, 1100 bp, Homo sapiens
  Payload ID: 18210
  Gene Name: transmembrane protein 129, E3 ubiquitin protein ligase
  ENST ID: ENST00000460722
  CDS Start-End: 1-85
ctcgccagactcgaacttgcccgtgcagctcctcaccatccgtgtggccagcaccaaccctgctgtgcaggcctttgacatctgaggggcccagcagctctcctccctgcaggctgaactccactgagtacggggagctctgcgagaagctccgggcacccatccgcagggcagcccatgtggtcatccaccagagcctgggcgacctgttcctggagacatttgcctccctggtagaggtcaacccggcctactcagtgcccagcagccaggagctggaggcctgcataggctgcatgcagacacgtgccagcgtgaagctggtgaagacctgccaggaggcagccacaggcgagtgccagcagtgttactgccgccccatgtggtgcctcacctgcatgggcaagtggttcgccagccgccaggaccccctgcgccctgacacctggctggccagccgcgtgccctgccccacctgccgcgcacgcttctgcatcctggatgtgtgcaccgtgcgctgagtgggctggggccttgaggtgactctgtgtctccccccaaagccacagggcagggaagggggtggctgggcctcctggctggcaaagggctctacttaaagcacatgatgtagagcaactcgcctctgccctgggtctgcagaaggctgaggacttttggttaaaagcaatcctcatgaaaacaccccaccctgcttggcagccagggtacaagtcctgggcacctcctctttgcctccctcctgcccctttcctgctggtgggggcagatcctgcacacacagacacagcgtctgcccccgagccattccctggagaccctgggtctaccccaggtggtcgtcatctgggccatttgccttacttctctggagcatacccaccctcagttacgtgccagacctggaccgcattctcctgccctgtcctggagctggcccctggctgcctggaggaccctgggtaggtcctgagggtgggatggagaagagggcactgctgtggtgtgggagcagtcctggggcttcctggtggctgtgaccagttgaggggctgttcctgggtggggtggcaatggga

SEQ ID NO: 193543 - DNA, 2172 bp, Homo sapiens
  Payload ID: 18210
  Gene Name: transmembrane protein 129, E3 ubiquitin protein ligase
  Uniprot ID: A0AVI4
  ENST ID: ENST00000536901
  CDS Start-End: 411-1499
gccagggtgtctgaagctgagaccccgggctcgcagtcgccccatgaatttcgagttccgcaactgacgctactgggcggggcttcatggccagggcctcgctcaggcctaagtttccccacctgtgctcaatgcacaggtgcggtgccgcctccagggccggccgagaagagaggccgcacccgcacggggactgcatctcccagagcgccccgcgagcggccgagcggcgggactccatgccctagagtgccccgcgggcggccgggcggcgggactccatgtcctagagtgccccgcgggcggccgggcggcggccgccgcaaccgacaggtccgggactgggcgctgcggcctcgtccgcgcgccggggcgggggcctagctcgacagcttcccggcggctgcgcgatggacagccccgaggtgaccttcactctcgcctatctggtgttcgccgtgtgcttcgtgttcacgcccaacgagttccacgcggcggggctcacggtgcagaacctgctgtcgggctggctgggcagcgaggacgccgccttcgtgcccttccacttgcgccgcacggccgccacgctgttgtgccactcgctgctgccgctcggctactatgtgggcatgtgccttgcggcttcagaaaagcggctccacgccctcagccaggcccctgaggcctggcggctcttcctgctgctggccgtgaccctcccctccatcgcctgcatcctgatctactactggtcccgtgaccggtgggcctgccacccactggcgcgcaccctggccctctacgccctcccacagtctggctggcaggctgttgcctcctctgtcaacactgagttccggcggattgacaagtttgccaccggtgcaccaggtgcccgtgtgattgtgacagacacgtgggtgatgaaggtaaccacctaccgagtgcacgtggcccagcagcaggacgtgcacctgactgtgacggagtctcggcagcatgagctctcgccagactcgaacttgcccgtgcagctcctcaccatccgtgtggccagcaccaaccctgctgtgcaggcctttgacatctggctgaactccactgagtacggggagctctgcgagaagctccgggcacccatccgcagggcagcccatgtggtcatccaccagagcctgggcgacctgttcctggagacatttgcctccctggtagaggtcaacccggcctactcagtgcccagcagccaggagctggaggcctgcataggctgcatgcagacacgtgccagcgtgaagctggtgaagacctgccaggaggcagccacaggcgagtgccagcagtgttactgccgccccatgtggtgcctcacctgcatgggcaagtggttcgccagccgccaggaccccctgcgccctgacacctggctggccagccgcgtgccctgccccacctgccgcgcacgcttctgcatcctggatgtgtgcaccgtgcgctgagtgggctggggccttgaggtgactctgtgtctccccccaaagccacagggcagggaagggggtggctgggcctcctggctggcaaagggctctacttaaagcacatgatgtagagcaactcgcctctgccctgggtctgcagaaggctgaggacttttggttaaaagcaatcctcatgaaaacaccccaccctgcttggcagccagggtacaagtcctgggcacctcctctttgcctccctcctgcccctttcctgctggtgggggcagatcctgcacacacagacacagcgtctgcccccgagccattccctggagaccctgggtctaccccaggtggtcgtcatctgggccatttgccttacttctctggagcatacccaccctcagttacgtgccagacctggaccgcattctcctgccctgtcctggagctggcccctggctgcctggaggaccctgggtaggtcctgagggtgggatggagaagagggcactgctgtggtgtgggagcagtcctggggcttcctggtggctgtgaccagttgaggggctgttcctgggtggggtggcaatgggaggacaggtcagagcgccctcatttgtggggctgcccctccgggtttctcatcctgtccttggtgcctttttctgcccaacaagtccagggaagg

SEQ ID NO: 193544 - DNA, 2261 bp, Homo sapiens
  Payload ID: 18211
  Gene Name: transmembrane protein 130
  Uniprot ID: Q8N3G9
  ENST ID: ENST00000345589
  CDS Start-End: 97-1062
gcgctgcgcgcccggaggagcgaccgccgcagttctcgagctccagctgcattccctccgcgtccgccccacgcttctcccgctccgggccccgcaatggcccaggcagtgtggtcgcgcctcggccgcatcctctggcttgcctgcctcctgccctgggccccggcaggggtggccgcagagttcctcgtgggggaccttgttgtcacccagaacacttccctaccctggcccagctcctatctcactaagaccgtcctgaaagtctccttcctcctccacgacccgagcaacttcctcaagaccgccttgtttctctacagctgggacttcggggacgggacccagatggtgactgaagactccgtggtctattataactattccatcatcgggaccttcaccgtgaagctcaaagtggtggcggagtgggaagaggtggagccggatgccacgagggctgtgaagcagaagaccggggacttctccgcctcgctgaagctgcaggaaacccttcgaggcatccaagtgttggggcccaccctaattcagaccttccaaaagatgaccgtgaccttgaacttcctggggagccctcctctgactgtgtgctggcgtctcaagcctgagtgcctcccgctggaggaaggggagtgccaccctgtgtccgtggccagcacagcgtacaacctgacccacaccttcagggaccctggggactactgcttcagcatccgggccgagaatatcatcagcaagacacatcagtaccacaagatccaggtgtggccctccagaatccagccggctgtctttgctttcccatgtgctacacttatcactgtgatgttggccttcatcatgtacatgaccctgcggaatgccactcagcaaaaggacatggtggagaacccggagccaccctctggggtcaggtgctgctgccagatgtgctgtgggcctttcttgctggagactccatctgagtacctggaaattgttcgtgagaaccacgggctgctcccgcccctctataagtctgtcaaaacttacaccgtgtgagcactccccctccccaccccatctcagtgttaactgactgctgacttggagtttccagcagggtggtgtgcaccactgaccaggaggggttcatttgcgtggggctgttggcctggatcatccatccatctgtacagttcagccactgccacaagcccctccctctctgtcacccctgaccccagccattcacccatctgtacagtccagccactgacataagccccactcggttaccacccccttgaccccctacctttgaagaggcttcgtgcaggactttgatgcttggggtgttccgtgttgactcccaggtgggcctggctgcccactgcccattcctctcatattggcacatctgctgtccattgggggttctcagtttcctcccccagacagccctacctgtgccagagagctagaaagaaggtcataaagggttaaaaatccataactaaaggttgtacacatagatgggcacactcacagagagaagtgtgcatgtacacacaccacacacacacacacacacacacacacacacacacacagaaatataaacacatgcgtcacatgggcatttcagatgatcagctctgtatctggttaagtcggttgctgggatgcaccctgcactagagctgaaaggaaatttgacctccaagcagccctgacaggttctgggcccgggccctccctttgtgctttgtctctgcagttcttgcgccctttataaggccatcctagtccctgctggctggcagggggctggatggggggcaggactaatactgagtgattgcagagtgctttataaatatcaccttattttatcgaaacccatctgtgaaactttcactgaggaaaaggccttgcagcggtagaagaggttgagtcaaggccgggcgcggtggctcacgcctgtaatcccagcactttgggaggccgaggcgggtggatcacgagatcaggagatcgagaccaccctggctaacacggtgaaaccccgtctctactaaaaaaatacaaaaagttagccgggcgtggtggtgggtgcctgtagtcccagctactcgggaggctgaggcaggagaatggtgcgaacccgggaggcggagcttgcagtgagcccagatggcgccactgcactccagcctgagtgacagagcgagactctgtctccaaaaaaaaaaaaagaa

SEQ ID NO: 193545 - DNA, 3015 bp, Homo sapiens
  Payload ID: 18211
  Gene Name: transmembrane protein 130
  Uniprot ID: Q8N3G9
  ENST ID: ENST00000339375
  CDS Start-End: 176-1447
ggcggcggcggcgcgcagcgacagagcgtcccccggcgaggacgagcgagcacggcgcccgcacctccccgcaccgcccgcgctgcgcgcccggaggagcgaccgccgcagttctcgagctccagctgcattccctccgcgtccgccccacgcttctcccgctccgggccccgcaatggcccaggcagtgtggtcgcgcctcggccgcatcctctggcttgcctgcctcctgccctgggccccggcaggggtggccgcaggcctgtatgaactcaatctcaccaccgatagccctgccaccacgggagcggtggtgaccatctcggccagcctggtggccaaggacaacggcagcctggccctgcccgctgacgcccacctctaccgcttccactggatccacaccccgctggtgcttactggcaagatggagaagggtctcagctccaccatccgtgtggtcggccacgtgcccggggaattcccggtctctgtctgggtcactgccgctgactgctggatgtgccagcctgtggccaggggctttgtggtcctccccatcacagagttcctcgtgggggaccttgttgtcacccagaacacttccctaccctggcccagctcctatctcactaagaccgtcctgaaagtctccttcctcctccacgacccgagcaacttcctcaagaccgccttgtttctctacagctgggacttcggggacgggacccagatggtgactgaagactccgtggtctattataactattccatcatcgggaccttcaccgtgaagctcaaagtggtggcggagtgggaagaggtggagccggatgccacgagggctgtgaagcagaagaccggggacttctccgcctcgctgaagctgcaggaaacccttcgaggcatccaagtgttggggcccaccctaattcagaccttccaaaagatgaccgtgaccttgaacttcctggggagccctcctctgactgtgtgctggcgtctcaagcctgagtgcctcccgctggaggaaggggagtgccaccctgtgtccgtggccagcacagcgtacaacctgacccacaccttcagggaccctggggactactgcttcagcatccgggccgagaatatcatcagcaagacacatcagtaccacaagatccaggtgtggccctccagaatccagccggctgtctttgctttcccatgtgctacacttatcactgtgatgttggccttcatcatgtacatgaccctgcggaatgccactcagcaaaaggacatggtggagaacccggagccaccctctggggtcaggtgctgctgccagatgtgctgtgggcctttcttgctggagactccatctgagtacctggaaattgttcgtgagaaccacgggctgctcccgcccctctataagtctgtcaaaacttacaccgtgtgagcactccccctccccaccccatctcagtgttaactgactgctgacttggagtttccagcagggtggtgtgcaccactgaccaggaggggttcatttgcgtggggctgttggcctggatcatccatccatctgtacagttcagccactgccacaagcccctccctctctgtcacccctgaccccagccattcacccatctgtacagtccagccactgacataagccccactcggttaccacccccttgaccccctacctttgaagaggcttcgtgcaggactttgatgcttggggtgttccgtgttgactcccaggtgggcctggctgcccactgcccattcctctcatattggcacatctgctgtccattgggggttctcagtttcctcccccagacagccctacctgtgccagagagctagaaagaaggtcataaagggttaaaaatccataactaaaggttgtacacatagatgggcacactcacagagagaagtgtgcatgtacacacaccacacacacacacacacacacacacacacacacacacagaaatataaacacatgcgtcacatgggcatttcagatgatcagctctgtatctggttaagtcggttgctgggatgcaccctgcactagagctgaaaggaaatttgacctccaagcagccctgacaggttctgggcccgggccctccctttgtgctttgtctctgcagttcttgcgccctttataaggccatcctagtccctgctggctggcagggggctggatggggggcaggactaatactgagtgattgcagagtgctttataaatatcaccttattttatcgaaacccatctgtgaaactttcactgaggaaaaggccttgcagcggtagaagaggttgagtcaaggccgggcgcggtggctcacgcctgtaatcccagcactttgggaggccgaggcgggtggatcacgagatcaggagatcgagaccaccctggctaacacggtgaaaccccgtctctactaaaaaaatacaaaaagttagccgggcgtggtggtgggtgcctgtagtcccagctactcgggaggctgaggcaggagaatggtgcgaacccgggaggcggagcttgcagtgagcccagatggcgccactgcactccagcctgagtgacagagcgagactctgtctccaaaaaaaaaaaaagaagaggttgagtcagcagggacttgggttccctgtgtgtgaggggggcattcttgcctgccagctgctcccgaggtggccttgagaaggaagaagcaggatgacagagcctgagcagcggaaccagcctgcaccctcccttctggcccagcgacctgggctgtggctgagacaataatgaggccagaagtagccggagcctgtcaggaagggcaggggaggactgtggggtctgggctctgtcgctgtaaccatctgctcccaggctgtgtgcagaaaatggcatttacactattgtgcagctcattctcatgaaatactgccattgttgctaaataaagcttgtgtgctctgaatatagccaagcataga

SEQ ID NO: 193546 - DNA, 679 bp, Homo sapiens
  Payload ID: 18211
  Gene Name: transmembrane protein 130
  ENST ID: ENST00000445790
  CDS Start-End: 541-679
acaaaaattagccaggcctggtggcgggcacctgtaatcccatcttactagggaggctgaggcaggagaatcgcttgaacccgggaggcggaggttgcagtgagccgagatcgcgccattctgggacagagcgagactctgtctcaagattaaaaaaaaaaaaaaaagaaaagaggaagcagcagcagcagcagcagcaagaggaatttcgaggcctttcgcccaacgcctggcgcaccttaagctctcaacagttcttgaatgaggagtagcatctcggagccacgagcgtgcagagagaaggcacctggaggagagccccaagggacctgcaggcggcttgcagcgcagcgcacgcccctggggacgctgagcctgtatgaactcaatctcaccaccgatagccctgccaccacgggagcggtggtgaccatctcggccagcctggtggccaaggacaacggcagcctggccctgcccgctgacgcccacctctaccgcttccactggatccacaccccgctggtgcttactggcaagatggagaagggtctcagctccaccatccgtgtggtcggccacgtgcccggggaattcccggtctctgtctgggtcactgccgctgactgctggatgtgccagcctgtggccaggggctttgtggtcctccccatcacag

SEQ ID NO: 193547 - DNA, 3891 bp, Homo sapiens
  Payload ID: 18211
  Gene Name: transmembrane protein 130
  ENST ID: ENST00000450876
  CDS Start-End: 1317-2336
ttttaaatttttttttttgtagagaatgggtgtcgctgtgttgttcaggctgatctaaaactcctgggctcaagtgaccctctggcttcaaagcgctgtgattacaggtgtgagctgactgggcccggcctcaaatgcctttataatttaagaaatggctctgaaaaaaaaggaaatacgtgatgtgggccaaagcagcgaacgtgtgaggtgggcctgaggaaaggtcggagctggagtcccccacagggacaggtgatgttgctttgaagtgaatgagatgcgtctgaaaaaaataatctcagagttgcctgggcactagaaggggcttcccttgccccctcgattcctgcttctactccccgggctggccctgccctggaaaccacacgagggtggcccacgcatccgtcagatgtctggggaccatgtacctgctaagggaggggaggacgaggcagggacatggggatgtatcagggtcagtcatcgtgccacaacccccagcccccagggaacacgggatgggcagcatttttactttaaaatgttgcctcatctagaggggttttccaccctgttggtgctggctttggggagatatgattttatttgatttatgtatttatttatttgagatggaatttcgctctttttgcccaggctggagtgcagtggcgcaatctcggctcacggcaaccaccatctcccaggttcaagtaattctccggcctcagcctcccgagtagctgagattacaggcgttcgccaccacacccggctaattttgtattgttagtagagacggggtttcgccatgttggccaggccggtctcaaacgcctgacctcaggtgatccacccacctcggcctcccaaagtgctggaattacaggcatgagccaccgtgcctgaccgagatgcaattttagagcccaggaggccaggctgctatttcttccaggagtgatttcccaaaatggacctggagctgacaggttcctggggggacttgtggggggaccttgtgcccactcggtcgtgcatctactgtccccacatccccatcgccagaaggccagcacccacctttctgccacattttgggaaccataaaaggacccagattggagacttgttgagggacaggcctgtatgaactcaatctcaccaccgatagccctgccaccacgggagcggtggtgaccatctcggccagcctggtggccaaggacaacggcagcctggccctgcccgctgacgcccacctctaccgcttccactggatccacaccccgctggtgcttactggcaagatggagaagggtctcagctccaccatccgtgtggtcggccacgtgcccggggaattcccggtctctgtctgggtcactgccgctgactgctggatgtgccagcctgtggccaggggctttgtggtcctccccatcacagagttcctcgtgggggaccttgttgtcacccagaacacttccctaccctggcccagctcctatctcactaagaccgtcctgaaagtctccttcctcctccacgacccgagcaacttcctcaagaccgccttgtttctctacagctgggacttcggggacgggacccagatggtgactgaagactccgtggtctattataactattccatcatcgggaccttcaccgtgaagctcaaagtggtggcggagtgggaagaggtggagccggatgccacgagggctgtgaagcagaagaccggggacttctccgcctcgctgaagctgcaggaaacccttcgaggcatccaagtgttggggcccaccctaattcagaccttccaaaagatgaccgtgaccttgaacttcctggggagccctcctctgactgtgtgctggcgtctcaagcctgagtgcctcccgctggaggaaggggagtgccaccctgtgtccgtggccagcacagcgtacaacctgacccacaccttcagggaccctggggactactgcttcagcatccgggccgagaatatcatcagcaagacacatcagtaccacaagatccaggtgtggccctccagaatccagccggctgtctttgctttcccatgtgctacacttatcactgtgatgttggccttcatcatgtacatgaccctgcggaatgccactcagcaaaaggacatggtggagaacccggagccaccctctggggtcaggtgctgctgccagatgtgctgtgggcctttcttgctggagactccatctgagtacctggaaattgttcgtgagaaccacgggctgctcccgcccctctataagtctgtcaaaacttacaccgtgtgagcactccccctccccaccccatctcagtgttaactgactgctgacttggagtttccagcagggtggtgtgcaccactgaccaggaggggttcatttgcgtggggctgttggcctggatcatccatccatctgtacagttcagccactgccacaagcccctccctctctgtcacccctgaccccagccattcacccatctgtacagtccagccactgacataagccccactcggttaccacccccttgaccccctacctttgaagaggcttcgtgcaggactttgatgcttggggtgttccgtgttgactcccaggtgggcctggctgcccactgcccattcctctcatattggcacatctgctgtccattgggggttctcagtttcctcccccagacagccctacctgtgccagagagctagaaagaaggtcataaagggttaaaaatccataactaaaggttgtacacatagatgggcacactcacagagagaagtgtgcatgtacacacaccacacacacacacacacacacacacacacacacacacagaaatataaacacatgcgtcacatgggcatttcagatgatcagctctgtatctggttaagtcggttgctgggatgcaccctgcactagagctgaaaggaaatttgacctccaagcagccctgacaggttctgggcccgggccctccctttgtgctttgtctctgcagttcttgcgccctttataaggccatcctagtccctgctggctggcagggggctggatggggggcaggactaatactgagtgattgcagagtgctttataaatatcaccttattttatcgaaacccatctgtgaaactttcactgaggaaaaggccttgcagcggtagaagaggttgagtcaaggccgggcgcggtggctcacgcctgtaatcccagcactttgggaggccgaggcgggtggatcacgagatcaggagatcgagaccaccctggctaacacggtgaaaccccgtctctactaaaaaaatacaaaaagttagccgggcgtggtggtgggtgcctgtagtcccagctactcgggaggctgaggcaggagaatggtgcgaacccgggaggcggagcttgcagtgagcccagatggcgccactgcactccagcctgagtgacagagcgagactctgtctccaaaaaaaaaaaaagaagaggttgagtcagcagggacttgggttccctgtgtgtgaggggggcattcttgcctgccagctgctcccgaggtggccttgagaaggaagaagcaggatgacagagcctgagcagcggaaccagcctgcaccctcccttctggcccagcgacctgggctgtggctgagacaataatgaggccagaagtagccggagcctgtcaggaagggcaggggaggactgtggggtctgggctctgtcgctgtaaccatctgctcccaggctgtgtgcagaaaatggcatttacactattgtgcagctcattctcatgaaatactgccattgttgctaaataaagcttgtgtgctctgaatat

SEQ ID NO: 193548 - DNA, 2881 bp, Homo sapiens
  Payload ID: 18211
  Gene Name: transmembrane protein 130
  Uniprot ID: Q8N3G9
  ENST ID: ENST00000416379
  CDS Start-End: 6-1313
ccgcaatggcccaggcagtgtggtcgcgcctcggccgcatcctctggcttgcctgcctcctgccctgggccccggcaggggtggccgcaggcctgtatgaactcaatctcaccaccgatagccctgccaccacgggagcggtggtgaccatctcggccagcctggtggccaaggacaacggcagcctggccctgcccgctgacgcccacctctaccgcttccactggatccacaccccgctggtgcttactggcaagatggagaagggtctcagctccaccatccgtgtggtcggccacgtgcccggggaattcccggtctctgtctgggtcactgccgctgactgctggatgtgccagcctgtggccaggggctttgtggtcctccccatcacagagttcctcgtgggggaccttgttgtcacccagaacacttccctaccctggcccagctcctatctcactaagaccgtcctgaaagtctccttcctcctccacgacccgagcaacttcctcaagaccgccttgtttctctacagctgggacttcggggacgggacccagatggtgactgaagactccgtggtctattataactattccatcatcgggaccttcaccgtgaagctcaaagtggtggcggagtgggaagaggtggagccggatgccacgagggctgtgaagcagaagaccggggacttctccgcctcgctgaagctgcaggaaacccttcgaggcatccaagtgttggggcccaccctaattcagaccttccaaaagatgaccgtgaccttgaacttcctggggagccctcctctgactgtgtgctggcgtctcaagcctgagtgcctcccgctggaggaaggggagtgccaccctgtgtccgtggccagcacagcgtacaacctgacccacaccttcagggaccctggggactactgcttcagcatccgggccgagaatatcatcagcaagacacatcagtaccacaagatccaggtgtggccctccagaatccagccggctgtctttgctttcccatgtgctacacttatcactgtgatgttggccttcatcatgtacatgaccctgcggaatgccactcagcaaaaggacatggtggaggtggctgattttgacttttcccccatgtctgacaagaacccggagccaccctctggggtcaggtgctgctgccagatgtgctgtgggcctttcttgctggagactccatctgagtacctggaaattgttcgtgagaaccacgggctgctcccgcccctctataagtctgtcaaaacttacaccgtgtgagcactccccctccccaccccatctcagtgttaactgactgctgacttggagtttccagcagggtggtgtgcaccactgaccaggaggggttcatttgcgtggggctgttggcctggatcatccatccatctgtacagttcagccactgccacaagcccctccctctctgtcacccctgaccccagccattcacccatctgtacagtccagccactgacataagccccactcggttaccacccccttgaccccctacctttgaagaggcttcgtgcaggactttgatgcttggggtgttccgtgttgactcccaggtgggcctggctgcccactgcccattcctctcatattggcacatctgctgtccattgggggttctcagtttcctcccccagacagccctacctgtgccagagagctagaaagaaggtcataaagggttaaaaatccataactaaaggttgtacacatagatgggcacactcacagagagaagtgtgcatgtacacacaccacacacacacacacacacacacacacacacacacacagaaatataaacacatgcgtcacatgggcatttcagatgatcagctctgtatctggttaagtcggttgctgggatgcaccctgcactagagctgaaaggaaatttgacctccaagcagccctgacaggttctgggcccgggccctccctttgtgctttgtctctgcagttcttgcgccctttataaggccatcctagtccctgctggctggcagggggctggatggggggcaggactaatactgagtgattgcagagtgctttataaatatcaccttattttatcgaaacccatctgtgaaactttcactgaggaaaaggccttgcagcggtagaagaggttgagtcaaggccgggcgcggtggctcacgcctgtaatcccagcactttgggaggccgaggcgggtggatcacgagatcaggagatcgagaccaccctggctaacacggtgaaaccccgtctctactaaaaaaatacaaaaagttagccgggcgtggtggtgggtgcctgtagtcccagctactcgggaggctgaggcaggagaatggtgcgaacccgggaggcggagcttgcagtgagcccagatggcgccactgcactccagcctgagtgacagagcgagactctgtctccaaaaaaaaaaaaagaagaggttgagtcagcagggacttgggttccctgtgtgtgaggggggcattcttgcctgccagctgctcccgaggtggccttgagaaggaagaagcaggatgacagagcctgagcagcggaaccagcctgcaccctcccttctggcccagcgacctgggctgtggctgagacaataatgaggccagaagtagccggagcctgtcaggaagggcaggggaggactgtggggtctgggctctgtcgctgtaaccatctgctcccaggctgtgtgcagaaaatggcatttacactattgtgcagctcattctcatgaaatactgccattgttgctaaataaagcttgtgtgctctgaatatagccaagcataga

SEQ ID NO: 193549 - DNA, 6640 bp, Homo sapiens
  Payload ID: 18212
  Gene Name: transmembrane protein 131
  Uniprot ID: Q92545
  ENST ID: ENST00000186436
  CDS Start-End: 230-5881
ctccgctccgactgcttgtaggcgatgcccaggcaaagaccgtgactgacactctcgctcacacgcacgcacggacccaggcccacgctcggagatcgagccccgggctcgcaaccgttgtcgctcccggcgccgcggccagagcccggaccacggcttccgcgccgccgccgcctcgccgagaagggccgcgccggacctcgagcgcggcggcccccggccggcagggatggggaagcgggcgggaggaggagcaaccggagccaccaccgccgccgtctccacgtccgccggggccgggctggaacctgcggccgcccgtagcgggggcccgcggagcgcggccgccggcctcctaggcgcgctgcacctggtgatgaccctcgtagtggctgcggcgcgggccgagaaggaagcattcgttcagtcagagagcataatagaagtactgcgttttgatgatggagggctactacagaccgagacaacacttggactcagttcatatcagcagaaaagtatatctctctaccgggggaattgcaggcccatacgatttgagccaccaatgctggatttccatgaacaaccagttggaatgccaaaaatggaaaaagtctacttacataatcctagttctgaagaaacgattactttagtatcaatatctgctacaacatcacattttcatgcatcattttttcaaaataggaaaattcttccaggaggaaatacatcatttgatgtagtttttcttgcaagagtagtaggaaatgtagaaaatactttatttattaatacatctaatcatggggtatttacttaccaggtatttggtgttggagttccaaatccatatcgattgaggccgttccttggggccagagtccctgtgaatagcagtttctcacctataataaacatccacaatcctcacagtgagcctttacaggttgtagaaatgtactctagtggaggagaccttcacctagaactcccaacgggtcaacaaggaggtaccagaaaactgtgggaaattcctccttatgaaaccaagggagtgatgagagccagtttttcatctagagaagcagataatcacacagccttcataagaataaagactaatgcttcagacagcacagagtttatcattcttcctgttgaggttgaagttacaacagctcctggaatttattcctcaactgaaatgttagattttggtacactaagaacacaagatctaccaaaagttttaaaccttcatttattaaattcaggaacaaaagatgtaccaataacaagtgttcgacctacaccacaaaatgatgctataacggtacactttaaaccaattacattaaaagcatcagaaagtaaatacaccaaggttgcaagcattagttttgatgcatcgaaggcaaaaaagccatctcagttttctgggaaaataacagttaaagcaaaggaaaagagttattctaaacttgaaataccatatcaagcagaagttttagatggttatttgggatttgatcatgctgcaacattatttcacatccgagacagccctgctgatcctgtggaaaggccaatttaccttactaacactttcagttttgcgatcctcattcacgatgtgttgctaccagaagaagccaaaacaatgtttaaagttcacaacttcagcaaaccagtcttaattcttcctaatgaatcaggatacatttttaccctgctttttatgccttccacatcatccatgcacattgataacaacattttacttattaccaatgcttctaaatttcatttacccgtgcgggtatacacaggctttttagattactttgtattgccccccaaaatagaggaacgtttcatagattttggagtactgagtgctacagaagcaagtaatattttatttgcaattataaacagcaatccaattgagttggctataaaaagttggcatatcataggagacggtttatcaatagaacttgtagctgtggaaagaggcaatagaactacaataatttcaagcctgccagagtttgaaaaatcctctttatcagatcaatcatcggtaacattagcttcaggctattttgcagtcttcagagtcaaacttactgcaaaaaaattagaggggattcatgatggagccatccagatcacaacagactatgagatcctgacaatccctgtgaaggctgtgattgcagtaggctcactgacctgcttccctaagcacgtggttcttccaccttcctttccagggaaaatagttcatcaaagtttaaatattatgaattccttctcacagaaggtaaaaatacagcaaatacgatctttgtcagaagatgtgcgattttactataaacgattacggggcaataaggaagacttggagccaggaaaaaaatcaaagattgcaaacatttattttgatcctggactacagtgtggggatcattgctatgttggcttgccttttctatccaaatctgaacccaaagtgcagcctggtgtagccatgcaggaagatatgtgggatgctgactgggatttgcatcaaagcctgttcaagggatggacaggaataaaggaaaattcaggtcatagattgagtgctatatttgaagtaaatacagaccttcaaaaaaatataatatcaaaaatcactgctgagctctcctggccttccatacttagctcaccccggcacttgaaatttccacttactaatacaaactgctcctcagaagaagagattactttagaaaatcctgcagatgttcctgtctatgttcagtttattcctctggctttatattccaacccttcagtgtttgtagataagttagtatcaaggtttaacttgagtaaggtggcaaagatagatttgagaacactagaatttcaagtcttcagaaacagtgctcatccactgcagagttcaacaggatttatggagggcctctctcgacatttaattttaaacctaattttaaaacctggagaaaagaaatctgtcaaagtaaagtttactccagttcacaacagaactgtttcttcacttatcatagtcagaaataacctgactgtgatggatgctgtgatggtccaaggacaaggaacaactgagaacttgagggtggcaggcaagcttccaggtccaggaagctccttacgctttaaaatcacggaagcattgttaaaagattgtacagatagtttaaaactaagagaaccaaatttcacattgaaaagaacatttaaggtagagaatacaggacaacttcaaattcacatagaaaccattgaaatcagtggatactcatgtgaaggatatggctttaaagttgttaattgtcaagagtttactctaagtgccaatgcttctagagatataatcatattgtttactcctgattttacagcttctagagttattcgggaactgaagtttataacaaccagtggctctgagtttgtatttatattgaatgcatcccttccttaccatatgttagcaacctgtgcagaagccctacccagacctaactgggaactggctctgtatatcatcatctcaggaataatgagtgcactgtttcttttggtcattggaacagcctatttggaagctcaaggaatatgggagccatttcgaaggcggctatcctttgaggcctcgaacccgcccttcgatgtgggaaggccatttgatctcaggagaatcgttggtatttcatctgaaggaaacttgaacacactcagctgtgaccccggtcacagtagggggttctgtggagcaggcggttcatcatcccgacccagtgccgggagtcataagcagtgtggcccatcggtccacccacacagcagtcacagcaatagaaactcagctgacgtggaaaacgtcagagccaaaaacagttcaagtacctctagtaggacttctgctcaagcagcttcttcacagtctgctaacaaaacaagcccccttgtcttagattcgaacacagtgactcaaggtcatacagcgggcagaaagtccaaaggggcaaagcagagccagcacggcagccagcaccatgcccacagcccgctggagcagcaccctcagcctcctctgccaccgccagtgcctcagccccaggagccgcagcctgaaaggctgtctcccgcccccctcgcacacccttcccacccagaacgtgccagcagcgcgaggcacagttccgaggactcggacatcaccagtctcatagaagccatggacaaagacttcgaccaccatgactccccagccctagaagtgtttacagagcagcctccatcgccattgccaaaaagcaaagggaaaggaaaacctcttcagcgcaaggtgaaaccacctaagaagcaagaggaaaaggagaagaagggaaagggaaagccacaggaagatgagctgaaggactctttggctgatgatgatagctcctccaccaccacagagacctccaaccctgacacagaaccgctcctcaaggaggatacagaaaagcaaaagggaaaacaagccatgcctgaaaaacatgaaagtgaaatgtctcaagtgaagcaaaaaagcaaaaaactcttaaatattaagaaagaaatcccaacagatgtgaaacccagttcattagaactaccatatactccccctttggaaagtaagcaacgtagaaatctcccaagcaagattcctcttccaactgcaatgacaagtggatccaaatcacgaaatgcccagaaaacaaaaggtacaagtaagttagtggataacagaccacctgccctagcaaaattcctcccgaatagtcaagaattaggcaacaccagtagctcagagggtgaaaaagactctcctccaccggagtgggattccgttccagttcacaaacctggcagctctactgatagtctttataaactttctctgcaaaccctcaacgcagacattttcttaaaacaacgccagacctcaccgacacctgcttccccgtctcccccagctgccccctgcccctttgtggcccggggcagctacagcagcatcgtcaacagcagctccagcagtgaccctaaaataaaacagccaaatggaagcaaacacaagttgacaaaggcagcctcgctcccgggcaagaacggcaaccccacttttgctgcagtcacggctggctacgacaagagcccaggtgggaatggctttgctaaagtttcttcaaacaaaacaggtttctccagcagccttggcatttcacacgctcctgttgacagcgatggctcagacagctcgggtttgtggagtcccgtcagcaacccaagcagccctgacttcactcccctcaattcgttctccgcctttggaaactcttttaatctaactggtgaagttttcagcaaactcggattatctcgatcgtgcaatcaggcctcacagaggagctggaacgagtttaatagtggcccttcatacctttgggagtcgccagcgacagatcccagtccttcctggccagccagttccggctccccgacccacacagccacatcggtcctcggtaacaccagcggcctgtggtccaccactccattcagcagctccatttggtccagcaaccttagcagcgcccttcccttcaccactccagcaaacacgctggcaagcatcggcctcatgggcacagaaaactcccctgctcctcacgctccctccacctccagtccagctgacgacttgggacagacctacaacccgtggcggatatggagccccacgattggaagaagaagctcggacccttggtctaattcgcactttcctcacgagaattaaattaagcaaaaaacaaacaaacatagtgggccctcgtctagatcatgatgtgccagtttctgagacatctttttaaggctcttactgcagctcccctccccaccctcctcttctttgcaaaacagacccaagcagggcaggctcagaccactcgcttctttcagatctttcttgcaattatgataacatgagatttgctgttgtgcttttagagaaaagtctggactcagccacaaactctaataagacctgtacatctgagaacctttcccgttactgcgttttcaccacctgtcttccccatgctttatttatctgtatgaacacagatttgacattacagctaaggaaataatttgagttgattcagaaatcctggcatgtgacaattttgttaaattaccaagtttggtttttaataatttctcaatattatgcgccaagatctaattttaaaactgtatgaggactttgtgctgaaaatagagtatttttttaaagtaaggctgtcttggtttaaaagcagattacagaaatgtaagtcaacttaagaacggtgaatgaatgtaaaaacattcagttgagaccatatgcattttctgtgctgtttgtacttgaggtatgtaacatttgtatacctgaacttattttaaagatgaactgaaatgcacatagccaagtcttgagatacaagattgaatgtgtatttcttaaaaatacaactttgtgttgtactttgaaataaatgatgcttttttc

SEQ ID NO: 193550 - DNA, 426 bp, Homo sapiens
  Payload ID: 18212
  Gene Name: transmembrane protein 131
  ENST ID: ENST00000409721
  CDS Start-End: 1-426
gagaatacaggacaacttcaaattcacatagaaaccattgaaatcagtggatactcatgtgaaggatatggctttaaagttgttaattgtcaagagtttactctaagtgccaatgcttctagagatataatcatatttgcactgtttcttttggtcattggaacagcctatttggaagctcaaggaatatgggagccatttcgaaggcggctatcctttgaggcctcgaacccgcccttcgatgtgggaaggccatttgatctcaggagaatcgttggtatttcatctgaaggaaacttgaacacactcagctgtgaccccggtcacagtagggggttctgtggagcaggcggttcatcatcccgacccagtgccgggagtcataagcagtgtggcccatcggtccacccacacagcagtcacagc

SEQ ID NO: 193551 - DNA, 1105 bp, Homo sapiens
  Payload ID: 18212
  Gene Name: transmembrane protein 131
  ENST ID: ENST00000418629
  CDS Start-End: 1-998
ccggcctcctaggcgcgctgcacctggtgatgaccctcgtagtggctgcggcgcgggccgagaaggaagcattcgttcagtcagagagcataatagaagtactgcgttttgatgatggagggctactacagaccgagacaacacttggactcagttcatatcagcagaaaagtatatctctctaccgggggaattgcaggcccatacgatttgagccaccaatgctggatttccatgaacaaccagttggaatgccaaaaatggaaaaagtctacttacataatcctagttctgaagaaacgattactttagtatcaatatctgctacaacatcacattttcatgcatcattttttcaaaataggaaaattcttccaggaggaaatacatcatttgatgtagtttttcttgcaagagtagtaggaaatgtagaaaatactttatttattaatacatctaatcatggggtatttacttaccaggtatttggtgttggagttccaaatccatatcgattgaggccgttccttggggccagagtccctgtgaatagcagtttctcacctataataaacatccacaatcctcacagtgagcctttacaggttgtagaaatgtactctagtggaggagaccttcacctagaactcccaacgggtcaacaaggaggtaccagaaaactgtgggaaattcctccttatgaaaccaagggagtgatgagagccagtttttcatctagagaagcagataatcacacagccttcataagaataaagactaatgcttcagacagcacagagtttatcattcttcctgttgaggttgaagttacaacagctcctggaatttattcctcaactgaaatgttagattttggtacactaagaacacaagatctaccaaaagttttaaaccttcatttattaaattcaggaacaaaagatgtaccaataacacatcgaaggcaaaaaagccatctcagttttctgggaaaataacagttaaagcaaaggaaaagagttattctaaacttgaaataccatatcaagcagaagttttagatggttatttgggatttgatcatgctgcaacattatttcacatc

SEQ ID NO: 193552 - DNA, 565 bp, Homo sapiens
  Payload ID: 18212
  Gene Name: transmembrane protein 131
  ENST ID: ENST00000438715
  CDS Start-End: 182-565
gtgaatcttgcccaaatatttaacactggcatgggttgtctccaaaccactgcatgtttagcctgattcctccttggctggaccatctaagaaccctagaactctctaaccacatctagagccaaaataatgtatatctctctaccgggggaattgcaggcccatacgatttgagccaccaatgctggatttccatgaacaaccagttggaatgccaaaaatggaaaaagtctacttacataatcctagttctgaagaaacgattactttagtatcaatatctgctacaacatcacattttcatgcatcattttttcaaaataggaaaattcttccaggaggaaatacatcatttgatgtagtttttcttgcaagagtagtaggaaatgtagaaaatactttatttattaatacatctaatcatggggtatttacttaccaggtatttggtgttggagttccaaatccatatcgattgaggccgttccttggggccagagtccctgtgaatagcagtttctcacctataataaacatccacaatcctcacagtgagcctttacag

SEQ ID NO: 193553 - DNA, 3480 bp, Homo sapiens
  Payload ID: 18213
  Gene Name: transmembrane protein 132A
  Uniprot ID: Q24JP5
  ENST ID: ENST00000005286
  CDS Start-End: 154-3228
gggaattgcagccgcggggcgggcggcggcggcggcggcggcggccgggacccagcgggccaggtggggacggcgcggagcgggtgcgggagatgccgtgcgggactggggccacctgagccgcccgcctcgtccccgccttctgtgggaaggatgtgcgcgcggatggccggtcgcacaacagcggcccctcgggggccctacggcccctggctctgcctcctggtggccctcgccctggacgtcgtgagagtggactgtggccaggctcccctggaccctgtctacctgccggcagccctggagctcctagacgcccctgaacacttccgtgtgcagcaggtgggccactacccacctgccaactcctctctgagctcccgatctgagacctttctgctcctacagccctggcccagggcccagccacttctccgggcctcctacccaccttttgccactcagcaggtggtcccccctcgagtcactgagccccaccaacggccagtcccatgggacgtgcgggccgtttcagtggaagcggctgtgactccagcagagccctacgcccgggttctcttccacctcaaagggcaggattggccaccagggtctggcagcctgccctgtgcccggctccatgccacacaccctgccggcactgctcaccaagcctgccgcttccagccatccctgggcgcctgcgtggtggagctggagcttccctcgcactggttctcacaggcctccaccacacgggccgagctggcctacacgcttgagcctgcagctgagggccctgggggctgtggctccggcgaggagaacgaccctggggagcaggccctcccagtggggggtgtggagctgcgcccagcagaccccccgcagtaccaggaggtacctctggacgaggctgtgactctgcgggtgcctgacatgccagtgcggcccggccagctctttagtgctaccctcctgcttcggcacaacttcacagccagcctcctgaccctgcggatcaaggtgaagaaggggctgcatgtgacagccgcccgcccagcccagcccacactctggactgccaagctggaccgcttcaagggctccaggcaccacaccaccctcatcacctgccaccgtgctgggctcacagagccagattccagcagtccccttgaactgtctgagttcctatgggtggactttgtggtggagaatagcactggtgggggcgtagcggtcactcgccccgtcacgtggcagctggagtacccaggccaggcccctgaagcagagaaggacaaaatggtgtgggaaatcctggtgtctgagcgggacatcagagcccttatcccactggccaaggctgaggagctggtgaatacagcaccactgactggagtgccccagcatgtccccgtgcgccttgtcactgtggacggcgggggggccttggtggaggtgacagagcatgtcggctgcgagtctgccaacacacaggtcctgcaggtgtctgaggcctgtgatgccgtgttcgtggctggcaaggagagccggggcgcccggggggtgcgagtggacttctggtggcgccggctccgcgcctcgctgcggctgaccgtgtgggcccccctgctaccgctgcgtatcgagctcaccgacaccaccctcgagcaggtccgcggctggagggtacctggccctgctgaagggcctgcggaacccgctgcagaggcgtcggatgaggccgagcggcgcgcccgtggctgccacctgcagtaccagcgggccggtgtgcgcttcctcgcccccttcgcggcccacccgctggacggcggccgccgcctcacgcacctgcttggccccgactggctgctagacgtgtcccacctcgtggcgccacacgcccgcgtgctggactcgcgtgtagcctctctggagggtggccgtgtcgtggtgggccgggagcccggtgtcacctccattgaggtgcgttccccactgtctgactccatcctgggggagcaggcgctggctgtgacggacgacaaggtctcagtgctggagctgagggtgcagccagtgatgggcatctcgctgaccttgagccggggcactgcccaccccggggaggtcacagctacgtgctgggcacagtcagcccttcccgccccaaagcaggaggtggccctctccctatggctgtccttctctgatcacactgtggccccagctgagctctacgaccgccgtgacctgggactgtccgtctcagccgaggagcctggtgccatcctgccagctgaggagcagggtgcccagctcggggtggtggtgagtggggcaggcgccgaggggctgccgctgcatgtggctctgcacccgcccgagccctgccgccggggccgccaccgtgtgcctctggcctctggcaccgcctggctggggctgccccctgcctccactccagcccctgctctcccatccagccctgcttggagcccaccagccacagaagccaccatgggtggtaaacggcaggtggcaggcagtgtcgggggcaacacaggtgtgaggggcaagtttgagcgggcagaggaggaggccaggaaggaggagaccgaagccagggaggaggaggaggaagaggaggaggagatggtccctgcccctcagcatgtcactgagctagagctgggcatgtacgccctgctgggagtcttctgcgtggccatcttcatcttcttggtcaatggtgtggtcttcgtcctgcgctatcagcgcaaagaacctcccgacagtgccactgaccccacctccccccagccccacaactgggtctggctgggcactgaccaggaggaactgagccgccagctggaccggcagtcccctggcccgcccaagggggaggggagctgcccctgtgagagtgggggaggaggggaggcccctaccctggcccctggccctcctgggggcaccaccagctcctcaagcaccctggcccgaaaggaggctggggggcggcggaagcgagtagagtttgtgacatttgcgccagcccctccagcccagtcacctgaggagcctgtaggggcccctgctgtgcagtccatccttgtggcaggcgaggaggacatccgctgggtgtgtgaggacatggggctgaaggaccctgaggagcttcgcaactacatggagaggatccggggcagctcctgaccctccacagccacctggtcagccaccagctggggcaacgagggtggaggtcccactgagcctctcgcctgcccccgccactcgtctggtgcttgttgatccaagtcccctgcctggtcccccacaaggactcccatccaggccccctctgccctgccccttgtcatggaccatggtcgtgaggaagggctcatgccccttatttatgggaaccatttcattctaacagaataaaccgagaaggaaaccaga

SEQ ID NO: 193554 - DNA, 3346 bp, Homo sapiens
  Payload ID: 18213
  Gene Name: transmembrane protein 132A
  Uniprot ID: Q24JP5
  ENST ID: ENST00000453848
  CDS Start-End: 159-3230
tgtctgggaattgcagccgcggggcgggcggcggcggcggcggcggcggccgggacccagcgggccaggtggggacggcgcggagcgggtgcgggagatgccgtgcgggactggggccacctgagccgcccgcctcgtccccgccttctgtgggaaggatgtgcgcgcggatggccggtcgcacaacagcggcccctcgggggccctacggcccctggctctgcctcctggtggccctcgccctggacgtcgtgagagtggactgtggccaggctcccctggaccctgtctacctgccggcagccctggagctcctagacgcccctgaacacttccgtgtgcagcaggtgggccactacccacctgccaactcctctctgagctcccgatctgagacctttctgctcctacagccctggcccagggcccagccacttctccgggcctcctacccaccttttgccactcagcaggtggtcccccctcgagtcactgagccccaccaacggccagtcccatgggacgtgcgggccgtttcagtggaagcggctgtgactccagcagagccctacgcccgggttctcttccacctcaaagggcaggattggccaccagggtctggcagcctgccctgtgcccggctccatgccacacaccctgccggcactgctcaccaagcctgccgcttccagccatccctgggcgcctgcgtggtggagctggagcttccctcgcactggttctcacaggcctccaccacacgggccgagctggcctacacgcttgagcctgcagctgagggccctgggggctgtggctccggcgaggagaacgaccctggggagcaggccctcccagtggggggtgtggagctgcgcccagcagaccccccgcagtaccaggaggtacctctggacgaggctgtgactctgcgggtgcctgacatgccagtgcggcccggccagctctttagtgctaccctcctgcttcggcacaacttcacagccagcctcctgaccctgcggatcaaggtgaagaaggggctgcatgtgacagccgcccgcccagcccagcccacactctggactgccaagctggaccgcttcaagggctccaggcaccacaccaccctcatcacctgccaccgtgctgggctcacagagccagattccagtccccttgaactgtctgagttcctatgggtggactttgtggtggagaatagcactggtgggggcgtagcggtcactcgccccgtcacgtggcagctggagtacccaggccaggcccctgaagcagagaaggacaaaatggtgtgggaaatcctggtgtctgagcgggacatcagagcccttatcccactggccaaggctgaggagctggtgaatacagcaccactgactggagtgccccagcatgtccccgtgcgccttgtcactgtggacggcgggggggccttggtggaggtgacagagcatgtcggctgcgagtctgccaacacacaggtcctgcaggtgtctgaggcctgtgatgccgtgttcgtggctggcaaggagagccggggcgcccggggggtgcgagtggacttctggtggcgccggctccgcgcctcgctgcggctgaccgtgtgggcccccctgctaccgctgcgtatcgagctcaccgacaccaccctcgagcaggtccgcggctggagggtacctggccctgctgaagggcctgcggaacccgctgcagaggcgtcggatgaggccgagcggcgcgcccgtggctgccacctgcagtaccagcgggccggtgtgcgcttcctcgcccccttcgcggcccacccgctggacggcggccgccgcctcacgcacctgcttggccccgactggctgctagacgtgtcccacctcgtggcgccacacgcccgcgtgctggactcgcgtgtagcctctctggagggtggccgtgtcgtggtgggccgggagcccggtgtcacctccattgaggtgcgttccccactgtctgactccatcctgggggagcaggcgctggctgtgacggacgacaaggtctcagtgctggagctgagggtgcagccagtgatgggcatctcgctgaccttgagccggggcactgcccaccccggggaggtcacagctacgtgctgggcacagtcagcccttcccgccccaaagcaggaggtggccctctccctatggctgtccttctctgatcacactgtggccccagctgagctctacgaccgccgtgacctgggactgtccgtctcagccgaggagcctggtgccatcctgccagctgaggagcagggtgcccagctcggggtggtggtgagtggggcaggcgccgaggggctgccgctgcatgtggctctgcacccgcccgagccctgccgccggggccgccaccgtgtgcctctggcctctggcaccgcctggctggggctgccccctgcctccactccagcccctgctctcccatccagccctgcttggagcccaccagccacagaagccaccatgggtggtaaacggcaggtggcaggcagtgtcgggggcaacacaggtgtgaggggcaagtttgagcgggcagaggaggaggccaggaaggaggagaccgaagccagggaggaggaggaggaagaggaggaggagatggtccctgcccctcagcatgtcactgagctagagctgggcatgtacgccctgctgggagtcttctgcgtggccatcttcatcttcttggtcaatggtgtggtcttcgtcctgcgctatcagcgcaaagaacctcccgacagtgccactgaccccacctccccccagccccacaactgggtctggctgggcactgaccaggaggaactgagccgccagctggaccggcagtcccctggcccgcccaagggggaggggagctgcccctgtgagagtgggggaggaggggaggcccctaccctggcccctggccctcctgggggcaccaccagctcctcaagcaccctggcccgaaaggaggctggggggcggcggaagcgagtagagtttgtgacatttgcgccagcccctccagcccagtcacctgaggagcctgtaggggcccctgctgtgcagtccatccttgtggcaggcgaggaggacatccgctgggtgtgtgaggacatggggctgaaggaccctgaggagcttcgcaactacatggagaggatccggggcagctcctgaccctccacagccacctggtcagccaccagctggggcaacgagggtggaggtcccactgagcctctcgcctgcccccgccactcgtctggtgcttgttgatccaagtcccctgcctg

SEQ ID NO: 193555 - DNA, 2013 bp, Homo sapiens
  Payload ID: 18213
  Gene Name: transmembrane protein 132A
  ENST ID: ENST00000540112
  CDS Start-End: 1-341
actggctgctagacgtgtcccacctcgtggcgccacacgcccgcgtgctggactcgcgtgtagcctctctggagggtggccgtgtcgtggtgggccgggagcccggtgtcacctccattgaggtgcgttccccactgtctgactccatcctgggggagcaggcgctggctgtgacggacgacaaggtctcagtgctggagctgagggtgcagccagtgatgggcatctcgctgaccttgagccggggcactgcccaccccggggaggtcacagctacgtgctgggcacagtcagcccttcccgccccaaagcaggtgacagttggggggtcagggggatgaggtcaacatctccagatgggggctcatggtagaggggaatgggaggaagggaccctggtacctcgaccccttagggttttcagagtgaggactgactctgtgaggtagtgagctctctgcagctggaggtgatcaagcagtggctggagtatggcagtgggaggttggttagatggctctaactgaggaccctcccaataactcagaccctagggctgagtggcagacaggtgattgacacgcgtcccctctctccctgtgttttgtctatctgcctgtgtctctgttttctctctggtctctcctccatgtggcctatctctgtgggagtggtttctctgtgcatgcgtgcgtgccctcgcatgtctctgcctgtgtctgtgtgccccacaggaggtggccctctccctatggctgtccttctctgatcacactgtggccccagctgagctctacgaccgccgtgacctgggactgtccgtctcagccgaggagcctggtgccatcctgccagctgaggagcagggtgcccagctcggggtggtggtgagtggggcaggcgccgaggggctgccgctgcatgtggctctgcacccgcccgagccctgccgccggggccgccaccgtgtgcctctggcctctggcaccgcctggctggggctgccccctgcctccactccagcccctgctctcccatccagccctgcttggagcccaccagccacagaagccaccatgggtggtaaacggcaggtggcaggcagtgtcgggggcaacacaggtgtgaggggcaagtttgagcgggcagaggaggaggccaggaaggaggagaccgaagccagggaggaggaggaggaagaggaggaggagatggtccctgcccctcagcatgtcactgagctagagctgggcatgtacgccctgctgggagtcttctgcgtggccatcttcatcttcttggtcaatggtgtggtcttcgtcctgcgctatcagcgcaaagaacctcccgacagtgccactgaccccacctccccccagccccacaactgggtctggctgggcactgaccaggaggaactgagccgccagctggaccggcagtcccctggcccgcccaagggggaggggagctgcccctgtgagagtgggggaggaggggaggcccctaccctggcccctggccctcctgggggcaccaccagctcctcaagcaccctggcccgaaaggaggctggggggcggcggaagcgagtagagtttgtgacatttgcgccagcccctccagcccagtcacctgaggagcctgtaggggcccctgctgtgcagtccatccttgtggcaggcgaggaggacatccgctgggtgtgtgaggacatggggctgaaggaccctgaggagcttcgcaactacatggagaggatccggggcagctcctgaccctccacagccacctggtcagccaccagctggggcaacgagggtggaggtcccactgagcctctcgcctgcccccgccactcgtctggtgcttgttgatccaagtcccctgcctggtcccccacaaggactcccatccaggccccctctgccctgccccttgtcatggaccatggtcgtgaggaagggctcatgccccttatttatgggaaccatttcattctaacagaataaa

SEQ ID NO: 193556 - DNA, 692 bp, Homo sapiens
  Payload ID: 18213
  Gene Name: transmembrane protein 132A
  ENST ID: ENST00000535480
  CDS Start-End: 1-312
tcagtgctggagctgagggtgcagccagtgatgggcatctcgctgaccttgagccggggcactgcccaccccggggaggtcacagctacgtgctgggcacagtcagcccttcccgccccaaagcaggaggtggccctctccctatggctgtccttctctgatcacactgtggccccagctgagctctacgaccgccgtgacctgggactgtccgtctcagccgaggagcctggtgccatcctgccagctgaggagcagggtgcccagctcggggtggtgcccctccagcccagtcacctgaggagcctgtaggggcccctgctgtgcagtccatccttgtggcaggcgaggaggacatccgctgggtgtgtgaggacatggggctgaaggaccctgaggagcttcgcaactacatggagaggatccggggcagctcctgaccctccacagccacctggtcagccaccagctggggcaacgagggtggaggtcccactgagcctctcgcctgcccccgccactcgtctggtgcttgttgatccaagtcccctgcctggtcccccacaaggactcccatccaggccccctctgccctgccccttgtcatggaccatggtcgtgaggaagggctcatgccccttatttatgggaaccatttcattctaacagaataaaccgagaaggaaaccaga

SEQ ID NO: 193557 - DNA, 454 bp, Homo sapiens
  Payload ID: 18213
  Gene Name: transmembrane protein 132A
  ENST ID: ENST00000536409
  CDS Start-End: 1-454
agcggtcactcgccccgtcacgtggcagctggagtacccaggccaggcccctgaagcagagaaggacaaaatggtgtgggaaatcctggtgtctgagcgggacatcagagcccttatcccactggccaaggtgtctgaggcctgtgatgccgtgttcgtggctggcaaggagagccggggcgcccggggggtgcgagtggacttctggtggcgccggctccgcgcctcgctgcggctgaccgtgtgggcccccctgctaccgctgcgtatcgagctcaccgacaccaccctcgagcaggtccgcggctggagggtacctggccctgctgaagggcctgcggaacccgctgcagaggcgtcggatgaggccgagcggcgcgcccgtggctgccacctgcagtaccagcgggccggtgtgcgcttcctcgcccccttcgcggcccacccgctggac

SEQ ID NO: 193558 - DNA, 990 bp, Homo sapiens
  Payload ID: 18213
  Gene Name: transmembrane protein 132A
  ENST ID: ENST00000544065
  CDS Start-End: 761-990
ctccattgtctgggaattgcagccgcggggcgggcggcggcggcggcggcggcggccgggacccagcgggccagtggactgtggccaggctcccctggaccctgtctacctgccggcagccctggagctcctagacgcccctgaacacttccgtgtgcagcaggtgggccactacccacctgccaactcctctctgagctcccgatctgagacctttctgctcctacagccctggcccagggcccagccacttctccgggcctcctacccaccttttgccactcagcaggtggtcccccctcgagtcactgagccccaccaacggccagtcccatgggacgtgcgggccgtttcagtggaagcggctgtgactccagcagagccctacgcccgggttctcttccacctcaaagggcaggattggccaccagggtctggcagcctgccctgtgcccggctccatgccacacaccctgccggcactgctcaccaagcctgccgcttccagccatccctgggcgcctgcgtggtggagctggagcttccctcgcactggttctcacaggcctccaccacacgggccgagctggcctacacgcttgagcctgcagctgagggccctgggggctgtggctccggcgaggagaacgaccctggggagcaggccctcccagtggggggtgtggagctgcgcccagcagaccccccgcagtaccaggaggtacctctggacgaggctgtgactctgcgggtgcctgacatgccagtgcggcccggccagctctttagtgctaccctcctgcttcggcacaacttcacagccagcctcctgaccctgcggatcaaggtgaagaaggggctgcatgtgacagccgcccgcccagcccagcccacactctggactgccaagctggaccgcttcaagggctccaggcaccacaccaccctcatcacctgccaccgtgctgggctcacagagccagattccag

SEQ ID NO: 193559 - DNA, 10906 bp, Homo sapiens
  Payload ID: 18214
  Gene Name: transmembrane protein 132B
  Uniprot ID: Q14DG7
  ENST ID: ENST00000299308
  CDS Start-End: 9-3245
tacgggaaatgtttggtgcagcatccagaatggacaccactgctgtctgcaccgggggagtgacagagagtcgagggattgtggatagcctgcagaagttttcctcgctccctgcttacctccccacgaacttgcacatctccaatgcagaggagtcctttttccttaaagaagccaaccaagacctcacaaggaactccagtctgcaggcccgggtggagccattcttcatctaccgagccaggacaccccctattatcaatgccagctatggcccattttcagtggagaagataatcccccaggagctcctgttgacatctacagcctttggaaacatggacaaatttcccttcaactggaaattgaaatcccacatccttgacagctccatctactccaacagacccaaagtgcagaccttgttttatgtcactggcatgggctgggatgacagtgaccttacggaagatctaccctgtgtcaagatgtttgctttccctgaggccagggaagtggcagccagctgtcggctgcaaggggccccagggctgtgtgtggctgagctggagctgctgcccgagtggttcagctcaggcctggacctggaaccagaggaggagatcccagccctgctcgggggcaccacgatggagctcttcttcacgctctacccagctgacaaggctggccagtgtcctctggaggaggaaggcaagtgggagaacaatatccactcgggcctggagagcccccagcaagcgtttccagcccgagagaggattgggagtgtggtggtctacccaacccaagatgatctgaagtggtccctggtgagcttggacgagaatgtggtcatctcggtacctctgaatctagtccgggaaggggacacggccacctttttggtctctctgaccagtagctctgtggcagaccagttcactcttagaattaaggcggcagcaggtgtgaagataacggcagtgagagtcagcagtgaggaccaatgggcagtccaggaggaaattgataatggcagcactcagacgtcggccaccctcacctgcatgggccatcgcccggacacgcagagcagggtaaatggatccttctatgagatcttgcaagtggactttggaattgataatagcagtgacctggctggggcccagcagattacctggcaggtggagtacccgattgaggactccatgagtgagctggtcgtctccgagatcttcgtcagccagacaaccttcgtgggcatcgtccctcttgccatggacaccgaggttttgaacactgccattctcactggaaagcctgtttcagttcctgtcaaagtcgtgggggtccaggaggatggttctgtggtcgatgtgtctgagtctgtggaatgcaagtctgccgatgaagatgtcattaaggtttccaacaactgtgattccatttttgtgaatgggaaggaaatgaagagcaaagtggacacgattgtgaacttcacccaccagcacttcacctcccagttcgaggtcactgtctgggcacccaggctccccctgcagattgagatctcagacaccgagctgagccagatcaagggctggaggatcccggttgctgccaacagaaggcctacccgggaaagcgatgacgaggacgatgaggagaagaagggacgaggctgctccctgcagtaccagcacgccacagtgcgtgtcctcacccagtttgtggccgagtcacctgacttagggcagctgacctacatgctgggccccgactggcagtttgacatcactgaccttgtgaccgagttcatgaaggtggaggagccgaaaatcgctcagttacaggacggcaggaccctggctggtcgggagccgggaataaccacggtgcaggtcctctcgccgttgtctgactccatcctggctgagaagacggtgattgtcctggatgaccgagtcaccatcgcggagctgggagtgcagctcgtagctggcatgtctctctccctgcagccacaccgagcagacaaaagggccatcgtctccacagctgctgccctggatgttcttcagtccccacagcaggaagcaatagtaagttcttggattttgttcagtgatggttcggtgacacctttagacatttacgatcctaaggattattctgttactgtctcatcattggatgaaatggtggtgtctgtccaggcaaaccttgagtccaaatggccaattgtggttgcagagggtgaaggacaagggcctttgattaagttagaaatgatgataagtgaaccttgtcagaagaccaagaggaagagtgttcttgccgtgggtaaaggaaatgtcaaggtcaaattcgaaccaagtagtgatgagcaccaaggaggcagcaatgatattgagggcataaatcgggaatataaagaccacctcagtaattccatagagcgcgaaggaaaccaggagagagcagtccaggaatggttccaccgtggcacacctgttggccaagaggaaagtaccaacaaaagcacaaccccccagtctcccatggaagggaagaataagttactcaaaagtggtggtccagatgcctttacaagcttccccactcaagggaagtcaccggaccccaataatcctagtgacctcacagtgacctcaagggggctaacggacttggagattggcatgtatgccttgctctgcgtcttctgtctggccattctggtcttcttgatcaactgcgtggcgtttgcctggaaatacagacacaaaaggtttgctgtgagtgagcagggcaacatcccccattcccacgactgggtctggcttgggaatgaagtggaacttttggagaaccctgttgacattacactcccatcagaggagtgcacaaccatgatagacaggggcctgcagttcgaggagaggaacttccttctgaatggcagttcccagaagacttttcatagtcaactactcagaccctctgactatgtctatgagaaagaaattaaaaatgaacctatgaattcttcgggcccaaagaggaagagagtcaagttcacttcctacaccaccatcctcccagaggacggcggcccatacaccaactccatcctgtttgacagcgatgataacatcaagtgggtctgccaagatatggggctgggggattcacaggactttagagactatatggaaagtctgcaagaccagatgtaaactcctttcttatgtttgtattcacctttatgccttctgttttttgaatgctggagcagtgagtttgatcagcaataggggatgatttaacaaagtttgatttgtggaggtctggtgggattcatttctaagcaggtaaaagaggtttggagagctatagaagctgggttttaagtttggaaatgcctctaaaacagccacatgtggggactggagaaattctaagacaacagttttatggactgcctggtacgagctcagtgcaaatgtattaaacctgaccccacagacattgttagtcatctcgtgacaaatggccatgtggaattagaaaagatttgggtgttgatttttctatttctagaccttttaaagcacagtggacacttattgccccttggcctgagtttagacatacatgaaagatgactgaatgtagctatcctgatttgtcatgagcgctgctcattatttttatatacatttgcacctgcacctgttcctttgacctctggaattctttttgaaacatgaagagaagaaatttcagtcttttccttgagctctgtttgatttacacatgagttttcttccctgggatttgccatgccatgttatttcctgggtctccatgcaggatgtcaggtttttccagttttctgcacttcatcatctagggatggtatccaagaagcttattctcactttgttttttccttccttttgttgttgaactttcttgtataacactgggacaaagggttttacttaaaatgttaatatacagtgagggagggccatctctttactgttttctatgtgaagtttcaaacatttggaaaaaagttgtcaatcacaaacatttatttttattctctgcttgttgaaaactcatggggaactcctggagtgcatttctgagggtaaaaaggccccaacatagctgtatttatacaagtgctttgtggccaacacaatttactatccaaactgaagtcttaaagtagaattgacctacacagaaaggaaattgcctaggcaatagatgcagattacactttccattttaccagaacaaaagtttttttttttttaaataagtagaatgacagttcaagttagcaatatatagaaatccatccatacaatgaccaaaataaataaataaataaaactcaatcatgactttggcagagataaaacattgacaagggtgtgcatttgtggagagaagcagtgggtttccccccaaaatccatacaaataaatgactattccagaactcaagaagcagctattatagaaaaaaaaattaaaaaccacagctattgaaaaattaaaacggcaagagaaaaaaagaaacaactcctgcataatgtttaaataaaaatgttattttaatagcatcatgaatggtcttaaggcaaaaatttcagattagcaaaatgtgatgacatatttattaagattgtattattggaaatgtagacactggactagtatgcctcattatgagctttactgagccatttgcatctctaagaaatatgattttaaaggcccaaagtaggaaggatctgcagggggtcacctgaagcagtgccctgactccaaatggctgataactgagctaatccaaggagaggcgttcagttgttctcttattatagatttccttgggtgggaacatgacaaccccgcctcctctagccatgacgtggcagccaaaaagttcttcctgtatctctggcccacaggactgtagtgtgtttgggaacagtgctgaaattgcaagtgatgtaggcctgacctccagagcccagcgttcagttagttgtataaaatggggcttaggaaccgaagctgatgaagttccaaaagtagttcagtttgatgggataaggaagcaaggagagccaggcattagctgcaaaaggagcttgcagagagatggctgacactttatgggaagattcctcagtcagccaaaagcttttcaaagagtttggtgcagaggtagctcagagccaaccatccaggaccgaagaaagctcatgtgctgattgacacatagctatccaggtgagtcggctccttctatgaggcttttcaatcgtctctccctttggatctctggcattccagaaagactgggaattcatttctgaaaatgatgaacctccgctgaaacggggaggaaatctcttacacacatacagcagggtcctgcccactggtaaagtgagacgttgggtagggggtgtaactggggaggaggtgaaggaaattatccctgccatggggagtgttattcaggaacataaaaattagagcattccctctgatggcagtgcttgacggggtgcagggaacaaactggggagcgttcaaacatgccagtggtttctcagcagggctggaaactggccacagtcctgaagatgcttcttgtgacaacttagagtcactgggagtcacacagctcctgtgtagccgcctttgctcctctgtgttaaaacccagtcagttcaaaataacaatcaaatggaaggccatgggggaagggttccttccaccatataacccacacccagatgtatataaacgcatatacatacatatacccgtgtgtgtgtgtgtgtgtgtgtgtgtgtgtgtgaatactgaagagccagacaacaaactatttagtaagaatcaacagtgactgtcaattgttctcagatttggcatggatactatttctcatgaaataatgtcattaaagtatttcctcctctaaatatttcctgaagatcataaaccatgggttatagcaccttgttttccagctagtcaatatacaactattaggtgctgtgccccaaaatatctaaaatgggggtaaagatataaactattaagccatgaaatctaattttctggggaccatgcatttgcctggattttccaggattttatggctgatagacccaaattattagtcttgataaacaacctgaaccaaacatttataaagtcccttcctctcccatgggaatggaatgctcagactcctgctgagggagacaccagcaagcctcttgagaaggcaccagacagtgaactctgtggtcacatgaagggaggttcagatgctagacgaccagcgtatgacctggaaccattgaggattgcaaccgctgcctccagggtccagatgtgctgcagtagagggcagagcacaggaatcaagaagcagctgccacaccaaagaactgatgcttaaacacacaggtgtgttgcatttgagagaaggcaagaagaaaagacaatagaaggttaccctggaaaaacaacacctagcaaacctcagaatactccatgtgtcccaagagaaggaataattgtctttctagctgttatatattgcacactggccaggataaattcccagactataataatcctgactatgtagacggaagtttctatttataaagtcatgcagggggaaagttgattaatttttgtcccattgccacatctgtagactaagtaatttttaacttgctaacttttagaatgtccacctttgtgcattttggtagcattcttgtttcattattttagaaaggggtcttcccattactgggatgtcggggccctgtcagagaactattattaaggctctgtgagggaactgttcagtctcacagcaaggaccacagagcgtggtttcatctgaaccctacaagtcagggacaccagtgtgttttctactcgagttacctaaaaatggtctcaattttccatttcattctctgtaaatgacacaatagatggtttatagactcagcagccctcaccttttattaaaattatatatgtgtgatgtaatgcatatcacctgtcatgtaaagggacggtatggatggtggaaaagttatgctaaaatatggattgcagatatttttgtatgtaatataggcaatataatgaaacaccgagttttttaaagtgaaagcatgcaaaatcgtagcttttaaatgtacagacatcccactcaaaaatatctaaactgatagtgggaaaaacatttgagacctagtaacatcatgaaatgcactgaatttggaattctggcctagaaaggctgtggcttatgttgggattgatgatggaatctgccagaacattttcatcttattcttcttgacttttggatttttttcttttctttttttctggaaatatttcggaaataaagtgacttcatttttcagcataaaagtatattctaaccacagggtaacacatcgtttttaacatgaaaataaacatttaaacattcttcagttgtttcattattttatctgcatgttccataaagcagctgtatggttggctataatatagatttattttttcttttcagccagagattttaatacccttgatgcagtaataaatggacatcaaaagaaaacatttcttaaaagttgccaacgtattttaccttgaaaacatttcttatttgttatcctagtaggctggggaaagcttctctccagatgtctcagaaaaagatctcctgtttctcatggccccgtccagggtcaaaccatgttgaaagtcagtgctgaaatgcatgatgctgcgggtgtttgagagcctttgacctctgtccaccctttggtctttgctcgtcaatggcttggtcttgtatatgtatctggggcaggggctttgtactgggcccagggtgctgagctttccagaacaggcagagctctagagacctaagaaaaccacaggacaggcggggattctttttgagaggctgaagtagatgtttcagctgaaagatgggtggtacacttgccaagtgcctagaggggctagaggctctctgttggtgtgtgtgtatttcttgaaactgcagagtcatttttggcatgctggcaaatgctactccttgcttttaggatgaatagggatgcctctttggcgataatttgacgtgtcataataaatgcccaataccaaacctagtctttctccaggcccttcagacatcattcaggtaactgggtgtaaacacaggagttggctttgtgaaactgaggcaggatttcctgcctctaaactattggcagcaaaagagccaaaaatgtgctcccaggtgcaaaaccccagccccatcagaattgcttctcagcactttgggtaactgttttgcactaacagcttcctccttgtcttttccctgggaacatgggagcactgacacagaactcaactggtccagccctttgggaggcccaggtgggcagatcacctgaagtcaggagtttgagaccagcctgggcaacatggtgaaaccctgtctctactaaaaatacaaaaattatccagtcgtggtggtgcatgcctgtagtcccagctactctggaggctgaggcaggagaatcacttgaacctgagaggtgaaggttgtagtgagccaagatcgtaccactgcactctggcctgggcaacaagagcgagactttgtctcaaacagaaacaaaacaagaaaaacaaaaagaacttaaccagttctccccagatctcagcgtgcatgcatatatagagtttagtaaaatgtgtttcaaaaaaagaaggataaaagaaagtttgaagtaagatttgtaaaagaatgaacactttaggttttgtgtgtgagtgcaaaatgtaaacacggcatttgaaattttttggtattgaaatccttaatgcctgttagtttctttatggttttatacaattgagataggttctgaagtttttttgttgtttgcttttagaaatttttaaaaatacaaaaaaaaagcgcagaaacattttcatctgggttactgtgtttatagactattctatgactcaagacaactaggacaccatcattttccagataagaaataacagttcaagttcattagggaaattatcttcccagtccaagcaagcaataatgttatcaacttacaatattggacaatcttcatattctatgagatgcctttaaaatttctttggatttaatgctgctcttggtcagttgttcaaatgaaacattgtaatttcatgttaacgacaagagtctcacgggagtctctttagatgctgcaggaactgagaggatagaagacctctctatacatctacattgcccattggagtaaagcactttacagagagatggatgccgctttgggatttggggtctatgtaatgctgatttttttcaaacctgtttggaaatattacttctttgggatggctgaaataacttttgacctgacacatctttctgtacttcctgtggccaaaaaagcaagtgagactttctgtttcccattgtaaggctggagctgaaatagtctgccacgttattgttatctcctttgtaagaatttgactttctgaatgaaataacagaatgccagtgtcaacactgaccatatgatatagttatttcacttagagatgcttcctcaaagagcgtgcctttttcctccatcataaccgctttaggatctctgttttatccatgtatttcccacatagtagaagcattttccatttccatgaatattacaggctgagaaggagcacacatctggcactgataagcacactggcccaggcactcagccttctcatttcattaatctggttggtgaccgtttccatcgggcacacctggaaatgtccatcggacatattgccatctcagttgctgcagtgcagtgaattaccccagagccaccagttcacatgcccaaagatgaactggcccatggagggacttgattgccaagtgacttcctttctgtagttatcctctgctgtgacccttattttggacttctagcaagggcattcagtgtggattccaagaacaaaaccaattgtccaacctccattacaggggtcttctaggtattccccacacattatttgtgggcataagcaaacaccataactatgaaaggctgagagtggagaattaagtcataaggaaatgatcaaacctagggaaaaataagtggctataaaacactgaaagatagtcacatccacatagcgtgtatcatgcaacagacccgtgctcttagagggaggtagtgtgtgtcttcccatggcaaataatttttacaatactgctcatgtttaatgtgtgtctacagggcatgctgttgtctcaaaattgaaatgtgcatcttaggtatcagttcccagcctcagactcttctcaggcaggtggaccggatctcagctgcagaacatagtgagtggccaaacctacacagcccagccagtagtgtgctttggggtgattgcaaggcagcaaacagtggggacaagttttgtctggcatttgaaaaggtgttatcccttactttccacatttctgaattggattcttgttccctggtaaacaccagatattataaacagagcatgctgttatgacattgtgcttctatatacctttttgtataatgtatctatctcattatattacctatggtttcagtatgatctgttgtgtatgttccaccgtatatttaatgtctctgtaaaggcacttccaaacattttgaaaacgaagaaataaaacatgttggatgatt

SEQ ID NO: 193560 - DNA, 9659 bp, Homo sapiens
  Payload ID: 18214
  Gene Name: transmembrane protein 132B
  Uniprot ID: Q14DG7
  ENST ID: ENST00000613307
  CDS Start-End: 220-1992
atagccaggtttccaaccaacctttcctgtgctggaaaggactcacagtcaagaaaggtgtagatcctgcagactgcgtggaggccatgctttcacatcaagccttcctcggtgacttgctcagcctgactgtgttcttatttgctgggtctctctctggaaatctccactttgagtgtttccaacaactgtgattccatttttgtgaatgggaaggaaatgaagagcaaagtggacacgattgtgaacttcacccaccagcacttcacctcccagttcgaggtcactgtctgggcacccaggctccccctgcagattgagatctcagacaccgagctgagccagatcaagggctggaggatcccggttgctgccaacagaaggcctacccgggaaagcgatgacgaggacgatgaggagaagaagggacgaggctgctccctgcagtaccagcacgccacagtgcgtgtcctcacccagtttgtggccgagtcacctgacttagggcagctgacctacatgctgggccccgactggcagtttgacatcactgaccttgtgaccgagttcatgaaggtggaggagccgaaaatcgctcagttacaggacggcaggaccctggctggtcgggagccgggaataaccacggtgcaggtcctctcgccgttgtctgactccatcctggctgagaagacggtgattgtcctggatgaccgagtcaccatcgcggagctgggagtgcagctcgtagctggcatgtctctctccctgcagccacaccgagcagacaaaagggccatcgtctccacagctgctgccctggatgttcttcagtccccacagcaggaagcaatagtaagttcttggattttgttcagtgatggttcggtgacacctttagacatttacgatcctaaggattattctgttactgtctcatcattggatgaaatggtggtgtctgtccaggcaaaccttgagtccaaatggccaattgtggttgcagagggtgaaggacaagggcctttgattaagttagaaatgatgataagtgaaccttgtcagaagaccaagaggaagagtgttcttgccgtgggtaaaggaaatgtcaaggtcaaattcgaaccaagtagtgatgagcaccaaggaggcagcaatgatattgagggcataaatcgggaatataaagaccacctcagtaattccatagagcgcgaaggaaaccaggagagagcagtccaggaatggttccaccgtggcacacctgttggccaagaggaaagtaccaacaaaagcacaaccccccagtctcccatggaagggaagaataagttactcaaaagtggtggtccagatgcctttacaagcttccccactcaagggaagtcaccggaccccaataatcctagtgacctcacagtgacctcaagggggctaacggacttggagattggcatgtatgccttgctctgcgtcttctgtctggccattctggtcttcttgatcaactgcgtggcgtttgcctggaaatacagacacaaaaggtttgctgtgagtgagcagggcaacatcccccattcccacgactgggtctggcttgggaatgaagtggaacttttggagaaccctgttgacattacactcccatcagaggagtgcacaaccatgatagacaggggcctgcagttcgaggagaggaacttccttctgaatggcagttcccagaagacttttcatagtcaactactcagaccctctgactatgtctatgagaaagaaattaaaaatgaacctatgaattcttcgggcccaaagaggaagagagtcaagttcacttcctacaccaccatcctcccagaggacggcggcccatacaccaactccatcctgtttgacagcgatgataacatcaagtgggtctgccaagatatggggctgggggattcacaggactttagagactatatggaaagtctgcaagaccagatgtaaactcctttcttatgtttgtattcacctttatgccttctgttttttgaatgctggagcagtgagtttgatcagcaataggggatgatttaacaaagtttgatttgtggaggtctggtgggattcatttctaagcaggtaaaagaggtttggagagctatagaagctgggttttaagtttggaaatgcctctaaaacagccacatgtggggactggagaaattctaagacaacagttttatggactgcctggtacgagctcagtgcaaatgtattaaacctgaccccacagacattgttagtcatctcgtgacaaatggccatgtggaattagaaaagatttgggtgttgatttttctatttctagaccttttaaagcacagtggacacttattgccccttggcctgagtttagacatacatgaaagatgactgaatgtagctatcctgatttgtcatgagcgctgctcattatttttatatacatttgcacctgcacctgttcctttgacctctggaattctttttgaaacatgaagagaagaaatttcagtcttttccttgagctctgtttgatttacacatgagttttcttccctgggatttgccatgccatgttatttcctgggtctccatgcaggatgtcaggtttttccagttttctgcacttcatcatctagggatggtatccaagaagcttattctcactttgttttttccttccttttgttgttgaactttcttgtataacactgggacaaagggttttacttaaaatgttaatatacagtgagggagggccatctctttactgttttctatgtgaagtttcaaacatttggaaaaaagttgtcaatcacaaacatttatttttattctctgcttgttgaaaactcatggggaactcctggagtgcatttctgagggtaaaaaggccccaacatagctgtatttatacaagtgctttgtggccaacacaatttactatccaaactgaagtcttaaagtagaattgacctacacagaaaggaaattgcctaggcaatagatgcagattacactttccattttaccagaacaaaagtttttttttttttaaataagtagaatgacagttcaagttagcaatatatagaaatccatccatacaatgaccaaaataaataaataaataaaactcaatcatgactttggcagagataaaacattgacaagggtgtgcatttgtggagagaagcagtgggtttccccccaaaatccatacaaataaatgactattccagaactcaagaagcagctattatagaaaaaaaaattaaaaaccacagctattgaaaaattaaaacggcaagagaaaaaaagaaacaactcctgcataatgtttaaataaaaatgttattttaatagcatcatgaatggtcttaaggcaaaaatttcagattagcaaaatgtgatgacatatttattaagattgtattattggaaatgtagacactggactagtatgcctcattatgagctttactgagccatttgcatctctaagaaatatgattttaaaggcccaaagtaggaaggatctgcagggggtcacctgaagcagtgccctgactccaaatggctgataactgagctaatccaaggagaggcgttcagttgttctcttattatagatttccttgggtgggaacatgacaaccccgcctcctctagccatgacgtggcagccaaaaagttcttcctgtatctctggcccacaggactgtagtgtgtttgggaacagtgctgaaattgcaagtgatgtaggcctgacctccagagcccagcgttcagttagttgtataaaatggggcttaggaaccgaagctgatgaagttccaaaagtagttcagtttgatgggataaggaagcaaggagagccaggcattagctgcaaaaggagcttgcagagagatggctgacactttatgggaagattcctcagtcagccaaaagcttttcaaagagtttggtgcagaggtagctcagagccaaccatccaggaccgaagaaagctcatgtgctgattgacacatagctatccaggtgagtcggctccttctatgaggcttttcaatcgtctctccctttggatctctggcattccagaaagactgggaattcatttctgaaaatgatgaacctccgctgaaacggggaggaaatctcttacacacatacagcagggtcctgcccactggtaaagtgagacgttgggtagggggtgtaactggggaggaggtgaaggaaattatccctgccatggggagtgttattcaggaacataaaaattagagcattccctctgatggcagtgcttgacggggtgcagggaacaaactggggagcgttcaaacatgccagtggtttctcagcagggctggaaactggccacagtcctgaagatgcttcttgtgacaacttagagtcactgggagtcacacagctcctgtgtagccgcctttgctcctctgtgttaaaacccagtcagttcaaaataacaatcaaatggaaggccatgggggaagggttccttccaccatataacccacacccagatgtatataaacgcatatacatacatatacccgtgtgtgtgtgtgtgtgtgtgtgtgtgtgtgtgaatactgaagagccagacaacaaactatttagtaagaatcaacagtgactgtcaattgttctcagatttggcatggatactatttctcatgaaataatgtcattaaagtatttcctcctctaaatatttcctgaagatcataaaccatgggttatagcaccttgttttccagctagtcaatatacaactattaggtgctgtgccccaaaatatctaaaatgggggtaaagatataaactattaagccatgaaatctaattttctggggaccatgcatttgcctggattttccaggattttatggctgatagacccaaattattagtcttgataaacaacctgaaccaaacatttataaagtcccttcctctcccatgggaatggaatgctcagactcctgctgagggagacaccagcaagcctcttgagaaggcaccagacagtgaactctgtggtcacatgaagggaggttcagatgctagacgaccagcgtatgacctggaaccattgaggattgcaaccgctgcctccagggtccagatgtgctgcagtagagggcagagcacaggaatcaagaagcagctgccacaccaaagaactgatgcttaaacacacaggtgtgttgcatttgagagaaggcaagaagaaaagacaatagaaggttaccctggaaaaacaacacctagcaaacctcagaatactccatgtgtcccaagagaaggaataattgtctttctagctgttatatattgcacactggccaggataaattcccagactataataatcctgactatgtagacggaagtttctatttataaagtcatgcagggggaaagttgattaatttttgtcccattgccacatctgtagactaagtaatttttaacttgctaacttttagaatgtccacctttgtgcattttggtagcattcttgtttcattattttagaaaggggtcttcccattactgggatgtcggggccctgtcagagaactattattaaggctctgtgagggaactgttcagtctcacagcaaggaccacagagcgtggtttcatctgaaccctacaagtcagggacaccagtgtgttttctactcgagttacctaaaaatggtctcaattttccatttcattctctgtaaatgacacaatagatggtttatagactcagcagccctcaccttttattaaaattatatatgtgtgatgtaatgcatatcacctgtcatgtaaagggacggtatggatggtggaaaagttatgctaaaatatggattgcagatatttttgtatgtaatataggcaatataatgaaacaccgagttttttaaagtgaaagcatgcaaaatcgtagcttttaaatgtacagacatcccactcaaaaatatctaaactgatagtgggaaaaacatttgagacctagtaacatcatgaaatgcactgaatttggaattctggcctagaaaggctgtggcttatgttgggattgatgatggaatctgccagaacattttcatcttattcttcttgacttttggatttttttcttttctttttttctggaaatatttcggaaataaagtgacttcatttttcagcataaaagtatattctaaccacagggtaacacatcgtttttaacatgaaaataaacatttaaacattcttcagttgtttcattattttatctgcatgttccataaagcagctgtatggttggctataatatagatttattttttcttttcagccagagattttaatacccttgatgcagtaataaatggacatcaaaagaaaacatttcttaaaagttgccaacgtattttaccttgaaaacatttcttatttgttatcctagtaggctggggaaagcttctctccagatgtctcagaaaaagatctcctgtttctcatggccccgtccagggtcaaaccatgttgaaagtcagtgctgaaatgcatgatgctgcgggtgtttgagagcctttgacctctgtccaccctttggtctttgctcgtcaatggcttggtcttgtatatgtatctggggcaggggctttgtactgggcccagggtgctgagctttccagaacaggcagagctctagagacctaagaaaaccacaggacaggcggggattctttttgagaggctgaagtagatgtttcagctgaaagatgggtggtacacttgccaagtgcctagaggggctagaggctctctgttggtgtgtgtgtatttcttgaaactgcagagtcatttttggcatgctggcaaatgctactccttgcttttaggatgaatagggatgcctctttggcgataatttgacgtgtcataataaatgcccaataccaaacctagtctttctccaggcccttcagacatcattcaggtaactgggtgtaaacacaggagttggctttgtgaaactgaggcaggatttcctgcctctaaactattggcagcaaaagagccaaaaatgtgctcccaggtgcaaaaccccagccccatcagaattgcttctcagcactttgggtaactgttttgcactaacagcttcctccttgtcttttccctgggaacatgggagcactgacacagaactcaactggtccagccctttgggaggcccaggtgggcagatcacctgaagtcaggagtttgagaccagcctgggcaacatggtgaaaccctgtctctactaaaaatacaaaaattatccagtcgtggtggtgcatgcctgtagtcccagctactctggaggctgaggcaggagaatcacttgaacctgagaggtgaaggttgtagtgagccaagatcgtaccactgcactctggcctgggcaacaagagcgagactttgtctcaaacagaaacaaaacaagaaaaacaaaaagaacttaaccagttctccccagatctcagcgtgcatgcatatatagagtttagtaaaatgtgtttcaaaaaaagaaggataaaagaaagtttgaagtaagatttgtaaaagaatgaacactttaggttttgtgtgtgagtgcaaaatgtaaacacggcatttgaaattttttggtattgaaatccttaatgcctgttagtttctttatggttttatacaattgagataggttctgaagtttttttgttgtttgcttttagaaatttttaaaaatacaaaaaaaaagcgcagaaacattttcatctgggttactgtgtttatagactattctatgactcaagacaactaggacaccatcattttccagataagaaataacagttcaagttcattagggaaattatcttcccagtccaagcaagcaataatgttatcaacttacaatattggacaatcttcatattctatgagatgcctttaaaatttctttggatttaatgctgctcttggtcagttgttcaaatgaaacattgtaatttcatgttaacgacaagagtctcacgggagtctctttagatgctgcaggaactgagaggatagaagacctctctatacatctacattgcccattggagtaaagcactttacagagagatggatgccgctttgggatttggggtctatgtaatgctgatttttttcaaacctgtttggaaatattacttctttgggatggctgaaataacttttgacctgacacatctttctgtacttcctgtggccaaaaaagcaagtgagactttctgtttcccattgtaaggctggagctgaaatagtctgccacgttattgttatctcctttgtaagaatttgactttctgaatgaaataacagaatgccagtgtcaacactgaccatatgatatagttatttcacttagagatgcttcctcaaagagcgtgcctttttcctccatcataaccgctttaggatctctgttttatccatgtatttcccacatagtagaagcattttccatttccatgaatattacaggctgagaaggagcacacatctggcactgataagcacactggcccaggcactcagccttctcatttcattaatctggttggtgaccgtttccatcgggcacacctggaaatgtccatcggacatattgccatctcagttgctgcagtgcagtgaattaccccagagccaccagttcacatgcccaaagatgaactggcccatggagggacttgattgccaagtgacttcctttctgtagttatcctctgctgtgacccttattttggacttctagcaagggcattcagtgtggattccaagaacaaaaccaattgtccaacctccattacaggggtcttctaggtattccccacacattatttgtgggcataagcaaacaccataactatgaaaggctgagagtggagaattaagtcataaggaaatgatcaaacctagggaaaaataagtggctataaaacactgaaagatagtcacatccacatagcgtgtatcatgcaacagacccgtgctcttagagggaggtagtgtgtgtcttcccatggcaaataatttttacaatactgctcatgtttaatgtgtgtctacagggcatgctgttgtctcaaaattgaaatgtgcatcttaggtatcagttcccagcctcagactcttctcaggcaggtggaccggatctcagctgcagaacatagtgagtggccaaacctacacagcccagccagtagtgtgctttggggtgattgcaaggcagcaaacagtggggacaagttttgtctggcatttgaaaaggtgttatcccttactttccacatttctgaattggattcttgttccctggtaaacaccagatattataaacagagcatgctgttatgacattgtgcttctatatacctttttgtataatgtatctatctcattatattacctatggtttcagtatgatctgttgtgtatgttccaccgtatatttaatgtctctgtaaaggcacttccaaacattttgaaaacgaagaaataaaacatgttggatgattccttgt

SEQ ID NO: 193561 - DNA, 4947 bp, Homo sapiens
  Payload ID: 18215
  Gene Name: transmembrane protein 132C
  Uniprot ID: Q8N3T6
  ENST ID: ENST00000435159
  CDS Start-End: 1-3327
atgcgctccgagggtgcggcccccgggccggcggcgccgctgtgcggggcgctgagcctgctgctgggcgcgctgctgggcaaagtgatagagggtcacggggtcacagacaacatacagagattctcctcactgccaccttacctacctgtgagctaccacatcctcagagcagagacctccttcttcctcaaggaagccaaccaggacctgctgcggaactccagcctgcaggcgagggtggagtccttctttacctacaaaaccaggcagcccccagtgctcaatgccagctatggacccttttctgtggagaaggttgtgcctctggacttgatgttgacttcaaactttttaggtccaaccaataagtttagttttgattggaaactaaaagcccacatcctgcgggacaaagtctacctgagccggcccaaagtgcaggttcttttccacatcatgggcagagactgggatgaccacggcgccggggagaagctgccatgcctgagggtctttgctttccgagaaaccagagaggtgcggggcagctgccggctgaagggggacctggggctgtgtgtggctgagctggagctcctgtccagctggttcagtgccccgacggtgggtgccgggaggaagaagtccatggaccagccggaggggacccctgtggagctctactacaccgtgcacccaggaaacgagcgaggggactgtgccgggggtgacttcaggaagggcaacgccatccgtccaggaaaggatgggctggaggaaaccacgtcccacctgcagaggatcggcaccgtcggcctttaccgggcccaggacagcgcccagctcagcgagctgcgtttggatggtaacgtggtcatctggctgccttccaggccagtcaagcagggagaggtggtcacggcctatgtcaccatctcgagcaattcctctgtggacctcttcatcttgagagccaaggtgaagaagggggtgaacatcctgagtgctcagacccgtgagccccggcagtggggcgtcaagcaggaggtgggcagcggcggaaagcacgtgacggccaccgtggcctgccagcgcctggggcccagcccacgcaacaggagcagcagtttattcaatgaggttgtgcagatgaactttgaaatagccagtttcagcagcctttcagggactcagcccatcacgtggcaggtggagtacccacggaaggggaccacagacatcgccgtgtccgagatctttgtcagccagaaggacctggtgggcatcgttcccttggctatggacactgaaattctgaacaccgccgtactcacaggaaagacagttgccatgcctatcaaggtggtctctgtggaggagaacagtgccgtgatggacatctcagagtcggtggagtgcaagtccacagacgaggacgttatcaaagtgtctgagcgctgtgactacatctttgtcaatggcaaagagatcaaaggaaagatggatgcggtggtgaacttcacataccagtacctgagcgcccccctgtgtgtcaccgtgtgggtgccccggctgcccctgcagatcgaggtctctgacacggagctcagccagataaagggctggagggtccccattgtgaccaataagaggcccactcgtgagagcgaggatgaggacgaggaggagcggcggggccggggctgcgcactgcaataccagcacgccaccgtgcgggtcctcacccagtttgtgtctgagggcgccggtccatggggccagccgaactacctgcttagtcctaactggcagttcgacatcactcacctggtggcagacttcatgaagctggaggaacctcacgtggccaccctccaggacagccgggtcctggttgggcgagaggttgggatgacgaccatccaggtgttgtctccactgtctgactccatcctggcagagaagacaataaccgtgctagatgacaaagtatcggtgacagacttggccatccagctcgtggctgggctgtctgtcgccctttaccccaacgcagaaaacagcaaggccgtaacagctgtggtcacagctgaggaggtgctgcggacccccaaacaggaggctgtattcagcacgtggctgcagttcagtgatggctctgtgacgcccctggacatctacgacaccaaggacttctccctggcagccacctcccaggacgaggctgtcgtgtcagtcccccagccccgctctcccaggtggcccgttgtggtggccgaaggggaaggccagggcccactgatccgagtggacatgacgatcgccgaggcctgccagaaatctaaacgcaagagcatcctggctgtgggcgtcggcaacgtcagggtcaagttcggacagaacgatgctgactccagccccggcggggactatgaggaagatgagatcaagaaccacgccagcgaccgccggcagaagggccagcaccatgagcgcacaggccaagatgggcacctctatggcagctctcccgtggagcgtgaggaaggggctctccgaagagccactaccacggccaggtccctgctggacaacaaagtggtgaagaacagtcgggcagacgggggcaggctggcaggagaggggcagctgcagaacatccccattgacttcaccaacttccctgcccacgtggacctccccaaggccgggagtgggctggaggaaaacgacctggtgcagactccgcggggcctgagtgatctggagatagggatgtacgccctcctgggggtgttctgcctggccatcctcgtcttcctgatcaactgcgccacctttgccctgaagtacaggcacaagcaagtgcccctggaaggtcaggcctccatgacccactctcacgactgggtgtggcttggcaatgaggccgaactcctggagagcatgggggatgcgccgccgccccaggacgagcacaccaccatcatagaccgcggaccgggggcctgcgaggagagcaaccatctcctgctcaatggtggctcccacaagcacgtgcagagccagattcacaggtcagccgactccggggggcggcagggcagagaacagaagcaggaccccctgcactcgcccacctccaagaggaagaaggtgaaatttaccacctttaccaccatccccccggacgacagctgccccacggtgaactccatcgtcagcagcaatgatgaggacatcaaatgggtgtgtcaagacgtggctgtgggtgcccccaaggaacttagaaactatctggagaaactcaaagataaggcttaggcccctctagccaaagggccctgcccagatgccttccttgtactggaaactggcccaagtggggcagaaggcgttgtcagtggggttaagaagggacggtcccagggtccatgctagaccagttggaaagttttgaagtcaggaaaagacgtttttgtatcaagggatttttagcagttaatggtggtggatttttaaaggtcaggggaataaagtctggggcatggggagtgcagaccaagttactgaactgcacaggcaaaattaggaaggttattttatgagtcaaaacatactacagacaagctaccaaaaattatttgttaaaaaatgcaacaagacaaataaaaagagaaataatcatctgtttatatttctaataaaggagcaaaatataaaaataggacctgctaagagacattttccattctaattcacgattcacttttccaaggacagccttcaactgtcaccacacagctgggggggagtcatttcttaacaagggatgcctcttgggatagaactagggagttttaaatctttacttgatcatcttttattttcttttccactttttccttttttctctctctctgtgtcctagacttccattgcatttatatttaatgtttatttctgagaatcaagcagtatatttttcctaaatgaaacataaattatattcctattcattagataggttcctaggaacaatgccaattaatccattgtttaagtagtaacttgaatgtttttctatatccctccagctttgttgatagtggcgggttttgtacaattggagggagccctcagagccttctgggggaggagaggaactgtccttaatccatcaccactaccatagggcaaagccagcaggtgtggccctgtgaggggctgtacagacgggatgtggccaggagaacagagccccacctggaccacctgacccctcgggattccacccctgtcatcgtggggatgttcctatatgggagaaagttgggttaaatcaaaaaagaggccacgcccaggtgtaatcagagccaacctggtgggcttggtctatcacaagacataactgatgctgaacatgaacaaagataaaaactgtttggagggtttttgagttgtttttcttatgttgttgggtggggtataccagcataaactctaaagataaaatctatgttagattgtcaatcaactgtgtttttgaacagcataattgtgtagcagcacattgcaaaaatgcattcatccaaagcgacacatgtggcaacgtagaccacgccagtgaaataagccccttcgtgatcacctgactccagttctccgtgtgctccattggctgcggctgcaggaggaagatgcctgacagccctcatgctctccgcaggggggcgctcacaaagatgccaggggtgtttattgtgtttatttttttaattactaaaatcagtagctaagaaagggtccttgaagcctcctaacctgggttggacctttgaaaaatatatttgtagcacatattatagatggaaagaagaagatatttatttatacctgtgatgccaattgtcattaaaaggcttttcatggcttgacaagtca

SEQ ID NO: 193562 - DNA, 5305 bp, Homo sapiens
  Payload ID: 18216
  Gene Name: transmembrane protein 132D
  Uniprot ID: Q14C87
  ENST ID: ENST00000389441
  CDS Start-End: 1242-3155
cgtttatagataccaaggatgaggatgtggatacctttcggagctattatttagtctcccacactctcccgaagacatgtcccaattcttgtttaggatgaaaactaaaggactcattgccttcccccaggaaagctaggagacaagacaagagaacaaaatccttacattgaacttgcttcttcccatcagcgctggcatggaggagccctcttgcaccaggtagaagttggcagcctgagctctggagccagacttctggggctaaatcctggctctgcccttcctggtagaggaacataggcaggctcccccactcctgccggcttcctcatctggaatgtgggaatggcagtggtgcctagcgttgtggttgttctgaggatgaaaggaatccgcatgtttggattccctgaaaagcggagcctgtgacgtgcacttgagaacaggtgctttatttggggaatgatctctggaggcagaatgagggagtgagcagcaagacaggacacattttggaaaaccagcaggaggtgcatcattgagctagctcgcatggtgggcaacttctgtgaagtcccatcgagcccctctagggaattctgcaggacaggcctcagaatccacccctgtgcctcgtcgagcccctctagggaactctgcaggacgggcctcagaatccaccccgtgcctgcaggggaaagtggtctgcacatgccctgttgaggacgttctcaggatacacccgcatgggagtgaagacagtagaaggggaagaagaggggctaagcaaggtcaggtccaggtgcagcacagccagctccttgaggagctcttaagaatgagctgtgctgtgcatgggtccctccttgaggcaaacagcctgggcttctcaccccaccaggtagtcactgggcagagaagcggggtgagcaggacataactcccgggtaactctgagggacacagctccactcacctaagggcagtcttctacggaagatgtggcaggagctgtcggcaacacacgcagcccctggggaggagtccaccaacctagccacagggaccccaggaagcctgggtactcagagagcacctttcataacagcgtctgctattattactcaaaagcaacacccaatgtctgctccataccaggacctcctcccccatagtaaggggaggaaagggaagcacctccaccagccagggcacttccctttcctcctccttgggccatgcaacgggatgaaagctcacctttccctccccttttctctctcacctcttcacaggtttctgacagatgtgactacgtctttgtcaatgggaaagaaatgaaaggcaaggtcaacgtggtggtgaacttcacctaccagcacctgagcagccccctggagatgacggtgtgggtgccccggcttccgctgcagatcgaggtctccgacaccgagctcaatcagatcaagggttggagagtgcccatcgtctccagcaggaggcctgccggggacagtgaagaggaggaggatgatgagcggaggggccgcggctgcaccctgcagtaccagcacgccatggtgcgggtcctgacgcagtttgtggctgaggcggccggccctgggggacacctggcccacctgctgggctcagactggcaagtggacatcacggagctgataaatgacttcatgcaggtggaggagcccaggatcgccaagctgcaaggcggacagatcctgatggggcaggagcttgggatgaccaccattcagatcctgtctcctctgtcagacaccatcctcgctgaaaagaccatcactgtgctggacgagaaggtgaccatcacagacctcggggtgcagctggtgacagggctgtcactctccttgcagctcagcccaggaagcaacagggccatctttgccactgcagtggctcaggaacttctgcagaggccaaaacaggaagcagccatcagttgctgggtccagttcagtgatggctcagtcacgcccttggatatttacgatgggaaagacttctccttgatggccacatctttggatgagaaggtagtctccatccaccaagaccccaaattcaagtggcctatcattgctgcggaaacagaaggacaaggcaccctggtcaaggtggaaatggttattagtgaatcctgccagaaatccaagcggaagagtgtgttagctgttggaacggcaaacatcaaagttaaatttggccaaaacgatgctaaccccaacaccagtgacagcagacacacaggggcaggggttcacatggaaaacaatgtcagtgacagaaggcccaaaaaaccctcgcaggaatgggggagtcaggaaggacagtactatggcagttcttctatgggactcatggagggacggggcaccacgacagacaggtccatcctgcagaagaagaaaggccaggaaagccttttagatgacaacagccacttgcagaccatccccagcgacctcaccagcttcccagcccaggtggacctccccagaagcaatggggaaatggatgggaatgaccttatgcaggcatccaaagggctgagcgacttagaaattgggatgtatgctttgttgggagtcttctgtttggccattttggtcttcttgataaactgtgtgacctttgcattaaaatacagacacaaacaggttcccttcgaggagcaggaagggatgagtcactctcatgactgggttgggttaagcaaccggacagagctgttggagaatcacatcaactttgcctcctcgcaagatgagcaaatcactgccattgacaggggcatggatttcgaggaaagtaaatatctcctcagcacaaactcccaaaaaagcatcaatgggcagctgttcaaacctttgggacccatcatcattgatgggaaagatcagaaaagtgagcccccaacatcccctacctcaaaaaggaaaagggtaaaatttaccaccttcaccgccgtctcctcagacgacgagtaccccaccaggaactccatcgtgatgagtagcgaggatgacattaagtgggtctgccaggatctggaccctggggactgcaaagagctgcacaactacatggagaggttacatgaaaatgtgtaagccagacacacacagacattggttctcactcacctttcagcctttaattccaggatgtgtagcaacggtgcccccggaagagaaacaaagcagcaggacaaaataaggatgacactatccatacagcctcagccaatgaccccggctcggcggcgaggcctggagtccgcatcgacgcacacattccagagtacagtgtcttgcttaagaggtttatcatgcatggcaagatttttaagacttgaaacaaaaacgagttctgaatcactgagcgtctgagagcgtccaggaaagaacagcctctctctctcgaatcaaagcaatttggatattgtaaaatccacatggctccaatattcaatattgcagactatggaagaaaagtacaactcaggtggagcatccatggatcgcatccatggatcaatgggaggaagcgtgtcatcgaaactggagcagcacatcttgctgtgagcgcgatcacaggcagtccagtgccgccgtcagctgtgggaggcatgattgtgagtcattgtctctcaaaggctgggccagagctgtctcagatcatggacaggccaaggaagtggctgacaaggactgaaagggaacatgtgggctaacaggccacaaatacctttgtaactacatgccaaggacaaacacatggacgcaaatcctctgagcccttcagggtacttctttatttgtaaactaaggatactgggcatagaatttgaatcaggttcaaagaaccacgctcttttgattcatatcaagttcacaatgtatccatttctattcctccactgcattgccatcctccccaaagccgttggtcacctgtgggtgggggagggagagggcagtttgtagtatttgctgggtcttttttctccccctgggttttgtgtcaactcccaagtgacattctgtagagaagctccccccgcaacctgggcatatgtcccacgccgtccgtctttgaagaggctggtctctaggcatgggcggtagtcacggtgaattccataccaggggatatacattcccttgctttactagaaagaaaacagggccacttgggatgggtctttcactgttcatggcagatctcctgtccaaagatgtggcctcgaggctgttgagacaaatcggggtgcctgtgtggaacgtgcagggcgtgtggagttgggggggttctgggtgtgaaagtggtggatccagcaggaagcccagcctcacacacaccggacagcacagaaaccttcttcatcttggaggtgcgaagggataaggggcatcagtgcatgtggtgaagatgcaggtttgcaagcacttggtcctgcagtcagccccgaaaggttcagcattgcttaagaccagccatgactctggatatccctgaatcccttcacttatgaagcctatgaagatgggggcaaggatacatcagagaattcctgcctcatctcacgctcactccaaggtagagaatggtgtgttgggtgattgccagccagataggatcctgcaaaagatggtcgggggcagcgggtggtgggcagaagaggccgtgctgttgaattgatcttctatttttccctctggtcattttctctctctctctgctcttcagttgtctgttttccagtctctctgtgtgtctgtctctgtatctctctcctcctttgaacctatcttctccctgcttcctctccatctcatctctgtaattttgagtgtgtgtctttactccttcttcctctccatagaattgaattctctttagatcatgtgtgtgtaaatttcaccagtttaccctcccaaccttagccctctcccctgcaactgtggtgctcttgagactgaggtttctgcagccagtaagtcacctgctcctgtccgcaagcttacctaccttgtttggttgggtgattaagctgtcaccccttttcaatgagaatcctttgctttcagtaacgtcctcatatttctttccattcttacctgtgtcatgttctgttgaatactgcagccgctgcccgcttccaaatccatctgcgtgtagaatgtactgtagattgtaagaatgtaatatatatttataaacttactgactgtaaatataaagtttgcattcagtggct

SEQ ID NO: 193563 - DNA, 5776 bp, Homo sapiens
  Payload ID: 18216
  Gene Name: transmembrane protein 132D
  Uniprot ID: Q14C87
  ENST ID: ENST00000422113
  CDS Start-End: 328-3627
ccactcttcgctcgggtaaacaggaaaggaaataccccctgtggattaaaatttaaaaaaaattctgttggggtcgaaggagggaggtggggtttgcctgcgcgcgtgttggactccggagagcaactcaggagcccgcgcggtcgtcgcctcccggcctggccatggactggcgggaagagggagcagggcgcccgggctgctcgggcccctagccgggcgctccctcgccaccggccccgctgcgggcctctaggggactgagacggtctcttgttcgcctggacggcgccggggagcggaggatctgcgctccgggtctccaggatgtgcccgtctgagatggggacgctgtggcaccactggtcgccggtactcatcagcctggccgccctgttttccaaagtgacggaaggtcgagggatccttgagagcatccagaggttttccttgctgcccacctacctccccgtgacctaccacatcaacaacgcggacgtctccttcttcctgaaggaggccaaccaggatatcatgaggaactccagcctgcagtcccgggtggagtcatttctgatttacaaatccaggaggctgcctgtcctcaatgccagctacgggcctttctccatcgagcaagtggtgccccaggatttaatgctaccttccaacccatttggattcaccaacaaattttctcttaactggaaactaaaagcccacatcctgcgggacaaagtctacctgagccggcccaaagtgcaggttctgttccacatcatgggcagagactgggacgaccgcagcgccggggagaagctgccgtgcctgagggtctttgctttccgagagacccgagaggtgcggggcagctgccggctgcagggggacctggggctgtgcgtggccgagctggagctcctgtccagctggttcagcccccccacggtggttgccgggaggaggaagtccgtggaccagccggaggggacccccgtggagctctactacaccgtgcacccagggggtgagagaggggactgcgtcagggaagacgcgaggagaagcaatgggatccggacaggccacagtgacatcgatgagtccgggccccccttgcagaggatcgggagcatcttcctttatcagacacacaggaaaccctccctgagagaactgcgtctggacaacagcgtggccatccactatataccaaagaccgtgaggaaaggagacgtgctgacttttcctgtttccatctccagaaattccactgaagatcgcttcacgttgagggcaaaggtgaagaaaggcgtgaacatcatcggcgtgcgagccagcagcccttccatttgggatgtcaaggagcgcacggattatactggaaagtatgcaccagctgtcatcgtttgtcagaagaaagcagctggctcagaaaacagtgcggatggcgcctcctacgaggtcatgcagatcgatgtggaggtggaagagcctggtgacctgccagccacacagctggtcacgtggcaggtcgagtaccccggagagatcacgtctgacttgggagtgtccaagatctatgtgagcccaaaggacttgattggagttgtgccgctggctatggaggcagaaatcctgaacacagccatcctcacggggaagacggtggccgtcccggtgaaagtggtctccgtggaggacgacggcacagtgacagagctgctggagtctgtggagtgtagatcgtctgatgaagacgtgattaaggtttctgacagatgtgactacgtctttgtcaatgggaaagaaatgaaaggcaaggtcaacgtggtggtgaacttcacctaccagcacctgagcagccccctggagatgacggtgtgggtgccccggcttccgctgcagatcgaggtctccgacaccgagctcaatcagatcaagggttggagagtgcccatcgtctccagcaggaggcctgccggggacagtgaagaggaggaggatgatgagcggaggggccgcggctgcaccctgcagtaccagcacgccatggtgcgggtcctgacgcagtttgtggctgaggcggccggccctgggggacacctggcccacctgctgggctcagactggcaagtggacatcacggagctgataaatgacttcatgcaggtggaggagcccaggatcgccaagctgcaaggcggacagatcctgatggggcaggagcttgggatgaccaccattcagatcctgtctcctctgtcagacaccatcctcgctgaaaagaccatcactgtgctggacgagaaggtgaccatcacagacctcggggtgcagctggtgacagggctgtcactctccttgcagctcagcccaggaagcaacagggccatctttgccactgcagtggctcaggaacttctgcagaggccaaaacaggaagcagccatcagttgctgggtccagttcagtgatggctcagtcacgcccttggatatttacgatgggaaagacttctccttgatggccacatctttggatgagaaggtagtctccatccaccaagaccccaaattcaagtggcctatcattgctgcggaaacagaaggacaaggcaccctggtcaaggtggaaatggttattagtgaatcctgccagaaatccaagcggaagagtgtgttagctgttggaacggcaaacatcaaagttaaatttggccaaaacgatgctaaccccaacaccagtgacagcagacacacaggggcaggggttcacatggaaaacaatgtcagtgacagaaggcccaaaaaaccctcgcaggaatgggggagtcaggaaggacagtactatggcagttcttctatgggactcatggagggacggggcaccacgacagacaggtccatcctgcagaagaagaaaggccaggaaagccttttagatgacaacagccacttgcagaccatccccagcgacctcaccagcttcccagcccaggtggacctccccagaagcaatggggaaatggatgggaatgaccttatgcaggcatccaaagggctgagcgacttagaaattgggatgtatgctttgttgggagtcttctgtttggccattttggtcttcttgataaactgtgtgacctttgcattaaaatacagacacaaacaggttcccttcgaggagcaggaagggatgagtcactctcatgactgggttgggttaagcaaccggacagagctgttggagaatcacatcaactttgcctcctcgcaagatgagcaaatcactgccattgacaggggcatggatttcgaggaaagtaaatatctcctcagcacaaactcccaaaaaagcatcaatgggcagctgttcaaacctttgggacccatcatcattgatgggaaagatcagaaaagtgagcccccaacatcccctacctcaaaaaggaaaagggtaaaatttaccaccttcaccgccgtctcctcagacgacgagtaccccaccaggaactccatcgtgatgagtagcgaggatgacattaagtgggtctgccaggatctggaccctggggactgcaaagagctgcacaactacatggagaggttacatgaaaatgtgtaagccagacacacacagacattggttctcactcacctttcagcctttaattccaggatgtgtagcaacggtgcccccggaagagaaacaaagcagcaggacaaaataaggatgacactatccatacagcctcagccaatgaccccggctcggcggcgaggcctggagtccgcatcgacgcacacattccagagtacagtgtcttgcttaagaggtttatcatgcatggcaagatttttaagacttgaaacaaaaacgagttctgaatcactgagcgtctgagagcgtccaggaaagaacagcctctctctctcgaatcaaagcaatttggatattgtaaaatccacatggctccaatattcaatattgcagactatggaagaaaagtacaactcaggtggagcatccatggatcgcatccatggatcaatgggaggaagcgtgtcatcgaaactggagcagcacatcttgctgtgagcgcgatcacaggcagtccagtgccgccgtcagctgtgggaggcatgattgtgagtcattgtctctcaaaggctgggccagagctgtctcagatcatggacaggccaaggaagtggctgacaaggactgaaagggaacatgtgggctaacaggccacaaatacctttgtaactacatgccaaggacaaacacatggacgcaaatcctctgagcccttcagggtacttctttatttgtaaactaaggatactgggcatagaatttgaatcaggttcaaagaaccacgctcttttgattcatatcaagttcacaatgtatccatttctattcctccactgcattgccatcctccccaaagccgttggtcacctgtgggtgggggagggagagggcagtttgtagtatttgctgggtcttttttctccccctgggttttgtgtcaactcccaagtgacattctgtagagaagctccccccgcaacctgggcatatgtcccacgccgtccgtctttgaagaggctggtctctaggcatgggcggtagtcacggtgaattccataccaggggatatacattcccttgctttactagaaagaaaacagggccacttgggatgggtctttcactgttcatggcagatctcctgtccaaagatgtggcctcgaggctgttgagacaaatcggggtgcctgtgtggaacgtgcagggcgtgtggagttgggggggttctgggtgtgaaagtggtggatccagcaggaagcccagcctcacacacaccggacagcacagaaaccttcttcatcttggaggtgcgaagggataaggggcatcagtgcatgtggtgaagatgcaggtttgcaagcacttggtcctgcagtcagccccgaaaggttcagcattgcttaagaccagccatgactctggatatccctgaatcccttcacttatgaagcctatgaagatgggggcaaggatacatcagagaattcctgcctcatctcacgctcactccaaggtagagaatggtgtgttgggtgattgccagccagataggatcctgcaaaagatggtcgggggcagcgggtggtgggcagaagaggccgtgctgttgaattgatcttctatttttccctctggtcattttctctctctctctgctcttcagttgtctgttttccagtctctctgtgtgtctgtctctgtatctctctcctcctttgaacctatcttctccctgcttcctctccatctcatctctgtaattttgagtgtgtgtctttactccttcttcctctccatagaattgaattctctttagatcatgtgtgtgtaaatttcaccagtttaccctcccaaccttagccctctcccctgcaactgtggtgctcttgagactgaggtttctgcagccagtaagtcacctgctcctgtccgcaagcttacctaccttgtttggttgggtgattaagctgtcaccccttttcaatgagaatcctttgctttcagtaacgtcctcatatttctttccattcttacctgtgtcatgttctgttgaatactgcagccgctgcccgcttccaaatccatctgcgtgtagaatgtactgtagattgtaagaatgtaatatatatttataaacttactgactgtaaatataaagtttgcattcagtggc

SEQ ID NO: 193564 - DNA, 5389 bp, Homo sapiens
  Payload ID: 18216
  Gene Name: transmembrane protein 132D
  ENST ID: ENST00000619366
  CDS Start-End: 1-3240
gcactgcgattccccacagtgacggaaggtcgagggatccttgagagcatccagaggttttccttgctgcccacctacctccccgtgacctaccacatcaacaacgcggacgtctccttcttcctgaaggaggccaaccaggatatcatgaggaactccagcctgcagtcccgggtggagtcatttctgatttacaaatccaggaggctgcctgtcctcaatgccagctacgggcctttctccatcgagcaagtggtgccccaggatttaatgctaccttccaacccatttggattcaccaacaaattttctcttaactggaaactaaaagcccacatcctgcgggacaaagtctacctgagccggcccaaagtgcaggttctgttccacatcatgggcagagactgggacgaccgcagcgccggggagaagctgccgtgcctgagggtctttgctttccgagagacccgagaggtgcggggcagctgccggctgcagggggacctggggctgtgcgtggccgagctggagctcctgtccagctggttcagcccccccacggtggttgccgggaggaggaagtccgtggaccagccggaggggacccccgtggagctctactacaccgtgcacccagggggtgagagaggggactgcgtcagggaagacgcgaggagaagcaatgggatccggacaggccacagtgacatcgatgagtccgggccccccttgcagaggatcgggagcatcttcctttatcagacacacaggaaaccctccctgagagaactgcgtctggacaacagcgtggccatccactatataccaaagaccgtgaggaaaggagacgtgctgacttttcctgtttccatctccagaaattccactgaagatcgcttcacgttgagggcaaaggtgaagaaaggcgtgaacatcatcggcgtgcgagccagcagcccttccatttgggatgtcaaggagcgcacggattatactggaaagtatgcaccagctgtcatcgtttgtcagaagaaagcagctggctcagaaaacagtgcggatggcgcctcctacgaggtcatgcagatcgatgtggaggtggaagagcctggtgacctgccagccacacagctggtcacgtggcaggtcgagtaccccggagagatcacgtctgacttgggagtgtccaagatctatgtgagcccaaaggacttgattggagttgtgccgctggctatggaggcagaaatcctgaacacagccatcctcacggggaagacggtggccgtcccggtgaaagtggtctccgtggaggacgacggcacagtgacagagctgctggagtctgtggagtgtagatcgtctgatgaagacgtgattaaggtttctgacagatgtgactacgtctttgtcaatgggaaagaaatgaaaggcaaggtcaacgtggtggtgaacttcacctaccagcacctgagcagccccctggagatgacggtgtgggtgccccggcttccgctgcagatcgaggtctccgacaccgagctcaatcagatcaagggttggagagtgcccatcgtctccagcaggaggcctgccggggacagtgaagaggaggaggatgatgagcggaggggccgcggctgcaccctgcagtaccagcacgccatggtgcgggtcctgacgcagtttgtggctgaggcggccggccctgggggacacctggcccacctgctgggctcagactggcaagtggacatcacggagctgataaatgacttcatgcaggtggaggagcccaggatcgccaagctgcaaggcggacagatcctgatggggcaggagcttgggatgaccaccattcagatcctgtctcctctgtcagacaccatcctcgctgaaaagaccatcactgtgctggacgagaaggtgaccatcacagacctcggggtgcagctggtgacagggctgtcactctccttgcagctcagcccaggaagcaacagggccatctttgccactgcagtggctcaggaacttctgcagaggccaaaacaggaagcagccatcagttgctgggtccagttcagtgatggctcagtcacgcccttggatatttacgatgggaaagacttctccttgatggccacatctttggatgagaaggtagtctccatccaccaagaccccaaattcaagtggcctatcattgctgcggaaacagaaggacaaggcaccctggtcaaggtggaaatggttattagtgaatcctgccagaaatccaagcggaagagtgtgttagctgttggaacggcaaacatcaaagttaaatttggccaaaacgatgctaaccccaacaccagtgacagcagacacacaggggcaggggttcacatggaaaacaatgtcagtgacagaaggcccaaaaaaccctcgcaggaatgggggagtcaggaaggacagtactatggcagttcttctatgggactcatggagggacggggcaccacgacagacaggtccatcctgcagaagaagaaaggccaggaaagccttttagatgacaacagccacttgcagaccatccccagcgacctcaccagcttcccagcccaggtggacctccccagaagcaatggggaaatggatgggaatgaccttatgcaggcatccaaagggctgagcgacttagaaattgggatgtatgctttgttgggagtcttctgtttggccattttggtcttcttgataaactgtgtgacctttgcattaaaatacagacacaaacaggttcccttcgaggagcaggaagggatgagtcactctcatgactgggttgggttaagcaaccggacagagctgttggagaatcacatcaactttgcctcctcgcaagatgagcaaatcactgccattgacaggggcatggatttcgaggaaagtaaatatctcctcagcacaaactcccaaaaaagcatcaatgggcagctgttcaaacctttgggacccatcatcattgatgggaaagatcagaaaagtgagcccccaacatcccctacctcaaaaaggaaaagggtaaaatttaccaccttcaccgccgtctcctcagacgacgagtaccccaccaggaactccatcgtgatgagtagcgaggatgacattaagtgggtctgccaggatctggaccctggggactgcaaagagctgcacaactacatggagaggttacatgaaaatgtgtaagccagacacacacagacattggttctcactcacctttcagcctttaattccaggatgtgtagcaacggtgcccccggaagagaaacaaagcagcaggacaaaataaggatgacactatccatacagcctcagccaatgaccccggctcggcggcgaggcctggagtccgcatcgacgcacacattccagagtacagtgtcttgcttaagaggtttatcatgcatggcaagatttttaagacttgaaacaaaaacgagttctgaatcactgagcgtctgagagcgtccaggaaagaacagcctctctctctcgaatcaaagcaatttggatattgtaaaatccacatggctccaatattcaatattgcagactatggaagaaaagtacaactcaggtggagcatccatggatcgcatccatggatcaatgggaggaagcgtgtcatcgaaactggagcagcacatcttgctgtgagcgcgatcacaggcagtccagtgccgccgtcagctgtgggaggcatgattgtgagtcattgtctctcaaaggctgggccagagctgtctcagatcatggacaggccaaggaagtggctgacaaggactgaaagggaacatgtgggctaacaggccacaaatacctttgtaactacatgccaaggacaaacacatggacgcaaatcctctgagcccttcagggtacttctttatttgtaaactaaggatactgggcatagaatttgaatcaggttcaaagaaccacgctcttttgattcatatcaagttcacaatgtatccatttctattcctccactgcattgccatcctccccaaagccgttggtcacctgtgggtgggggagggagagggcagtttgtagtatttgctgggtcttttttctccccctgggttttgtgtcaactcccaagtgacattctgtagagaagctccccccgcaacctgggcatatgtcccacgccgtccgtctttgaagaggctggtctctaggcatgggcggtagtcacggtgaattccataccaggggatatacattcccttgctttactagaaagaaaacagggccacttgggatgggtctttcactgttcatggcagatctcctgtccaaagatgtggcctcgaggctgttgagacaaatcggggtgcctgtgtggaacgtgcagggcgtgtggagttgggggggttctgggtgtgaaagtggtggatccagcaggaagcccagcctcacacacaccggacagcacagaaaccttcttcatcttggaggtgcgaagggataaggggcatcagtgcatgtggtgaagatgcaggtttgcaagcacttggtcctgcagtcagccccgaaaggttcagcattgcttaagaccagccatgactctggatatccctgaatcccttcacttatgaagcctatgaagatgggggcaaggatacatcagagaattcctgcctcatctcacgctcactccaaggtagagaatggtgtgttgggtgattgccagccagataggatcctgcaaaagatggtcgggggcagcgggtggtgggcagaagaggccgtgctgttgaattgatcttctatttttccctctggtcattttctctctctctctgctcttcagttgtctgttttccagtctctctgtgtgtctgtctctgtatctctctcctcctttgaacctatcttctccctgcttcctctccatctcatctctgtaattttgagtgtgtgtctttactccttcttcctctccatagaattgaattctctttagatcatgtgtgtgtaaatttcaccagtttaccctcccaaccttagccctctcccctgcaactgtggtgctcttgagactgaggtttctgcagccagtaagtcacctgctcctgtccgcaagcttacctaccttgtttggttgggtgattaagctgtcaccccttttcaatgagaatcctttgctttcagtaacgtcctcatatttctttccattcttacctgtgtcatgttctgttgaatactgcagccgctgcccgcttccaaatccatctgcgtgtagaatgtactgtagattgtaagaatgtaatatatatttataaacttactgactgtaaatataaagtttgcattcagtggc

SEQ ID NO: 193565 - DNA, 4369 bp, Homo sapiens
  Payload ID: 18217
  Gene Name: transmembrane protein 132E
  Uniprot ID: Q6IEE7
  ENST ID: ENST00000321639
  CDS Start-End: 329-3283
cccccgggacgcccgcggccaccgggctccggactgcacgtgcagctccccccgcgcctcgcagatcctgcagggggcaccagctgggggaggtggaggctcctcccgcccggagctgcgcccccaccggctccgagggtgtagccgccagcgcctgggacgccccctccccgcaaagtgtccccgaattgcactctctggtcccggagctgcatctgagacagccgggcgccacggcagccctgagttggatgtgaccaagcccagcctggggccaagtcgtcgtcgactgttgctctctcggacccctcccgcccccgcctcggccatggccccggggatgtcgggccgcggcggcgccgccctgctctgcctctcagcgctactcgcccacgcctctggccgctcccacccggccagccccagcccgccggggccgcaggccagcccggtgctgccagtcagctaccgcctgtcgcacacgcggctggccttcttcctgcgggaggcgcggcccccgtcacccgcggtcgccaacagctctctgcagcgctccgagcccttcgtggtgttccagaccaaggagctgccggtcctcaacgtctctctggggcccttcagcaccagccaggtggtggcgcgggagctcctgcagccgtccagcaccctggacatccccgagcgcctgacggtgaactggaaggtgcgggccttcatcgtccgctcgcacgtgcccgcctcgcagcccgtggtccaggtgctgttctacgtagccggccgggactgggacgacttcggcgtcaccgagcggctgccctgtgtccgcctgcatgccttccgggatgcccgggaacaccccctgctgcgcatcgggagcatcagcctgttccgcccgccccccaggaggaccctgcaggagcacaggctggacagcaacctgatgatccgcctgccagaccggcccctcaagcccggggaagtgctcagcatcctcctctatctggcccccaactcctcctcgccctccagccccagcgtggagcacttcacactcagggtgaaggccaagaagggtgtgacccttttaggtaccaagtcacggagtggccagtggcatgtgacctcggagctgctgactggggcaaagcactcaacagccaccgtggatgtggcctgggctcagagcacacccctgccccccagggagggccagggccccttggagatcttgcagctggactttgaaatggagaacttcaccagccagtcagtcaagcggaggatcatgtggcacattgactaccgtggccacggcgccctgcctgacctggagcgggcagtcactgagctgacggtcattcagcgggatgtgcaagccatcctgcccctggccatggacacagagatcatcaacacggccattctgactggccggacagtggccatccctgtcaaggtcattgccatcgaggtgaatggcctcgtcctggacatctccgccctagtggaatgcgagtctgacaatgaagacatcatcaaggtatccagcagctgtgactacgtgtttgtgagtggaaaagagtctcgagggtccatgaacgccagggtcaccttccgctacgacgtcctcaatgctcccctggaaatgacagtctgggtccccaagctgcccttgcacattgagctctcagatgcccgcctcagccaagtgaagggctggagggtacctatcctccccgaccggaggtcagtccgggaaagcgaggatgaggatgaggaggaggaggagcggcggcagagtgcaagccgtggctgcaccctgcagtaccagcatgccaccctgcaggtcttcacccagttccacacgacatcatccgagggcactgaccaggtggtcaccatgttaggcccggactggctggtggaggtcaccgacctagtcagtgacttcatgcgggtgggcgatccccgagtggcacacatggtggacagcagcacgctggcaggactggagccaggcaccaccccctttaaggtggtgtctccgctgacggaggctgtgctcggggagacgctgctgacggtgactgaggagaaggtcagcatcacacagcttcaggcccaggtggtggccagcctggccctctccctgcggcccagccctgggagcagccacaccatcctagccaccacagctgcccaacagaccttgagcttcctcaagcaggaagccctactgagcctctggctctcctacagtgatggcaccacagccccactctccctctacagcccacgagactatggactgctagtgagcagcctggatgagcatgtggccactgtgacccaggaccgggccttccctctggtagtggctgaggccgaggggtcaggggagctgcttcgcgcagagctaaccatcgctgagagctgccagaaaaccaaacgcaagagtgtgctcgccacgacccctgtgggcctgcgggtgcactttgggagggacgaggaggaccccacttatgactacccgggccccagccaaccagggcccggcgggggcgaggacgaggcccggggagctggcccgccgggctctgcgctacccgcaccggaggctccaggcccgggcaccgccagccccgtcgtgccacccacagaagacttcctgccgctgcccaccggcttcctgcaggtgccacggggtctgacagacctggagatcggcatgtacgcgctgctgggcgtcttctgcctcgccatcctcgtcttcctcatcaactgcatcgtttttgtgctgcgctaccggcacaagcgcatcccgcccgagggccagaccagcatggaccactctcaccactgggtgttcctgggcaacgggcagccgctgcgggtgcaaggagagctgtcgccgccagcaggcaacccgctggaaaccgtgcccgccttctgccacggcgaccaccacagcagcggcagctcgcagaccagcgtccagagccaggtgcacggcaggggcgacggctcctcgggcggctcagcccgagaccaagccgaggaccccgccagctcgcccacctccaagcgcaagcgggtcaagttcaccaccttcaccacgctgccgtcagaggagctggcctatgactcggtgcccgcgggcgaagaggacgaggaggaggaagaggacctgggttggggctgcccggatgtggcgggccccacgcggcccactgcacccccggacctgcacaattacatgcgcagaatcaaagagattgcatagaggcgccagccggagtagcagggacccccccccccaacggggtcagctcggggtaggacacagccgggaccccggttcacactgactctgggcggctgaattgattttgtactccctgcccctgcagcttggctccgtgcggagcgggccgcctcagtgtctgggccttccctcgcctcacgccattaccctcttctgccccctgcaggtggagggctcttcctccagtggctcgtaaggaggaaagcaaccccagcctctgttctgccctttccaaacctcctcccatcttaagcaaccccctgccccaagagtgaggcaaggaggtccagcttggggtcaggtgggcccacgctgtgtcccgggcccgcctcccgtcccccgtgtcgtccccctgtgcagggggttctgtgggggtcttgtgtcacaggctgcacaaagactttcctcaaactaatattcagggatttctgtcctgcagggtggggaggtggcagctgcctgccctgccaaggatcttgctgtggacgaaatatctgggggttagggggacagttgtagcatctgctggcattcgggtgcctcccaggacctgggagctgactctacagagaggtctggtgccaagccaggcaccttcctgagttctcaggactcccacctctgccccaagggctttgggcagggacctaaaggggaaagagtcctggatccatctctagccaaatcacaccccagagccagaggcctggggacctccttgccttccccgtcccccacagcaaggtcaacactactacgccttagccacccgtcaccctgctgactgcgacttccctctgcagcacagggcaggcagccacctatgccccacaagacggaacccgggaggggagtagagggcaccagggaatgctgtgagggacttcagggtgggcaaatgcagaagggagccagtgtcgcccctaccccatcccacagccatttttctctcgggttctacccaccactgtgtcggatttttcttaaataaatggaagcggtcagactggaggtgggggcagcagctcccatgaacagagagta

SEQ ID NO: 193566 - DNA, 4379 bp, Homo sapiens
  Payload ID: 18217
  Gene Name: transmembrane protein 132E
  ENST ID: ENST00000631683
  CDS Start-End: 69-3293
agcccagcctggggccaagtcgtcgtcgactgttgctctctcggacccctcccgcccccgcctcggccatggccccggggatgtcgggccgcggcggcgccgccctgctctgcctctcagcgctactcgcccacgcctctggccgctcccacccggccagccccagcccgccggggccgcaggccagcccggtgctgccagtcagctaccgcctgtcgcacacgcggctggccttcttcctgcgggaggcgcggcccccgtcacccgcggtcgccaacagctctctgcagcgctccgagcccttcgtggtgttccagaccaaggagctgccggtcctcaacgtctctctggggcccttcagcaccagccaggtggtggcgcgggagctcctgcagccgtccagcaccctggacatccccgagcgcctgacggtgaactggaaggtgcgggccttcatcgtccgctcgcacgtgcccgcctcgcagcccgtggtccaggtgctgttctacgtagccggccgggactgggacgacttcggcgtcaccgagcggctgccctgtgtccgcctgcatgccttccgggatgcccgggaagtcaagagctcctgccgcctcagcgggggcctggccacttgtctggtgcgggcagagctgcccctggcctggttcgggcccccagcccccgctgcgccacccacggcccgccgcaagtccccggacgggctggagcccgaggcgacgggggagagccagcaggccgagctctactacacgctccacgcccctgatgcgtcggggggctgcgggggctcccgccggggggccgggcccggggtgggggcccgagcggaaagccctacccagcaccccctgctgcgcatcgggagcatcagcctgttccgcccgccccccaggaggaccctgcaggagcacaggctggacagcaacctgatgatccgcctgccagaccggcccctcaagcccggggaagtgctcagcatcctcctctatctggcccccaactcctcctcgccctccagccccagcgtggagcacttcacactcagggtgaaggccaagaagggtgtgacccttttaggtaccaagtcacggagtggccagtggcatgtgacctcggagctgctgactggggcaaagcactcaacagccaccgtggatgtggcctgggctcagagcacacccctgccccccagggagggccagggccccttggagatcttgcagctggactttgaaatggagaacttcaccagccagtcagtcaagcggaggatcatgtggcacattgactaccgtggccacggcgccctgcctgacctggagcgggcagtcactgagctgacggtcattcagcgggatgtgcaagccatcctgcccctggccatggacacagagatcatcaacacggccattctgactggccggacagtggccatccctgtcaaggtcattgccatcgaggtgaatggcctcgtcctggacatctccgccctagtggaatgcgagtctgacaatgaagacatcatcaaggtatccagcagctgtgactacgtgtttgtgagtggaaaagagtctcgagggtccatgaacgccagggtcaccttccgctacgacgtcctcaatgctcccctggaaatgacagtctgggtccccaagctgcccttgcacattgagctctcagatgcccgcctcagccaagtgaagggctggagggtacctatcctccccgaccggaggtcagtccgggaaagcgaggatgaggatgaggaggaggaggagcggcggcagagtgcaagccgtggctgcaccctgcagtaccagcatgccaccctgcaggtcttcacccagttccacacgacatcatccgagggcactgaccaggtggtcaccatgttaggcccggactggctggtggaggtcaccgacctagtcagtgacttcatgcgggtgggcgatccccgagtggcacacatggtggacagcagcacgctggcaggactggagccaggcaccaccccctttaaggtggtgtctccgctgacggaggctgtgctcggggagacgctgctgacggtgactgaggagaaggtcagcatcacacagcttcaggcccaggtggtggccagcctggccctctccctgcggcccagccctgggagcagccacaccatcctagccaccacagctgcccaacagaccttgagcttcctcaagcaggaagccctactgagcctctggctctcctacagtgatggcaccacagccccactctccctctacagcccacgagactatggactgctagtgagcagcctggatgagcatgtggccactgtgacccaggaccgggccttccctctggtagtggctgaggccgaggggtcaggggagctgcttcgcgcagagctaaccatcgctgagagctgccagaaaaccaaacgcaagagtgtgctcgccacgacccctgtgggcctgcgggtgcactttgggagggacgaggaggaccccacttatgactacccgggccccagccaaccagggcccggcgggggcgaggacgaggcccggggagctggcccgccgggctctgcgctacccgcaccggaggctccaggcccgggcaccgccagccccgtcgtgccacccacagaagacttcctgccgctgcccaccggcttcctgcaggtgccacggggtctgacagacctggagatcggcatgtacgcgctgctgggcgtcttctgcctcgccatcctcgtcttcctcatcaactgcatcgtttttgtgctgcgctaccggcacaagcgcatcccgcccgagggccagaccagcatggaccactctcaccactgggtgttcctgggcaacgggcagccgctgcgggtgcaaggagagctgtcgccgccagcaggcaacccgctggaaaccgtgcccgccttctgccacggcgaccaccacagcagcggcagctcgcagaccagcgtccagagccaggtgcacggcaggggcgacggctcctcgggcggctcagcccgagaccaagccgaggaccccgccagctcgcccacctccaagcgcaagcgggtcaagttcaccaccttcaccacgctgccgtcagaggagctggcctatgactcggtgcccgcgggcgaagaggacgaggaggaggaagaggacctgggttggggctgcccggatgtggcgggccccacgcggcccactgcacccccggacctgcacaattacatgcgcagaatcaaagagattgcatagaggcgccagccggagtagcagggacccccccccccaacggggtcagctcggggtaggacacagccgggaccccggttcacactgactctgggcggctgaattgattttgtactccctgcccctgcagcttggctccgtgcggagcgggccgcctcagtgtctgggccttccctcgcctcacgccattaccctcttctgccccctgcaggtggagggctcttcctccagtggctcgtaaggaggaaagcaaccccagcctctgttctgccctttccaaacctcctcccatcttaagcaaccccctgccccaagagtgaggcaaggaggtccagcttggggtcaggtgggcccacgctgtgtcccgggcccgcctcccgtcccccgtgtcgtccccctgtgcagggggttctgtgggggtcttgtgtcacaggctgcacaaagactttcctcaaactaatattcagggatttctgtcctgcagggtggggaggtggcagctgcctgccctgccaaggatcttgctgtggacgaaatatctgggggttagggggacagttgtagcatctgctggcattcgggtgcctcccaggacctgggagctgactctacagagaggtctggtgccaagccaggcaccttcctgagttctcaggactcccacctctgccccaagggctttgggcagggacctaaaggggaaagagtcctggatccatctctagccaaatcacaccccagagccagaggcctggggacctccttgccttccccgtcccccacagcaaggtcaacactactacgccttagccacccgtcaccctgctgactgcgacttccctctgcagcacagggcaggcagccacctatgccccacaagacggaacccgggaggggagtagagggcaccagggaatgctgtgagggacttcagggtgggcaaatgcagaagggagccagtgtcgcccctaccccatcccacagccatttttctctcgggttctacccaccactgtgtcggatttttcttaaataaatggaagcggtcagactggaggtgggggcagcagctcccatgaacagagagta

SEQ ID NO: 193567 - DNA, 1953 bp, Homo sapiens
  Payload ID: 18218
  Gene Name: transmembrane protein 133
  Uniprot ID: Q9H2Q1
  ENST ID: ENST00000303130
  CDS Start-End: 321-710
ttcactatgttgtgaggcaaacagatttctcactatcatccagtgtaccctgctcaccttctcactcctagcaccgttcttctggtctgtgttgaaaagggtatcattcatgtggtttcagtttagaagagtccctcagagctttgcctcaagcaatttcaaattgtagtgataccttaaatcatgtattcaggatgccttctttagcatttagaaccccaactagacttatactttgactaaagtcagaggcagaccaatttagggaacagattttgttctttgcttttatgatacatttgtaactcacagctgttagcatgacctcacatcactgcgtaggacccggaaatcacatctcctggtcaggtcacgaaaaagaacacaggcttgactattgtccagaagttactttccccttgactaaaggtttccccttagggtacacattgctatttaactttgcctcctacccttttttgttaccttccaaaatcaagacacttttaagaaacaaagatagttttctgaacattctgtgtcctgcctgtctcctgttgattcgcagatgtaatatcgagtattcatcaactggtctcaatttcctgaacacattcactgtatccctcattgtcaccgttatccccctgcttcaaaatgtgccagttccacttggtaataacgttgggaaaatgcaggtttatgaatgatgtggacttttagaggatcaaatcaataaattggattttttattttttgagggcagctgccctcactgttttaaataaagaatcttacataagaatgttgacaacattcacagtaagccattggcagaaaattgatctgcatgtcctagaccaatgattacaaggtgtctgtggtttagggggcccagcccatcattccttttccccttggcactcatgagagagatgccaagttcagtgtggatttttcttggtgctctatggagaaatggagtctgtgtgcttactgaagagtcccaaaaaccagagaccattttcatttactgccatcataaatattctccaccattcaagatgcctgtgtacacggctatttgggaaacttaagtgttggaggaggcaggggctgaaggtgtcaaaacctcctcagtaggataacccctttctcccctttggaccatctgccatctttcatgagtgtttcccatggtgtttttgcatccagagttgacaacaactcaattttgccttgaatttactcagtcttataaattaaaaatgtgcattttatataaagatgcattttatataaaaatgcacacctttaatctctatatggcagcatatacatatatatatataaaatgcacacttttaatctctatatggcagcatttttgaggctttatatctgcccgtgtaccctcaactgcctcctttttgcagagaacgatccccacaggaactggtctaagaacactgtctgcacatgattgatgcttaaaatccaatataccaccacatatcaaaggttgggattttcagagtccttcttgatttctgagctgaaaccttaacaaatagggaatttggcagggaagacacctgggtttttaattcagaaccctatttatatactgttaaaatttgaggtactgtagtttatataaaagtcggatgttaagatattatatttcagtactaggagcttctttgcagtcattaacatgacaaattaagtaataaatataaaagtgattgtccataaattatcattgaattttttgtttattttgtagtgttctgtatttatctgcactttgtgtatatatacacacatacatatgccaacatgtaaataacctcatgtttattcctaatctaaattgccacaatatttttaatgtatggttacactgtgttttaaattactttaaaaataaactttgtaagcagattttaa

SEQ ID NO: 193568 - DNA, 3534 bp, Homo sapiens
  Payload ID: 18219
  Gene Name: transmembrane protein 134
  Uniprot ID: Q9H6X4
  ENST ID: ENST00000308022
  CDS Start-End: 43-630
cgcagatggcggcggcgcacggcgcctgagcgggccggggccatgagcgccgcccggccccagttcagcattgatgatgccttcgagctgtccctggaggacgggggccctgggcccgagtccagcggggtcgcgcgctttgggccgctgcacttcgagcgtcgggcccggttcgaggtggctgacgaggacaagcagtcccggctgcgctaccagaacctggagaacgatgaggatggagcccaggcctctccggagccggatgggggagtcggcaccagggattccagccgaacttccatccgcagctcccagtggtccttcagcaccatcagcagcagcacccagcgctcctacaacacctgctgcagctggacccaacaccctttgatccagaagaaccgccgagtggtgctggcctccttcctgctcctgctgctggggctggtgctgatcctggtcggcgtgggactggaggcgaccccctctccaggtgtctccagcgccatcttcttcgtgccgggcttcctgttgttggtgcctggagtctatcacgtgatcttcatctactgcgcggtcaagggccaccggggcttccagttcttctacctgccctacttcgagaagtgatcgcggcgcagcgtggaccccttgcgcccatgggggcgcccctcttgccctgttccgttcccctcatctcaagggaagaggccctccaggaccctcgaaaccccagcccctagggagtttgctcaggaagttcggggcatgcaggcctggccctgggaaagccgcccgtcgcctgctctgtgccttaacttattctcgggccgtgcggctgctaggttgctgttattttgtgctaataaaagagtaattaattccaccagaggcaattgctctcctcctgtcctgccactgctagcccagcccaccagcctgaccacagcccccctcccaaggactgaccctgacgctgaagggcttcgagcaccaccgaacgcgtggcagccctgatgctgaggcttgcccaagggcacggggcatgttaggggcagagctgggcgtaggactcctgccttgccagccaggagccggccggaacagcctgccccacccccagcccttggatgactcaaccagcccgtctctgtctggtggccctggccgagggcacgcagagatgacgcaggcctgggacctggaggctggtatcctagttccagcctggctctggggccctgggctgccacagccagccctgaatgtgggccatgtcaaggcaatggcccagccccctccacccactgccctccttcccagtcccagaggttgggagaacctgggggcagagggcataggaagccgcgcctgacagacaccctcagtggtcaaagacttagaaatgcagaacgttagaaacaaaccatctcagaattttggaacatcagcatttcagaatcttacgaaacaagaaacagaatctttgagaaacctgaaatctgagatcatagtagctaccagttatcaatttgttgaaagaccccaggatggccgggcacggtggctcaagcctgtaatcctagcactttgagaggccaaggtgggaggatcgcttgagcccaggagttcgcgaccaacctggacaacatggcgagaacccatctctatttaaaaaaaaaaaaagaaaagaaaatatactaggccctgcgctaagcactgaacacgggttatatcttgtaatcttcactacctccgtcccattttacagataaggactgactcacccaaggacagccagcaggtggtaggtagaattaggaacgtagcccagggctcttcccatgacactgtcggggagggagaaggaaaccggcactgagctggtctcccctaccggccaaccaagaggctggctgagtgagcaagggttgggaggccctgttggtgcacctgcccgtactgtctatctcccccaccaaaacacgggtcccacaaaccactgtctgcagcacccaacacagcggggccttcaggattctgagttagaggaatggacacccagactcttgctctcgctcccacctttccaggccccgcagacttcccaccctcatcccccattcaaggcacttagggggcacccattggatgcaggaactcctaaaccagtggtcccccaactagctatggtaaaggaccagttttcatttctaatccatcacggtccagtactttcataagaagaactagccgggtgccgtgcctcatgcctgtaatcccagcactttgagaggccacggtgggaggatcacttgagcccaggagttcgagaccaacctgggaaacatgggaaaaccccatctctacaaaaaatacaaaaacttagccaggcatggtggggcgcctgtagtcccacccacttgcgaggctggagtgggaggatcacggagcctgggaggctgcagtggagtcatgattgcaccactgcactccagcctggaagacagactgagacctatttaaaaaataaataaataaataacataaaaattttaaaaactagaaaaatgaaataaaaaacatacagaggctgggcgtggtggctcatgcctgcaatcccagcactttgggaggccgaggcaggtgaatcatgaggtcaggagttcgagaccagcctggccaacagggtgaaatcccatttctattaaaaatacaaaaaaattaccgggcatggtggtgcgcacctgtaatcccagctactcaggaggctgaggcaggagaatcgcttgaacccgggaggcagaggttgcagtgagccgagatcacgccactacactccagcctgagcgacagagcgagactctgtctccaaaaaaaaaaaaaatacagaatacaagtccacagtttatcagattaattagacataaaattacatttcaataaatataatcagaacaaacataggaaaaaggaaaaatgacaaaaaccattgaatatgaacaaacaggcaattaacacagaatcgcagctaacaactttttactccttgttttttttttttttgttttttttttgagacgagtctcactgtctcccaggctggagtgcagtggcccgatctcggctcactgcatcctctgcctcccggtttaagcgattctcatgcctcagccttctcagtagctgcgactacaggcacatgccaccatgcccagctaatctttgtatttttagtagagacagggtttcactatgttggccaggctggtctccaacccctgagccacctcgcccgacttcattctacagtcttaacagaaagcaatttcagaagtggtgattcccatcattagaagtctgcgttaggaatcagcaaggtatagtccacagagtggtttttatattttgtaatggttggagaaaagtcaaagaataataagattttatgacataaaattatataaaattcaaatttccatgtcaataaatgaagttttactgttatttattaaaatttctgatatagccaca

SEQ ID NO: 193569 - DNA, 823 bp, Homo sapiens
  Payload ID: 18219
  Gene Name: transmembrane protein 134
  Uniprot ID: Q9H6X4
  ENST ID: ENST00000393877
  CDS Start-End: 59-601
acgctgggtgtgtgggcgcagatggcggcggcgcacggcgcctgagcgggccggggccatgagcgccgcccggccccagttcagcattgatgatgccttcgagctgtccctggaggacgggggccctgggcccgagtccagcggggtcgcgcgctttgggccgctgcacttcgagcgtcgggcccggttcgaggtggctgacgaggacaagcagtcccggctgcgctaccagaacctggagaacgatgaggatggagcccaggcctctccggagccggatgggggagtcggcaccagggattccagccgaacttccatccgcagctcccagtggtccttcagcaccatcagcagcagcacccagcgctcctacaacacctgctgcagctggacccaacaccctttgatccagaagaaccgccgagtggtgctggcctccttcctgctcctgctgctggggctgggtgtctccagcgccatcttcttcgtgccgggcttcctgttgttggtgcctggagtctatcacgtgatcttcatctactgcgcggtcaagggccaccggggcttccagttcttctacctgccctacttcgagaagtgatcgcggcgcagcgtggaccccttgcgcccatgggggcgcccctcttgccctgttccgttcccctcatctcaagggaagaggccctccaggaccctcgaaaccccagcccctagggagtttgctcaggaagttcggggcatgcaggcctggccctgggaaagccgcccgtcgcctgctctgtgccttaacttattctcgggccgtgcggctgctaggttgctg

SEQ ID NO: 193570 - DNA, 1063 bp, Homo sapiens
  Payload ID: 18219
  Gene Name: transmembrane protein 134
  Uniprot ID: Q9H6X4
  ENST ID: ENST00000545682
  CDS Start-End: 48-626
gtgggcgcagatggcggcggcgcacggcgcctgagcgggccggggccatgagcgccgcccggccccagttcagcattgatgatgccttcgagctgtccctggaggacgggggccctgggcccgagtccagcggggtcgcgcgctttgggccgctgcacttcgagcgtcgggcccggttcgaggtggctgacgaggacaagcagtcccggctgcgctaccagaacctggagaacgatgaggatggagcccaggcctctccggagccggatgggggagtcggcaccagggattccagccgaacttccatccgcagctcccagtggtccttcagcaccatcagcagcagcacccagcgctcctacaacacctgctgcagctggacccaacaccctttgatccagaagaaccgccgagtggtgctggcctccttcctgctcctgctgctggggctggggcctgctcagtgccttgctctggaaacagagcttggtgagcttcctggggagggtctctgcctagggcaccttcagctcaggtggtgggtgagccgggctgggggtgggagcccccgccctcaccactgctcctgcccccacccccgcggctccgtctgtgtgcagtgctgatcctggtcggcgtgggactggaggcgaccccctctccaggtgtctccagcgccatcttcttcgtgccgggcttcctgttgttggtgcctggagtctatcacgtgatcttcatctactgcgcggtcaagggccaccggggcttccagttcttctacctgccctacttcgagaagtgatcgcggcgcagcgtggaccccttgcgcccatgggggcgcccctcttgccctgttccgttcccctcatctcaagggaagaggccctccaggaccctcgaaaccccagcccctagggagtttgctcaggaagttcggggcatgcaggcctggccctgggaaagccgcccgtcgcctgctctgtgccttaacttattctcgggccgtgcggctgctaggttgctgttattttgtgctaataaaagagtaattaattccaccaga

SEQ ID NO: 193571 - DNA, 680 bp, Homo sapiens
  Payload ID: 18219
  Gene Name: transmembrane protein 134
  ENST ID: ENST00000536020
  CDS Start-End: 77-409
gggggcggggcagcggcgacgctgggtgtgtgggcgcagatggcggcggcgcacggcgcctgagcgggccggggccatgagcgccgcccggccccagttcagcattgatgatgccttcgagctgtccctggaggacgggggccctgggcccgagtccagcggggtcgcgcgctttgggccgctgcacttcgagcgtcgggcccggttcgaggtggctgacgaggacaagcagtcccggctgcgctaccagaacctggagaacgatgaggatggagcccaggcctctccggagccggatgggggagtcggcaccaggttagggccagctcccagtggtccttcagcaccatcagcagcagcacccagcgctcctacaacacctgctgcagctggacccaacaccctttgatccagaagaaccgccgagtggtgctggcctccttcctgctcctgctgctggggctgggtgtctccagcgccatcttcttcgtgccgggcttcctgttgttggtgcctggagtctatcacgtgatcttcatctactgcgcggtcaagggccaccggggcttccagttcttctacctgccctacttcgagaagtgatcgcggcgcagcgtggaccccttgcgcccatgggggcgcccctcttgccctgttccgttcccctcatctcaagggaa

SEQ ID NO: 193572 - DNA, 575 bp, Homo sapiens
  Payload ID: 18219
  Gene Name: transmembrane protein 134
  ENST ID: ENST00000540133
  CDS Start-End: 42-401
gcagatggcggcggcgcacggcgcctgagcgggccggggccatgagcgccgcccggccccagttcagcattgatgatgccttcgagctgtccctggaggacgggggccctgggcccgagtccagcggggtcgcgcgctttgggccgctgcacttcgagcgtcgggcccggttcgaggtggctgacgaggacaagcagtcccggctgcgctaccagaacctggagaacgatgaggatggagcccaggcctctccggagccggatgggggagtcggcaccaggttagggccagggattccagccgaacttccatccgcagctcccagtggtccttcagcaccatcagcagcagcacccagcgctcctacaacacctgctgcagctggacccaacaccctttgatccagaagaaccgccgagtggtgctggcctccttcctgctcctgctgctggggctgggtgaggagacagaggccttgtgacctgggcacacagccaggaaatcacacatagctgaaaatggaacctggcttatcactgcaaagacttttccttttttaaaaaatttaacctgtt

SEQ ID NO: 193573 - DNA, 551 bp, Homo sapiens
  Payload ID: 18219
  Gene Name: transmembrane protein 134
  ENST ID: ENST00000535813
  CDS Start-End: 1-295
ggattccagccgaacttccatccgcagctcccagtggtccttcagcaccatcagcagcagcacccagcgctcctacaacacctgctgcagctggacccaacaccctttgatccagaagaaccgccgagtggtgctggcctccttcctgctcctgctgctggggctggtgctgatcctggtcggcgtgggactggaggcgaccccctctccagtctatcacgtgatcttcatctactgcgcggtcaagggccaccggggcttccagttcttctacctgccctacttcgagaagtgatcgcggcgcagcgtggaccccttgcgcccatgggggcgcccctcttgccctgttccgttcccctcatctcaagggaagaggccctccaggaccctcgaaaccccagcccctagggagtttgctcaggaagttcggggcatgcaggcctggccctgggaaagccgcccgtcgcctgctctgtgccttaacttattctcgggccgtgcggctgctaggttgctgttattttgtgctaataaaagagtaattaattcca

SEQ ID NO: 193574 - DNA, 716 bp, Homo sapiens
  Payload ID: 18219
  Gene Name: transmembrane protein 134
  ENST ID: ENST00000541059
  CDS Start-End: 1-125
gcagcacccagcgctcctacaacacctgctgcagctggacccaacaccctttgatccagaagaaccgccgagtggtgctggcctccttcctgctcctgctgctggggctgggtgagtggccctgagggttggggtcaagaggggccccgtgggaggctctgccctccttttgtacaggctctgcctcccccttgacactgagcctcccagcatcctgaggaggcagctggctgccatcatcacactcccattttacagggcctgctcagtgccttgctctggaaacagagcttggtgagcttcctggggagggtctctgcctagggcaccttcagctcaggtggtgggtgagccgggctgggggtgggagcccccgccctcaccactgctcctgcccccacccccgcggctccgtctgtgtgcagtgctgatcctggtcggcgtgggactggaggcgaccccctctccaggtgtctccagcgccatcttcttcgtgccgggcttcctgttgttggtgcctggagtctatcacgtgatcttcatctactgcgcggtcaagggccaccggggcttccagttcttctacctgccctacttcgagaagtgatcgcggcgcagcgtggaccccttgcgcccatgggggcgcccctcttgccctgttccgttcccctcatctcaagggaagaggccctccaggaccctcgaaaccccagccc

SEQ ID NO: 193575 - DNA, 2433 bp, Homo sapiens
  Payload ID: 18220
  Gene Name: transmembrane protein 135
  Uniprot ID: Q86UB9
  ENST ID: ENST00000305494
  CDS Start-End: 40-1416
ggctctccccctcctgtcttctccgcgctgttcctcgtcatggcggccctcagcaagtccatccctcataactgctatgagatcggccacacttggcacccttcctgccgggtctccttcctgcagatcaccgggggcgccctggaggagtccctgaagatctatgctcctctgtacttgattgcagcaattctccggaaacggaaattagactattatttacacaaactactccctgagatcctacaatccgcttcatttctaactgctaatggggccttgtatatggctttcttttgcattttaaggaagatacttggaaaattctactcatggactcctggctttggtgccgctctgccagcatcttatgtggccattctcattgaaagaaaaagcaggagagggctgctcacaatttatatggccaacttggccacagaaacactattcagaatgggtgtagcaagaggaaccatcacaacattaagaaatggagaagtccttttgttttgcatcacagctgccatgtacatgttctttttcaggtgcaaggatggcttgaaaggatttacattttctgcacttaggttcattgtagggaaggaagaaattcccacacattctttttcaccagaggcagcatatgcaaaagtggaacaaaagagagagcaacatgaggaaaaacccggaagaatgaatatgattggtctagtcaggaaatttgtggattcaatatgcaaacatggaccaaggcatagatgttgcaaacattatgaagataattgcatctcttattgcattaaaggtttcatcagaatgtttagcgtggggtacttgatccagtgctgcctccgaatcccttctgcatttaggcatctgtttacacagccatctcggctactttctctcttctacaataaagaaaacttccagcttggagcttttcttggctcttttgttagtatatacaagggtactagttgcttcctgcgctggatcagaaacttagatgatgaactacatgctattatagctggatttttggcaggtatatcaatgatgttttataaaagcacaacaatttccatgtatttagcgtccaaattggtagagacaatgtatttcaaaggcattgaagcagggaaggttccctattttcctcatgcagatactatcatctattccatctctacagcaatttgcttccaggcagctgtcatggaagttcagactttgagaccatcttactggaagttccttttaagactcaccaagggcaaatttgctgtcatgaaccgaaaagtccttgatgtttttggtactggtgcatctaaacactttcaggatttcatccccaggttggatccaagatacacaactgtaacaccagagttgcccacagagttttcctgaagatgactgtaacttattaatgtgactaaatgtttcatcttgaagagttaattatgttgaacacaaaggagggggcccaagctcgaacttcagtgttatttcagttagagatactcttttcatttgttttgtttttcttatgaatcagaaattcagaagctttttaggaagatgttgcttaataattaagcttcctccatagccagaataagattctggatcactgtagtgactgacattatatattattgatcaaattatgtccacaagcaatattatataatctacgtagaagtgtaataacaaacaagagtacacttaaaattactttaaaagatgtctttagttcattccaatataattcttgattaaaattaggattatttctacattttaggatttacaaaggatcacgggtacatggatttggtctatatatttttttaaagttttgaattggtatctgtagtagtggaatgttatagatttgaagtaactctccacggacagtgctgctttcgtgtagagcaatttaattggagaagtggccattcttacttcagggatgcaaagatgggtctcataccatttggataaatgtcgtggtatccatgctttttttcaactaataacatcatctctcttcatgaccagttaattgggctatttggcagcccagtgaacctatgtactaatggcaagttaggggcaaatggaaatggacacatccgataaagttgaaatgtatgttttaatctttcacagaagtattacacttgaatatttaaaaacaaaacttttaaacttcctataggtttatgatgtttgttttcatttatatggacataatccttcatagctcagtttatatgccattgttgtattagaagggatcaaaatcctatggaacaaagtagtcttggcaagttggcagtttgtgtcctctcagctgtttaacttatgtaatggatgttttgcacctgaaaacactataaaaatccagtggttgtttaaaaa

SEQ ID NO: 193576 - DNA, 3938 bp, Homo sapiens
  Payload ID: 18220
  Gene Name: transmembrane protein 135
  Uniprot ID: Q86UB9
  ENST ID: ENST00000340353
  CDS Start-End: 203-1513
gtcccgcccccttgagctgcgatacgccgagcgctcaacatccgaggactttggcccagagtaaccccgctctcgtgacctttcccctccattccgcacctccgagtgctggccgggcgagaggctggcggctgggctctcgcgcccctccctgcagggctcaggctctccccctcctgtcttctccgcgctgttcctcgtcatggcggccctcagcaagtccatccctcataactgctatgagatcggccacacttggcacccttcctgccgggtctccttcctgcagatcaccgggggcgccctggaggagtccctgaagatctatgctcctctgtacttgattgcagcaattctccggaaacggaaattagactattatttacacaaactactccctgagatcctacaatccgcttcatttctaactgctaatggggccttgtatatggctttcttttgcattttaaggaagatacttggaaaattctactcatggactcctggctttggtgccgctctgccagcatcttatgtggccattctcattgaaagaaaaagcaggagagggctgctcacaatttatatggccaacttggtccttttgttttgcatcacagctgccatgtacatgttctttttcaggtgcaaggatggcttgaaaggatttacattttctgcacttaggttcattgtagggaaggaagaaattcccacacattctttttcaccagaggcagcatatgcaaaagtggaacaaaagagagagcaacatgaggaaaaacccggaagaatgaatatgattggtctagtcaggaaatttgtggattcaatatgcaaacatggaccaaggcatagatgttgcaaacattatgaagataattgcatctcttattgcattaaaggtttcatcagaatgtttagcgtggggtacttgatccagtgctgcctccgaatcccttctgcatttaggcatctgtttacacagccatctcggctactttctctcttctacaataaagaaaacttccagcttggagcttttcttggctcttttgttagtatatacaagggtactagttgcttcctgcgctggatcagaaacttagatgatgaactacatgctattatagctggatttttggcaggtatatcaatgatgttttataaaagcacaacaatttccatgtatttagcgtccaaattggtagagacaatgtatttcaaaggcattgaagcagggaaggttccctattttcctcatgcagatactatcatctattccatctctacagcaatttgcttccaggcagctgtcatggaagttcagactttgagaccatcttactggaagttccttttaagactcaccaagggcaaatttgctgtcatgaaccgaaaagtccttgatgtttttggtactggtgcatctaaacactttcaggatttcatccccaggttggatccaagatacacaactgtaacaccagagttgcccacagagttttcctgaagatgactgtaacttattaatgtgactaaatgtttcatcttgaagagttaattatgttgaacacaaaggagggggcccaagctcgaacttcagtgttatttcagttagagatactcttttcatttgttttgtttttcttatgaatcagaaattcagaagctttttaggaagatgttgcttaataattaagcttcctccatagccagaataagattctggatcactgtagtgactgacattatatattattgatcaaattatgtccacaagcaatattatataatctacgtagaagtgtaataacaaacaagagtacacttaaaattactttaaaagatgtctttagttcattccaatataattcttgattaaaattaggattatttctacattttaggatttacaaaggatcacgggtacatggatttggtctatatatttttttaaagttttgaattggtatctgtagtagtggaatgttatagatttgaagtaactctccacggacagtgctgctttcgtgtagagcaatttaattggagaagtggccattcttacttcagggatgcaaagatgggtctcataccatttggataaatgtcgtggtatccatgctttttttcaactaataacatcatctctcttcatgaccagttaattgggctatttggcagcccagtgaacctatgtactaatggcaagttaggggcaaatggaaatggacacatccgataaagttgaaatgtatgttttaatctttcacagaagtattacacttgaatatttaaaaacaaaacttttaaacttcctataggtttatgatgtttgttttcatttatatggacataatccttcatagctcagtttatatgccattgttgtattagaagggatcaaaatcctatggaacaaagtagtcttggcaagttggcagtttgtgtcctctcagctgtttaacttatgtaatggatgttttgcacctgaaaacactataaaaatccagtggttgtttaaaaagtccatttgtcactaattccattcaggttctccaaccttcttcttgaatatcattgtcaccatttttactgttagaataaagaggtgacaccataaagtcctgctgataatgagagtagttcaggacagctgtgattgaaatatggtcgctatttacagtttttcagggaaaagttatacttttctatgttaataaagagctgaagtggtctacagttaatgtgacatgtagggatgatgatatttttaaaatacattttgttgctaaaaagtttttaggccagtgcaaattatgcagtagaacttgtgttgcaaaaggaattataacccatactttaaaaatgcttaatccctcatattcaatttcatcaagccttgtatacttctgcttaaatgtaattcaatccttggttgttatggcaaacagaaacccaacaaaaagacagactctggtactatggtaacagagccactttatcatttggtcaaaatttggcattatgattagctttgtagaactgacctgtttatttggcaatgctgttaaaggatcatttcggtttcagacttcaaagttgattaataaatttaatcttaactttttattcactggaatcaaaacgatggttggtactgtgtttactgtttaaaatgaagtactaaagccctgagaactgcacctcattttctttatccagaaattgtgcttatatattttcctgtcaggtttaaaaagatgttttaattcataaattattgttttcattgacattaaaagactgtgatattgaaagatgaattacgaaatttgctgagattgtttagtaaaattttgctggtcaaaaaggtgtatttctacaatttaccttttcatttttataaattgcagtcatttttttaaattttatgtaaaatgtaaaatgaaatagctatcatgaagcagaatacaatgatgaatgtataggttgagtgaataaccaatttgcagtggtggattgagaagtccagtttgatttcattgggacagactgcaaagtgtagttgtttgagcaaacacaaagaaactttgtgtttttgaagacaatcagaatgattacctttctacctctaactaatcaggtattgattgacaactttttggcattataaataaagtaaaatagatctctgcattccaaaatatgttttttagtttatttatatcctgaagaaatggtaagttttcactggaactgattacagtaaacaataatatgtccccttagtctttctgacatttttatatagattgagattgaaaaaccgtgcatttggggcagtggtattatggtcatttcgttgctattttctgttttaataaaatcctagaactagtagcaaccgagtaaagattgagtttgcaagataa

SEQ ID NO: 193577 - DNA, 496 bp, Homo sapiens
  Payload ID: 18220
  Gene Name: transmembrane protein 135
  ENST ID: ENST00000526733
  CDS Start-End: 126-496
acctttcccctccattccgcacctccgagtgctggccgggcgagaggctggcggctgggctctcgcgcccctccctgcagggctcaggctctccccctcctgtcttctccgcgctgttcctcgtcatggcggccctcagcaagtccatccctcataactgctatgagatcggccacacttggcacccttcctgccgggtctccttcctgcagatcaccgggggcgccctggaggagtccctgaagatctatgctcctctgtacttgattgcagcaattctccggaaacggaaattagactattatttacacaaactactccctgagatcctacaatccgcttcatttctaactgctaatggggccttgtatatggctttcttttgcattttaaggagagggctgctcacaatttatatggccaacttggccacagaaacactattcagaatgggtgtagcaagaggaaccatcacaacattaagaaatggagaagt

SEQ ID NO: 193578 - DNA, 753 bp, Homo sapiens
  Payload ID: 18220
  Gene Name: transmembrane protein 135
  ENST ID: ENST00000525018
  CDS Start-End: 62-753
gcgcccctccctgcagggctcaggctctccccctcctgtcttctccgcgctgttcctcgtcatggcggccctcagcaagtccatccctcataactgctatgagatcggccacacttggcacccttcctgccgggtctccttcctgcagatcaccgggggcgccctggaggagtccctgaagatctatgctcctctgtacttgattgcagcaattctccggaaacggaaattagactattatttacacaaactactccctgagatcctacaatccgcttcatttctaactgctaatggggccttgtatatggctttcttttgcattttaaggaagatacttggaaaattctactcatggactcctggctttggtgccgctctgccagcatcttatgtggccattctcattgaaagaaaaagcaggagagggctgctcacaatttatatggccaacttgaccgagtctcgctttgttgcccaggctggagtgcagtggtgtgatctcagctcactacaacctgcacctcccgggttcaagcgattcttgttcctcagccacctgagtagctgggattacagatttgtgccaccatgcctggctaatttttgtatttttgtagagatgaggtttcaccatgttagccaggctggtcttgaattcttggccttaagtgatccacctgccttggcctcccaaagtgctgagattacaggtgtgagccactgtgcctggcccaaaaacaagatttttaa

SEQ ID NO: 193579 - DNA, 1149 bp, Homo sapiens
  Payload ID: 18220
  Gene Name: transmembrane protein 135
  ENST ID: ENST00000532959
  CDS Start-End: 134-1123
tgctggccgggcgagaggctggcggctgggctctcgcgcccctccctgcagggctcaggctctccccctcctgtcttctccgcgctgttcctcgtcatggcggccctcagcaagtccatccctcataactgctatgagatcggccacagaaacactattcagaatgggtgtagcaagaggaaccatcacaacattaagaaatggagaagtccttttgttttgcatcacagctgccatgtacatgttctttttcaggtgcaaggatggcttgaaaggatttacattttctgcacttaggttcattgtagggaaggaagaaattcccacacattctttttcaccagaggcagcatatgcaaaagtggaacaaaagagagagcaacatgaggaaaaacccggaagaatgaatatgattggtctagtcaggaaatttgtggattcaatatgcaaacatggaccaaggcatagatgttgcaaacattatgaagataattgcatctcttattgcattaaaggtttcatcagaatgtttagcgtggggtacttgatccagtgctgcctccgaatcccttctgcatttaggcatctgtttacacagccatctcggctactttctctcttctacaataaagaaaacttccagcttggagcttttcttggctcttttgttagtatatacaagggtactagttgcttcctgcgctggatcagaaacttagatgatgaactacatgctattatagctggatttttggcaggtatatcaatgatgttttataaaagcacaacaatttccatgtatttagcgtccaaattggtagagacaatgtatttcaaaggcattgaagcagggaaggttccctattttcctcatgcagatactatcatctattccatctctacagcaatttgcttccaggcagctgtcatggaagttcagactttgagaccatcttactggaagttccttttaagactcaccaagggcaaatttgctgtcatgaaccgaaaagtccttgatgtttttggtactggtgcatctaaacactttcaggatttcatccccaggttggatccaagatacacaactgtaacaccagagttgcccacagagttttcctgaagatgactgtaacttattaatgtgac

SEQ ID NO: 193580 - DNA, 1434 bp, Homo sapiens
  Payload ID: 18221
  Gene Name: transmembrane protein 136
  Uniprot ID: Q6ZRR5
  ENST ID: ENST00000314475
  CDS Start-End: 328-1131
ttcctgttgccgcgatccgggccgggagctgcgggcgcccgggcgcccgaggcttcccggtgcgctccgccaggtcagtcatcgctagagggttattattgacatttactcatcataaaatgtgatgtcagcctaccagctcggagtgcagttcctggtttccagtttacaacattgaccagttgctaacatgttatctctgaggaacttggaatgataaatacagccatacttaaatagaagattcttggccgtgtagataaggaaaataagataaggcaatatttttgaactattctataatagaaatgaggatatatacacaaaatgacccagtgctgttttcttagggtgcatcctttgtttttctggttttggtcttttcatcacaggatggcattagctctgtgtctgcaggtgctgtgcagcctgtgtggctggctctcgctctatatttctttctgccacctgaataagcaccgaagctatgagtggagctgccgcctggtcaccttcacccatggagtcctctctataggcctctccgcttatattggcttcattgatggcccatggccttttacccacccaggctcacccaatacacctctccaagttcatgtcctgtgtctcaccttgggctacttcatcttcgacttgggctggtgcgtctactttcagtctgagggtgccttgatgctggctcatcacacattgagtatcttgggcattatcatggcccttgtgcttggggagtctggcacagaggtcaatgcagtcctctttggaagtgagcttaccaaccccttgctacagatgcgctggtttctccgggaaacagggcactatcacagtttcactggagatgtagtggacttcctctttgtggctctgttcacaggagtgaggattggtgtgggagcttgcctccttttctgtgaaatggtctcccccacgcctaagtggtttgtgaaggctgggggagtagcgatgtatgctgtgtcttggtgtttcatgtttagcatctggcgctttgcatggaggaagagcatcaagaagtaccatgcttggagaagcaggcggagtgaggaacggcagctgaaacacaacggacatctcaaaatacactagccaaggcttgctccagattatggattgggttaagtcagccatgggaaccaggttggaaatatgactgttacataattacacttataacaaacttaggtttcaataaagggctaaatgtattgatcaatttggtcagtcttcaagccgagcatataccagtattaaaacactaacttctacagtagcacagttgtagaaagtgagaatactccatggtagttgggaataagtgagaactgtgaagtgagtacaactggcatttgttttcatttgtggtgaccctgggtcctcctgtccctggga

SEQ ID NO: 193581 - DNA, 4143 bp, Homo sapiens
  Payload ID: 18221
  Gene Name: transmembrane protein 136
  Uniprot ID: Q6ZRR5
  ENST ID: ENST00000375095
  CDS Start-End: 242-979
ctcttgacccccccgccagagaaggaggaccctcccgcgccctttcggagcgtcggtggcccggctccggctctgcgctccatcctcccagccagcaggtgcccccagacccccggctcctcctccgccgccgtcacagcctcgtcctccgcctctggctcctccgcttcctgttgccgcgatccgggccgggagctgcgggcgcccgggcgcccgaggcttcccggtgcgctccgccaggatggcattagctctgtgtctgcaggtgctgtgcagcctgtgtggctggctctcgctctatatttctttctgccacctgaataagcaccgaagctatgagtggagctgccgcctggtcaccttcacccatggagtcctctctataggcctctccgcttatattggcttcattgatggcccatggccttttacccacccaggctcacccaatacacctctccaagttcatgtcctgtgtctcaccttgggctacttcatcttcgacttgggctggtgcgtctactttcagtctgagggtgccttgatgctggctcatcacacattgagtatcttgggcattatcatggcccttgtgcttggggagtctggcacagaggtcaatgcagtcctctttggaagtgagcttaccaaccccttgctacagatgcgctggtttctccgggaaacagggcactatcacagtttcactggagatgtagtggacttcctctttgtggctctgttcacaggagtgaggattggtgtgggagcttgcctccttttctgtgaaatggtctcccccacgcctaagtggtttgtgaaggctgggggagtagcgatgtatgctgtgtcttggtgtttcatgtttagcatctggcgctttgcatggaggaagagcatcaagaagtaccatgcttggagaagcaggcggagtgaggaacggcagctgaaacacaacggacatctcaaaatacactagccaaggcttgctccagattatggattgggttaagtcagccatgggaaccaggttggaaatatgactgttacataattacacttataacaaacttaggtttcaataaagggctaaatgtattgatcaatttggtcagtcttcaagccgagcatataccagtattaaaacactaacttctacagtagcacagttgtagaaagtgagaatactccatggtagttgggaataagtgagaactgtgaagtgagtacaactggcatttgttttcatttgtggtgaccctgggtcctcctgtccctgggaggtttgatgttcaggcagtttagaaaggaactcgaaaaagattagtgctatttcttgttcctttgagaagtaactctttcaataaacacttatttctgctttccatatagcaatttatctaagtttaccccatttactataaagtgaggggcttacaggaagagacacgcctttgacattctgaacattagatcggggaattgggtcgcttaaacagaggggcataggagggtgagagtgaaactggcagtgagggggagggctacttactgaacctcctataccaactgtgccagaggtgcccaagaccactgccaggttctgtaattctctgggaagactcagtggactcagcatatagtcttacttatagttttgatttattatagtgaaaagatacaaagaaaaatcggtaaaaggaaaaggcacctgagacaaagtctagggtaaagcaagcacaagtttccagagtcctctcccaatggaatcacacaggatgcacttaattcccctagcagtgatttgttacgacatgtgaatgagttgtctactggacaaggtcactacagactcagtgcccaaagtttttactgaggacaggtcatctaggcaggctttccctggcagatagcaaaattcaagactctcaaaaggaaagcaggtgttcagcataagccatattgtttgcacaagcagttcagacacagtaagccagtcttatcagttaattgtgggagcccctccaaaatctaagttcccaaatgccggccagtggccaaccctgtaatcaggcctctccaaggatagcagtttaggcctgctatgttaactcttttctgcacaaaacctatagagttagggctttggatctgagatgaatgaagtgtgggtagatttactgagtcctgttatatgggttctgccctaccaggaaaactatgccagttctcagggcttttgtgcattaatctcctaggcatttgaggctatgactaaattccatagggatttatcatgtggattccactgtgcttgagatggcagtttagatttcagctctgctgtacatattgcaaactagagccaaagactttaaagtgtgtactggcctcagggggatgaggttaatttttttttttcattttagatactttcccttttagtactcctcctacttttcttatttttactaaaaaggtaccactctatgaacaaactaataaaacaaggccagtcttggaaggaaaaaaataataattcttagtgtgacagtctccaagagaagcaagaatataagcttagaacaaggggttaagaatccagaattcctgggttcttttaactaattttgctactcacttgccactttggagagctactcactcactttggataggttacttgtttcttctttgcctgagtttaaacctattgtgaatgaatgaaataccctgtagtatatttcataaatacattatgtggcattttattaatggaggtctttaatgtagggcttttatggaaatatgaagtatttatgtatttattgattatttatttttaccatgttattgaagtcaatggtgtttgattagctcagtgggtgagcaagcatatggtgctactggagtcaaggctggtcagtaggaagcatcagtccattccatggccactggtaatctaacgtaatgaatggtgtcttttgttgttgttgttgttgttgttgttgtttgagacagagtcttgctctgtcgcccaggctggagtgcagtggtgtgatctcaactcactgcaacctccgccttctgtgttcaagtgattctcctgcctcagcctcccgagtagctgggactacaggcgtgtgccaccatgcctggctactttttgtatttttagtagagacggggtttcaccatgttggccaggctggtcttgaactcctgacttcatgacccacccgcctcggcctcccaaagtgctgggattacaggtgtgagccaccgtgcccagccatgagcggtcttgaaaatgaaaaatggtcttggccacagaaaccaggtatgagggagtggttggaatggtataaagtcatcactgttagggaaacagtaactttaaatgcatgttaacagtgggtctttaaaaatgaatgtcatttggttaaagagttttgctgggcattgagataatctgacagcatctccacttcctgttttttttcttaatctccactttttttttttctatgatgagcgcccctaaaatgctggtaagcttctttccaacaaaattgcggtcaaagtaggatgctggggaatgctgattttagcaaaagcttgtagaaaagagtggcctggcacatgagcttaaaaaaaagaaaaaaagctggctcttgaattttggcacagtgcaacctgttccataccagacaaatgaacaggcttaatctggtaccaattctttttctctcttactcctcagaagtgaagggactgcagatcttgttgttttggggacactttcatggaactgtatgtaggtttttttgaatggtgagaaatctgaataattggtaaggggaagggaatccctcatttcagcttttcttgatgttgttactaataactatgaaaaaacttctgagagaacaatgtgaactgaagatgactcagcagttaagacaatgctaagttctgaaaccacaggtaaatgaagggctaattaatgtgtggtatacttggacaaaatgaagtactcatttgcactggattactgtgtaatgataacgaacactgttcaagaacgatttatatttccataagatttgtactaaattttataaaagtaaaacaactttttat

SEQ ID NO: 193582 - DNA, 3930 bp, Homo sapiens
  Payload ID: 18221
  Gene Name: transmembrane protein 136
  Uniprot ID: Q6ZRR5
  ENST ID: ENST00000529187
  CDS Start-End: 317-763
gcgatccgggccgggagctgcgggcgcccgggcgcccgaggcttcccggtgcgctccgccaggtcagtcatcgctagagggttattattgacatttactcatcataaaatgtgatgtcagcctaccagctcggagtgcagttcctggtttccagtttacaacattgaccagttgctaacatgttatctctgaggaacttggaatgataaatacagccatacttaaatagaagattcttggccgtgtagataaggaaaataagataaggcaatatttttgaactattctataatagaaatgaggatatatacacaaaatgacccagtgctgttttcttagggtgcatcctttgtttttctggttttggtcttttcatcacaggatggcattagctctgtgtctgcaggtgctgtgcagcctgtgtggctggctctcgctctatatttctttctgccacctgaataagcaccgaagctatgagtggagctgccgcctggtcaccttcacccatggagtcctctctataggcctctccgcttatattggcttcattgatggcccatggccttttacccacccaggctcacccaatacacctctccaagttcatgtcctgtgtctcaccttgggctacttcatcttcgacttgggctgcatctggcgctttgcatggaggaagagcatcaagaagtaccatgcttggagaagcaggcggagtgaggaacggcagctgaaacacaacggacatctcaaaatacactagccaaggcttgctccagattatggattgggttaagtcagccatgggaaccaggttggaaatatgactgttacataattacacttataacaaacttaggtttcaataaagggctaaatgtattgatcaatttggtcagtcttcaagccgagcatataccagtattaaaacactaacttctacagtagcacagttgtagaaagtgagaatactccatggtagttgggaataagtgagaactgtgaagtgagtacaactggcatttgttttcatttgtggtgaccctgggtcctcctgtccctgggaggtttgatgttcaggcagtttagaaaggaactcgaaaaagattagtgctatttcttgttcctttgagaagtaactctttcaataaacacttatttctgctttccatatagcaatttatctaagtttaccccatttactataaagtgaggggcttacaggaagagacacgcctttgacattctgaacattagatcggggaattgggtcgcttaaacagaggggcataggagggtgagagtgaaactggcagtgagggggagggctacttactgaacctcctataccaactgtgccagaggtgcccaagaccactgccaggttctgtaattctctgggaagactcagtggactcagcatatagtcttacttatagttttgatttattatagtgaaaagatacaaagaaaaatcggtaaaaggaaaaggcacctgagacaaagtctagggtaaagcaagcacaagtttccagagtcctctcccaatggaatcacacaggatgcacttaattcccctagcagtgatttgttacgacatgtgaatgagttgtctactggacaaggtcactacagactcagtgcccaaagtttttactgaggacaggtcatctaggcaggctttccctggcagatagcaaaattcaagactctcaaaaggaaagcaggtgttcagcataagccatattgtttgcacaagcagttcagacacagtaagccagtcttatcagttaattgtgggagcccctccaaaatctaagttcccaaatgccggccagtggccaaccctgtaatcaggcctctccaaggatagcagtttaggcctgctatgttaactcttttctgcacaaaacctatagagttagggctttggatctgagatgaatgaagtgtgggtagatttactgagtcctgttatatgggttctgccctaccaggaaaactatgccagttctcagggcttttgtgcattaatctcctaggcatttgaggctatgactaaattccatagggatttatcatgtggattccactgtgcttgagatggcagtttagatttcagctctgctgtacatattgcaaactagagccaaagactttaaagtgtgtactggcctcagggggatgaggttaatttttttttttcattttagatactttcccttttagtactcctcctacttttcttatttttactaaaaaggtaccactctatgaacaaactaataaaacaaggccagtcttggaaggaaaaaaataataattcttagtgtgacagtctccaagagaagcaagaatataagcttagaacaaggggttaagaatccagaattcctgggttcttttaactaattttgctactcacttgccactttggagagctactcactcactttggataggttacttgtttcttctttgcctgagtttaaacctattgtgaatgaatgaaataccctgtagtatatttcataaatacattatgtggcattttattaatggaggtctttaatgtagggcttttatggaaatatgaagtatttatgtatttattgattatttatttttaccatgttattgaagtcaatggtgtttgattagctcagtgggtgagcaagcatatggtgctactggagtcaaggctggtcagtaggaagcatcagtccattccatggccactggtaatctaacgtaatgaatggtgtcttttgttgttgttgttgttgttgttgttgtttgagacagagtcttgctctgtcgcccaggctggagtgcagtggtgtgatctcaactcactgcaacctccgccttctgtgttcaagtgattctcctgcctcagcctcccgagtagctgggactacaggcgtgtgccaccatgcctggctactttttgtatttttagtagagacggggtttcaccatgttggccaggctggtcttgaactcctgacttcatgacccacccgcctcggcctcccaaagtgctgggattacaggtgtgagccaccgtgcccagccatgagcggtcttgaaaatgaaaaatggtcttggccacagaaaccaggtatgagggagtggttggaatggtataaagtcatcactgttagggaaacagtaactttaaatgcatgttaacagtgggtctttaaaaatgaatgtcatttggttaaagagttttgctgggcattgagataatctgacagcatctccacttcctgttttttttcttaatctccactttttttttttctatgatgagcgcccctaaaatgctggtaagcttctttccaacaaaattgcggtcaaagtaggatgctggggaatgctgattttagcaaaagcttgtagaaaagagtggcctggcacatgagcttaaaaaaaagaaaaaaagctggctcttgaattttggcacagtgcaacctgttccataccagacaaatgaacaggcttaatctggtaccaattctttttctctcttactcctcagaagtgaagggactgcagatcttgttgttttggggacactttcatggaactgtatgtaggtttttttgaatggtgagaaatctgaataattggtaaggggaagggaatccctcatttcagcttttcttgatgttgttactaataactatgaaaaaacttctgagagaacaatgtgaactgaagatgactcagcagttaagacaatgctaagttctgaaaccacaggtaaatgaagggctaattaatgtgtggtatacttggacaaaatgaagtactcatttgcactggattactgtgtaatgataacgaacactgttcaagaacgatttatatttccataagatttgtactaaattttataaaagtaaaacaactttttataaa

SEQ ID NO: 193583 - DNA, 1848 bp, Homo sapiens
  Payload ID: 18222
  Gene Name: transmembrane protein 138
  Uniprot ID: Q9NPI0
  ENST ID: ENST00000278826
  CDS Start-End: 560-1048
gctaaccccctaactcccgttcctcctcggcgtttcttctccaagtccgaagtcagggtccaggactgctgcgatgcatcagccccgcctctcatcccccatccagaggaggcggaaatgttcaggtgaacgcgaagcctcccactacgagccggccctcagcaaggccgtgcgcagtgtgggcgggagccctaagtcagctagcggcgacgctgggagggcccggagcaggccgggccccgaacagcgaaagctccaacatggcggccagactggccatagagcgggaagagaaagccggggactagcaggccgcacggcgcagacggggcccgcctcctccatttacttccggaatttaaagccggcttccggaagccgggacgatgtccgcatgacaaccgacgttggagtttggaggtgcttgccttagagcaagggaaacagctctcattcaaaggaactagaagcctctccctcagtggtagggagacagccaggagcggttttctgggaactgtgggatgtgcccttgggggcccgagaaaacagaaggaagatgctccagaccagtaactacagcctggtgctctctctgcagttcctgctgctgtcctatgacctctttgtcaattccttctcagaactgctccaaaagactcctgtcatccagcttgtgctcttcatcatccaggatattgcagtcctcttcaacatcatcatcattttcctcatgttcttcaacaccttcgtcttccaggctggcctggtcaacctcctattccataagttcaaagggaccatcatcctgacagctgtgtactttgccctcagcatctcccttcatgtctgggtcatgaacttacgctggaaaaactccaacagcttcatatggacagatggacttcaaatgctgtttgtattccagagactagcagcagtgttgtactgctacttctataaacggacagccgtaagactaggcgatcctcacttctaccaggactctttgtggctgcgcaaggagttcatgcaagttcgaaggtgacctcttgtcacactgatggatacttttccttcctgatagaagccacatttgctgctttgcagggagagttggccctatgcatgggcaaacagctggactttccaaggaaggttcagactagctgtgttcagcattcaagaaggaagatcctccctcttgcacaattagagtgtccccatcggtctccagtgcggcatcccttccttgccttctacctctgttccaccccctttccttcctttcctctctgtaccattcattctccctgaccggcctttcttgccgagggttctgtggctcttacccttgtgaagcttttcctttagcctgggacagaaggacctcccagcccccaaaggatctcccagtgaccaaaggatgcgaagagtgatagttacgtgctcctgactgatcacaccgcagacatttagatttttatacccaaggcactttaaaaaaatgttttataaatagagaataaattgaattcttgttccataaatgggggagtctgtctgtctagctagatctcttcatgttaagaggcgtgccaaggtccagcttaacatctacttgacccagagggaagatggagccacagatgaaatacagatctttgttgagatccattatgagtacaaagtattttagcagaaattcaagatggaatctgatgctgcatcccccactcctggagctccagatgtgtgtgctctgttcagactctctttccttatcagaagccttaactgccctcagaagaataaaaatattcccttagccagctttggcaaaagaaa

SEQ ID NO: 193584 - DNA, 1205 bp, Homo sapiens
  Payload ID: 18222
  Gene Name: transmembrane protein 138
  ENST ID: ENST00000381787
  CDS Start-End: 389-703
tgggcaacagaatgaaaccctgtctcgaaaaataaggagtatcagagaatcttctataggactatgtatggaagaaattttaaaaataaaaaagagtattagagcaggaaagccttgactatggactgcaaacccaactgatggggccagtgggtaattttaggtaattttagcttcatgtcattcaggtcccaaaacccatgttatctctgtgagggtttaagatgtcagatgcctatctcacaacaaaggacaggcctcgtggtgtccctcaggacatagtacctgctcttgggtcctcacacaggccttcattggttgtacttttttttatgtctacagcatccaggatattgcagtcctcttcaacatcatcatcattttcctcatgttcttcaacaccttcgtcttccaggctggcctggtcaacctcctattccataagttcaaagggaccatcatcctgacagctgtgtactttgccctcagcatctcccttcatgtctgggtcatgaacttacgctggaaaaactccaacagcttcatatggacagatggacttcaaatgctgtttgtattccagagactagcagcagtgttgtactgctacttctataaacggacagccgtaagactaggcgatcctcacttctaccaggactctttgtggctgcgcaaggagttcatgcaagttcgaaggtgacctcttgtcacactgatggatacttttccttcctgatagaagccacatttgctgctttgcagggagagttggccctatgcatgggcaaacagctggactttccaaggaaggttcagactagctgtgttcagcattcaagaaggaagatcctccctcttgcacaattagagtgtccccatcggtctccagtgcggcatcccttccttgccttctacctctgttccaccccctttccttcctttcctctctgtaccattcattctccctgaccggcctttcttgccgagggttctgtggctcttacccttgtgaagcttttcctttagcctgggacagaaggacctcccagcccccaaaggatctcccagtgaccaaaggatgcgaagagtgatagttacgtgctcctgactgatcacaccgcagacatttagatttttatacccaaggcactttaaaaaaatgttttataaatagagaataaattgaattcttgttccataaa

SEQ ID NO: 193585 - DNA, 2839 bp, Homo sapiens
  Payload ID: 18222
  Gene Name: transmembrane protein 138
  Uniprot ID: Q9NPI0
  ENST ID: ENST00000542946
  CDS Start-End: 200-517
aaagccggcttccggaagccgggacgatgtccgcatgacaaccgacgttggagtttggaggtgcttgccttagagcaagggaaacagctctcattcaaaggaactagaagcctctccctcagtggtagggagacagccaggagcggttttctgggaactgtgggatgtgcccttgggggcccgagaaaacagaaggaagatgctccagaccagtaactacagcctggtgctctctctgcagttcctgctgctgtcctatgacctctttgtcaattccttctcagaactgctccaaaagactcctgtcatccagcttgtgctcttcatcatccaggatattgcagtcctcttcaacatcatcatcattttcctcatgttcttcaacaccttcgtcttccaggctggcctggtcaacctcctattccataagttcaaagggaccatcatcctgacagctgtgtactttgccctcagcatctcccttcatgtctgggtcatggtaagagtggcagtctgaattctttttttaatttttattttaaatagaggtggggtcttactttgttaccaaggctggtctcaaactcctgagctcaagcaattctcctgcttctgcctcccaagctcaagcaattctcctgcttctgcctcccaaagtgctggaattacaggcatgagtcactgtgcccggcctgaactctgaattcctgaatcgctaaagggctaggaataacttttcttttcttttcttttctttttttttttttttgagacagagtctcgctctgtcgcctggctggagtgcagtggcgtgatctcagctcactgcaacctccgcttcctgggttcaagcaattctcctccctcagtctcctgagtacctgggattacaggcacgcaccaccacgcccagctaatttttgtgtttttagtagagactgggtttcaccatgttggccgggatggtctcaatctcttgacctcgtgatcctcctgcctcggcctctgaagtgctaggattacaggcgtgagctactgcgcccggccactgggatatcttttctctgggaacccagcttcattctttgacatctcacacaatccttcgtagagaacaggtgaaatgaaagtggtttgggttggagccctgggcatgtgagagtttcataaggtactcttgaccaaccttatgtgttgaaaaacagccttgtccaagagtcaggggactcttccagaacattcaattcacctttgccccaaacaggcctaccagggctaaaacaggtagttgaatgtgtctcatcattagctatttgggcaggtggatgttgatacaggttattcttaggcatcagtgccccatggctaatgctgtaggcagtggatgtttttggaagtagccaagcaggattgctgcttgcccttgagtgctccatgccgtctgccaagctcccatcactttaactaggagaaccggcctccaggatccctccctttggttctaacataggcctcagatcagatccagtgtctgtggtttcagatttcttctgcttcacaaattcttccagctctttgagtatcttgtatatttctcatgtactcaattcaattgaactctaaaacctcagggttctctagttgtcacttcattattaaagccactttcacacctgaaccccctgttaggttgtgcttgtgattccacagaaagaagtagaggtcccaggaaagaagcaaagcaacaccagagtctccgggtgcttcctgaagaggattctgtgccctggttcctggagccaaaataggtcctggctttgtactataaaagccgttaatctcattaaaccctgagtacaccaaagtctttatctgacaggagctgagccagcgatttttcaaggcaagacagtgaccagctgaactcctgagataatgaatatatcatttctccttggcaaaggttatggaattaaagagaataaataacttagttcatacttcctccctcaaagttaaaagatattccctttgcagcgaaaaatggagctttgaggctccttcgagaaacgctccttggggttgtagaaaggaggaagaggttagcatgattttaaagcaactggcatctctgcagctaaccaagttggagacattagggcttcttgtggccattaacttttgtgtatctcacatctccttcagaacttacgctggaaaaactccaacagcttcatatggacagatggacttcaaatgctgtttgtattccagagactaggtaaggaccagagcaaggtcaggcctctctcaggtcccacatgtgtctctttcagtgagggccttgatgctggcttcccagacctgtcccagctggcttgggatggttgtgacagccacaccaggaacaggagggattactgcccctgcccttgctagaagactatgggaaatgaggaggcagggctgcccagcctcattaggttctgttctttttgtttgtttgtttgtttgtttgtttgtttttgagacagtcttgctctgtcgcccaggctggagtgctgtggcgctatctcaggctcactgcaagctccgcctcccgggttcacaccattctcctgcctcagcctccggagtagctgggactacaggcgcccgccaccacgcccagctaattttttgtgtatttttagtagagacagggtttcaccgtgttagccaggatggtctcgatctctgacctcatgatccgcctgcctctgcctcctaaagtgctgggattacaggcgtgagccaccacgcctggccaggttctgttcttaacctgaaatgatactca

SEQ ID NO: 193586 - DNA, 2383 bp, Homo sapiens
  Payload ID: 18223
  Gene Name: transmembrane protein 139
  Uniprot ID: Q8IV31
  ENST ID: ENST00000359333
  CDS Start-End: 514-1164
tactttctacagtctgtggagacaggtgagcgacgaacttctgagacaggtgtgggtgcgagggtcgggagggtcatgggattgggaccgaggtgtgaggagggaatctgcaattccttgctacacagagcgctggcaacttctgacaggctgtttctggggtatgggctgcctcgggttgttgctgttacaaggaaagaaaagagttcccctgcccaccgcctcccagccactgggctacctcctggcaggaaatttgcaaactgagtttaacaagttaggatcagcagagggtagaggagggccctggcagatgtggggtctagaagaggacaggagttatcagggcctccggccattgtgctgggcctttgcctgtacaattgtttctcaagcagttgtgtccctgtggctttggtgcgcctgtgtgcactttctccctccacctggagcatgggctaacaccggaggaaaggaaaagacagagtcagacagggagcctggggaggggccatggtgccaatgcacttactggggagactggagaagccgcttctcctcctgtgctgcgcctccttcctactggggctggctttgctgggcataaagacggacatcacccccgttgcttatttctttctcacattgggtggcttcttcttgtttgcctatctcctggtccggtttctggaatgggggcttcggtcccagctccaatcaatgcagactgagagcccagggccctcaggcaatgcacgggacaatgaagcctttgaagtgccagtctatgaagaggccgtggtgggactagaatcccagtgccgcccccaagagttggaccaaccacccccctacagcactgttgtgatacccccagcacctgaggaggaacaacctagccatccagaggggtccaggagagccaaactggaacagaggcgaatggcctcagaggggtccatggcccaggaaggaagccctggaagagctccaatcaaccttcggcttcggggaccacgggctgtgtccactgctcctgatctgcagagcttggcggcagtccccacattagagcctctgactccaccccctgcctatgatgtctgctttggtcaccctgatgatgatagtgttttttatgaggacaactgggcacccccttaaatgactctcccaagatttctcttctctccacaccagacctcgttcatttgactaacattttccagcgcctactatgtgtcagaaacaagtgtttctgcctggacatcataaatggggacttggaccctgaggagagtcaggccacggtaagcccttcccagctgagatatgggtggcataatttgagtcttctggcaacatttggtgacctaccccatatccaatatttccagcgttagattgaggatgaggtagggaggtgatccagagaaggcggagaaggaagaagtaacctctgagtggcggctattgcttctgttccaggtgctgttcgagctgttagaacccttaggcttgacagctttgtgagttattattgaaaaatgaggattccaagagtcagaggagtttgataatgtgcacgagggcacactgctagtaaataacattaaaataactggaatgaactcctgatcccaaagcctattgtgttttcaacacaaggtaataggaagccaagcaacttgcatgtctcccaatccctgtctagggacagctgctggtgcaggatggaagacttcctataaacagaatgggcgaccaattgtgtctacagagggggtgggctgagcatgggcacgcatgtccccagcctcctggacgagcaaagtcagtcaaagcgctggtgatccctgctccgcgtgcgtagcagtgtctgtgcctctcctgcccaggggctagagagcagtctccagtgcagggtccccatcctatctgaaaacagtggagtcagtgaccccaggtggagggacttccagttttaacaatgggttggtatgaaggccagaaggagtgaaacatgtgaactttctggcgaggagactccctcttgaatcatccatatgtagccccggggtcacttgcgaagagtctctaacagcttctgcctcactcctaagctctgaccgctaggctttcaccccagccgccggtcctgattcctgagatcccaatattgagcaccaggtttcctggaattgtgtgctgcggctgtgatgtaggtttcggtcgctggaagctgctaaaccatagctgacgccccctcctaagccagccttccttccccgcgcgggcatctgtccagggccttgtcgcgctctcagtctccttcgcagcctggccccaaccgttcaacttcaataaagcaaaactccagcca

SEQ ID NO: 193587 - DNA, 1257 bp, Homo sapiens
  Payload ID: 18223
  Gene Name: transmembrane protein 139
  Uniprot ID: Q8IV31
  ENST ID: ENST00000409244
  CDS Start-End: 140-790
actttctacagtctgtggagacagttgtgtccctgtggctttggtgcgcctgtgtgcactttctccctccacctggagcatgggctaacaccggaggaaaggaaaagacagagtcagacagggagcctggggaggggccatggtgccaatgcacttactggggagactggagaagccgcttctcctcctgtgctgcgcctccttcctactggggctggctttgctgggcataaagacggacatcacccccgttgcttatttctttctcacattgggtggcttcttcttgtttgcctatctcctggtccggtttctggaatgggggcttcggtcccagctccaatcaatgcagactgagagcccagggccctcaggcaatgcacgggacaatgaagcctttgaagtgccagtctatgaagaggccgtggtgggactagaatcccagtgccgcccccaagagttggaccaaccacccccctacagcactgttgtgatacccccagcacctgaggaggaacaacctagccatccagaggggtccaggagagccaaactggaacagaggcgaatggcctcagaggggtccatggcccaggaaggaagccctggaagagctccaatcaaccttcggcttcggggaccacgggctgtgtccactgctcctgatctgcagagcttggcggcagtccccacattagagcctctgactccaccccctgcctatgatgtctgctttggtcaccctgatgatgatagtgttttttatgaggacaactgggcacccccttaaatgactctcccaagatttctcttctctccacaccagacctcgttcatttgactaacattttccagcgcctactatgtgtcagaaacaagtgtttctgcctggacatcataaatggggacttggaccctgaggagagtcaggccacggtaagcccttcccagctgagatatgggtggcataatttgagtcttctggcaacatttggtgacctaccccatatccaatatttccagcgttagattgaggatgaggtagggaggtgatccagagaaggcggagaaggaagaagtaacctctgagtggcggctattgcttctgttccaggtgctgttcgagctgttagaacccttaggcttgacagctttgtgagttattattgaaaaatgaggattccaagagtcagaggagtttgataatgtgcacgagggcacactgctagtaaataacattaaaataactggaatgaa

SEQ ID NO: 193588 - DNA, 2114 bp, Homo sapiens
  Payload ID: 18223
  Gene Name: transmembrane protein 139
  Uniprot ID: Q8IV31
  ENST ID: ENST00000410004
  CDS Start-End: 245-895
tacagtctgtggagacaggtgagcgacgaacttctgagacagttgtgtccctgtggctttggtgcgcctgtgtgcactttctccctccacctggagcatgggctaacaccggaggaaaggaaaagacagagtcagacaggggcctgccccatcacctgaattccagagatgccagtgtgcactgaagccccaggcagggcgtgcccaggaccggatcctggatggtggagcctggggaggggccatggtgccaatgcacttactggggagactggagaagccgcttctcctcctgtgctgcgcctccttcctactggggctggctttgctgggcataaagacggacatcacccccgttgcttatttctttctcacattgggtggcttcttcttgtttgcctatctcctggtccggtttctggaatgggggcttcggtcccagctccaatcaatgcagactgagagcccagggccctcaggcaatgcacgggacaatgaagcctttgaagtgccagtctatgaagaggccgtggtgggactagaatcccagtgccgcccccaagagttggaccaaccacccccctacagcactgttgtgatacccccagcacctgaggaggaacaacctagccatccagaggggtccaggagagccaaactggaacagaggcgaatggcctcagaggggtccatggcccaggaaggaagccctggaagagctccaatcaaccttcggcttcggggaccacgggctgtgtccactgctcctgatctgcagagcttggcggcagtccccacattagagcctctgactccaccccctgcctatgatgtctgctttggtcaccctgatgatgatagtgttttttatgaggacaactgggcacccccttaaatgactctcccaagatttctcttctctccacaccagacctcgttcatttgactaacattttccagcgcctactatgtgtcagaaacaagtgtttctgcctggacatcataaatggggacttggaccctgaggagagtcaggccacggtaagcccttcccagctgagatatgggtggcataatttgagtcttctggcaacatttggtgacctaccccatatccaatatttccagcgttagattgaggatgaggtagggaggtgatccagagaaggcggagaaggaagaagtaacctctgagtggcggctattgcttctgttccaggtgctgttcgagctgttagaacccttaggcttgacagctttgtgagttattattgaaaaatgaggattccaagagtcagaggagtttgataatgtgcacgagggcacactgctagtaaataacattaaaataactggaatgaactcctgatcccaaagcctattgtgttttcaacacaaggtaataggaagccaagcaacttgcatgtctcccaatccctgtctagggacagctgctggtgcaggatggaagacttcctataaacagaatgggcgaccaattgtgtctacagagggggtgggctgagcatgggcacgcatgtccccagcctcctggacgagcaaagtcagtcaaagcgctggtgatccctgctccgcgtgcgtagcagtgtctgtgcctctcctgcccaggggctagagagcagtctccagtgcagggtccccatcctatctgaaaacagtggagtcagtgaccccaggtggagggacttccagttttaacaatgggttggtatgaaggccagaaggagtgaaacatgtgaactttctggcgaggagactccctcttgaatcatccatatgtagccccggggtcacttgcgaagagtctctaacagcttctgcctcactcctaagctctgaccgctaggctttcaccccagccgccggtcctgattcctgagatcccaatattgagcaccaggtttcctggaattgtgtgctgcggctgtgatgtaggtttcggtcgctggaagctgctaaaccatagctgacgccccctcctaagccagccttccttccccgcgcgggcatctgtccagggccttgtcgcgctctcagtctccttcgcagcctggccccaaccgttcaacttcaataaagcaaaactccagcca

SEQ ID NO: 193589 - DNA, 1226 bp, Homo sapiens
  Payload ID: 18223
  Gene Name: transmembrane protein 139
  Uniprot ID: Q8IV31
  ENST ID: ENST00000409102
  CDS Start-End: 109-759
atgaaagtgataatcaggcagcccaaatgattgttaataaggatcaaatgagatcgtgtatgtgggtccaatcaattgattctacacaaaggagcctggggaggggccatggtgccaatgcacttactggggagactggagaagccgcttctcctcctgtgctgcgcctccttcctactggggctggctttgctgggcataaagacggacatcacccccgttgcttatttctttctcacattgggtggcttcttcttgtttgcctatctcctggtccggtttctggaatgggggcttcggtcccagctccaatcaatgcagactgagagcccagggccctcaggcaatgcacgggacaatgaagcctttgaagtgccagtctatgaagaggccgtggtgggactagaatcccagtgccgcccccaagagttggaccaaccacccccctacagcactgttgtgatacccccagcacctgaggaggaacaacctagccatccagaggggtccaggagagccaaactggaacagaggcgaatggcctcagaggggtccatggcccaggaaggaagccctggaagagctccaatcaaccttcggcttcggggaccacgggctgtgtccactgctcctgatctgcagagcttggcggcagtccccacattagagcctctgactccaccccctgcctatgatgtctgctttggtcaccctgatgatgatagtgttttttatgaggacaactgggcacccccttaaatgactctcccaagatttctcttctctccacaccagacctcgttcatttgactaacattttccagcgcctactatgtgtcagaaacaagtgtttctgcctggacatcataaatggggacttggaccctgaggagagtcaggccacggtaagcccttcccagctgagatatgggtggcataatttgagtcttctggcaacatttggtgacctaccccatatccaatatttccagcgttagattgaggatgaggtagggaggtgatccagagaaggcggagaaggaagaagtaacctctgagtggcggctattgcttctgttccaggtgctgttcgagctgttagaacccttaggcttgacagctttgtgagttattattgaaaaatgaggattccaagagtcagaggagtttgataatgtgcacgagggcacactgctagtaaataacattaaaataactggaatgaa

SEQ ID NO: 193590 - DNA, 1907 bp, Homo sapiens
  Payload ID: 18223
  Gene Name: transmembrane protein 139
  Uniprot ID: Q8IV31
  ENST ID: ENST00000409541
  CDS Start-End: 39-689
ttctacagtctgtggagacaggagcctggggaggggccatggtgccaatgcacttactggggagactggagaagccgcttctcctcctgtgctgcgcctccttcctactggggctggctttgctgggcataaagacggacatcacccccgttgcttatttctttctcacattgggtggcttcttcttgtttgcctatctcctggtccggtttctggaatgggggcttcggtcccagctccaatcaatgcagactgagagcccagggccctcaggcaatgcacgggacaatgaagcctttgaagtgccagtctatgaagaggccgtggtgggactagaatcccagtgccgcccccaagagttggaccaaccacccccctacagcactgttgtgatacccccagcacctgaggaggaacaacctagccatccagaggggtccaggagagccaaactggaacagaggcgaatggcctcagaggggtccatggcccaggaaggaagccctggaagagctccaatcaaccttcggcttcggggaccacgggctgtgtccactgctcctgatctgcagagcttggcggcagtccccacattagagcctctgactccaccccctgcctatgatgtctgctttggtcaccctgatgatgatagtgttttttatgaggacaactgggcacccccttaaatgactctcccaagatttctcttctctccacaccagacctcgttcatttgactaacattttccagcgcctactatgtgtcagaaacaagtgtttctgcctggacatcataaatggggacttggaccctgaggagagtcaggccacggtaagcccttcccagctgagatatgggtggcataatttgagtcttctggcaacatttggtgacctaccccatatccaatatttccagcgttagattgaggatgaggtagggaggtgatccagagaaggcggagaaggaagaagtaacctctgagtggcggctattgcttctgttccaggtgctgttcgagctgttagaacccttaggcttgacagctttgtgagttattattgaaaaatgaggattccaagagtcagaggagtttgataatgtgcacgagggcacactgctagtaaataacattaaaataactggaatgaactcctgatcccaaagcctattgtgttttcaacacaaggtaataggaagccaagcaacttgcatgtctcccaatccctgtctagggacagctgctggtgcaggatggaagacttcctataaacagaatgggcgaccaattgtgtctacagagggggtgggctgagcatgggcacgcatgtccccagcctcctggacgagcaaagtcagtcaaagcgctggtgatccctgctccgcgtgcgtagcagtgtctgtgcctctcctgcccaggggctagagagcagtctccagtgcagggtccccatcctatctgaaaacagtggagtcagtgaccccaggtggagggacttccagttttaacaatgggttggtatgaaggccagaaggagtgaaacatgtgaactttctggcgaggagactccctcttgaatcatccatatgtagccccggggtcacttgcgaagagtctctaacagcttctgcctcactcctaagctctgaccgctaggctttcaccccagccgccggtcctgattcctgagatcccaatattgagcaccaggtttcctggaattgtgtgctgcggctgtgatgtaggtttcggtcgctggaagctgctaaaccatagctgacgccccctcctaagccagccttccttccccgcgcgggcatctgtccagggccttgtcgcgctctcagtctccttcgcagcctggccccaaccgttcaacttcaataaagcaaaactccagcc

SEQ ID NO: 193591 - DNA, 1997 bp, Homo sapiens
  Payload ID: 18224
  Gene Name: transmembrane protein 140
  Uniprot ID: Q9NV12
  ENST ID: ENST00000275767
  CDS Start-End: 224-781
agagagctgtttactaggcacgactgcgaaggcaagggggcaccagctcaggactgcatctgcctgccatttcccttccactcctcctttctggagtctgacattagaaagccagcgagaaggaagattcaaacaaccaaccctgatttcctgcttctccttttcatgagtgttcctgtggtctctgcacctcctttctgtcccccggcagagggcagtagagatggccggcccaaggcctcggtggcgcgaccagctgctgttcatgagcatcatagtcctcgtgattgtggtcatctgcctgatgttttacgctcttctctgggaggctggcaacctcactgacctgcccaacctgagaatcggcttctataacttctgcctgtggaatgaggacaccagcaccctacagtgtcaccagttccctgagctggaagccctgggggtgcctcgggttggcctgggcctggccaggcttggcgtgtacgggtccctggtcctcaccctctttgccccccagcctctcctcctagcccagtgcaacagtgatgagagagcgtggcggctggcagtgggcttcctggctgtgtcctctgtgctgctggcaggcggcctgggcctcttcctctcctatgtgtggaagtgggtcaggctctccctcccggggcctgggtttctagctctgggcagcgcccaggccttactcatcctcttgcttatagccatggctgtgttccctctgagggctgagagggctgagagcaagcttgagagctgctaaaggcttacgtgattgcaagggttcagttccaaccatggtcagaggtggcacatctgctcagccatctcattttacagctaacgctgatctccagctccagcgatggaacccactacagaggaggtggggcccctgtgtcaaagaggccgaggggcagcaagggcagccagggcacctgtgacttcttagtacaagattgtctgtccttcaggacttccaaggctcccaaagactccctaaaccatgcagctcattgtcacaccaattcctgctttaattaatggatctgagcaaatcttcctctagcttcaggagggtggggagggagtgattgctgtcatggggccagacttccaggctgatttgccaaatgccaaaatgaaacctagcaaagaacttacggcaacaaacgaggacattaaaagagcgagcacctcagtgtctctggggacatggttaaggagcttccactcagcccaccatagtgagtgggccgccataagccatcactggaactccaaccccagaggtccaggagtgatctctgagtgactcaacaaagacaggacacatggggtacaaagacaaggcttgactgcttcaaagcttccctggacctgaagccagacagggcagaggcgtccgctgacaaatcactcccatgatgagaccctggaggactccaaatcctcgctgtgaacaggactggacggctgcacacaaacaaacgctgccaccctccacttcccaacccagaacttggaaagacattagcacaacttacgcattggggaattgtgtgtattttctagcacttgtgtattggaaaacctgtatggcagtgatttattcatatattcctgtccaaagccacactgaaaacagaggcagagacatgtactctggtgtgatctcttgtcctcagtgtctcttctgggctcctgtccctcttgctttatagctagctgcccggggaccaaggtacaggtgaaagcaaggtagcagcttgcgggaggaggcctgtctggcttaccagtctatacactgtggcctcaacctcccagacagggcagagaactgtgggcagctcgtttgctttctaggctggctggagaggtgggagctcattgatagactcatgatggaaactatttttgaaacaggcttcctccttcaggagagatcatgcggactaaactgtagcaattccagtgca

SEQ ID NO: 193592 - DNA, 768 bp, Homo sapiens
  Payload ID: 18225
  Gene Name: transmembrane protein 141
  Uniprot ID: Q96I45
  ENST ID: ENST00000290079
  CDS Start-End: 17-343
ccgagccctgccaaccatggtgaacttgggtctgtcccgggtggacgacgccgtggctgccaagcacccgggactcggggagtatgccgcatgccagtcacacgccttcatgaagggcgttttcaccttcgtcacaggcaccggcatggcctttggcttgcagatgttcattcagaggaagtttccataccctttgcagtggagcctcctagtggccgtggttgcaggctctgtggtcagctacggggtgacgagagtggagtcggagaaatgcaacaacctctggctcttcctggagaccgggcagctccccaaagacaggagcacagatcagagaagctaggagagctccagcaggggcacagaggattgggggcaggaggagtctggaacacagccttcatgccccctgaccccaggccgaccctccccacaccctagggtaccccagtcgtatcctctgtccgcatgtgtggccaggcctgacaaacacctgcagatggctgctgccccaacctgggacctgcccaggaggttggagcagaaagggctctccctggggtggtgtttctcctctagggtattgggatgcatgttctgcactgccagcagagagggtgtgtctgggggccaccacctatgggacacggggtcgaaggggcctgtacactctgtcatttcctttctagcccctgcatctccaacaagtccaaggtgacagctggtgctaggggcgtggggttaataaatggcttatccttctctcca

SEQ ID NO: 193593 - DNA, 2560 bp, Homo sapiens
  Payload ID: 18226
  Gene Name: transmembrane protein 143
  Uniprot ID: Q96AN5
  ENST ID: ENST00000293261
  CDS Start-End: 318-1697
aacgttggactgcgcgccgttggcggactgcgcgcgggagccctaccccgccccatccctctagggagtctcgcgtccacaccgccccttccctttgtagcaagctgacaaggagacactcctgcggcgcatgcgtcgcgcccaaacgaggccggcggtggagaaaggcaggcaacgcatgcgtagttgatgtagggagtcggcggtgagaaatggacagcccgcattgaccgaagctttgcgcatgcgttttactgctgggtgaagccgaacctcgggagcccaggacgccctcctgcacatgcgcaggaggctcaatgacagtcgagctttggctaaggctccggggaaagggtctagccatgctgcatgtgacccggggggtctgggggtccagggtccgagtatggccactgttgcccgcgctcctcgggcccccccgggccctctcatcgctggcagccaaaatgggggagtatcgcaagatgtggaaccccagggagccccgcgactgggcccagcagtaccgcgagcgcttcattcccttctccaaggagcagctgctccgcctcctaatacaggaattccactcgagtccggcagagaaggcggctttggaggcgttctcggcccacgtggacttctgcaccctgttccactaccaccaaatcctggcccggctgcaggccttatatgaccccatcaaccctgacagggagaccctcgatcagccatcactaacggatccccagcgtctgtctaatgagcaggaggtgcttcgggctctggagcccctgctggcccaggccaacttctccccgctgtctgaggacaccctggcctacgcgctggtggtccaccaccctcaggatgaggtccaggtgacagtaaatttggatcagtatgtctacattcacttctgggccctgggccagcgagtcgggcagatgcccctgaagtccagcgtgggctccaggcgtggcttcttcaccaagctgccccctgcggagaggagatactttaagcgggtggtcctggcagcccggaccaaacggggacacctggtactgaagagtttcaaggacacgccgctggaaggcctggagcagctgctgccggagctgaaggtgcgcacgcccaccctgcagcgcgccctgctcaacctcatgctggtagtctccggcgtggcgatcttcgtcaacgtgggcatggtggtgctaaccgacctcaaggtggccacctccctgctgctgctgctcttcgccatcttcatgggcctgcgggcctccaagatgttcgggcagcggcgcagcgcgcaggcgttggagctggcgcacatgctgtactatcgcagtacgtccaacaactcggagctgctcagcgccctggccctgcgcgcgcaggacgagcacaccaaggaggcgctgctggctcacagcttcctggcccggcggccagggggcactcaaggctcgcccgaagagacctccaggtggctccggtcggaggtggagaactggctcctagccaagtcaggctgtgaggtgaccttcaacggaactcgggccctggcgcatctgcaggccctgacccccagcatgggattgtacccacccccgggtttccccaaactagacccagtggctccgatcacttccgagcccccgcaagccacgcccagcagtaacatctcctgagtagaacctacctccctgcccagtcagcaggctaggaactaagccccgcctccttcacgacaggctgtcaattacggttattatacttttcactccaacttccaataactgacaggtgattatttttgctgcactgtgtgcttaagcaaagcagccaatcaaagcagctagcagttgttaagtcttccccgccccttcgatgaacagccaatcaaagcgatttagctctgcttctgttccatttcttagtcccaccctcaccataaacatccaagtgtggtttggctgaggagctgagggtgtctgccaatcacagctgctcagctctggcttctgtaaaccgccaggtagaagagttaaagctgcgccctcccgagactatatatcattgtctttttcagcccgctccgggcaaactgcccatcatgtgcaccaaggccgttagccctgcctcctggcaaacgtccagtgacagctgctgggttccatcaactttgggcagccggttgtcgctgcagggaaggaaccaataagaatttctaaaggaaacctgatcttgctatcaattgctgctgcttaaatggcaggccaactggtcagctgctgatcagggtgtctaggctgaaggagttggagaccttgtgctaggtaggtgaaccagaaaccaccctcgccaccaagactcgctcccaacctggctcccggcaacctcaggtgccttcctcgcccaggtctttcaccctttctacagaaactacctcggtctggatctccccaccaccagcagcctgtgcaatatttattggtctatcaatttctcccgtctcctgtcccaaagtaataaatcatgtttaataagtctg

SEQ ID NO: 193594 - DNA, 1960 bp, Homo sapiens
  Payload ID: 18226
  Gene Name: transmembrane protein 143
  Uniprot ID: Q96AN5
  ENST ID: ENST00000377431
  CDS Start-End: 19-1098
acatgcgcaggaggctcaatgacagtcgagctttggctaaggctccggggaaagggtctagccatgctgcatgtgacccggggggtctgggggtccagggtccgagtatggccactgttgcccgcgctcctcgggcccccccgggccctctcatcgctggcagccaaaatgggggagtatcgcaagatgtggaaccccagggagccccgcgactgggcccagcagtaccgcgagcgcttcattcccttctccaaggagcagctgctccgcctcctaatacaggtgacagtaaatttggatcagtatgtctacattcacttctgggccctgggccagcgagtcgggcagatgcccctgaagtccagcgtgggctccaggcgtggcttcttcaccaagctgccccctgcggagaggagatactttaagcgggtggtcctggcagcccggaccaaacggggacacctggtactgaagagtttcaaggacacgccgctggaaggcctggagcagctgctgccggagctgaaggtgcgcacgcccaccctgcagcgcgccctgctcaacctcatgctggtagtctccggcgtggcgatcttcgtcaacgtgggcatggtggtgctaaccgacctcaaggtggccacctccctgctgctgctgctcttcgccatcttcatgggcctgcgggcctccaagatgttcgggcagcggcgcagcgcgcaggcgttggagctggcgcacatgctgtactatcgcagtacgtccaacaactcggagctgctcagcgccctggccctgcgcgcgcaggacgagcacaccaaggaggcgctgctggctcacagcttcctggcccggcggccagggggcactcaaggctcgcccgaagagacctccaggtggctccggtcggaggtggagaactggctcctagccaagtcaggctgtgaggtgaccttcaacggaactcgggccctggcgcatctgcaggccctgacccccagcatgggattgtacccacccccgggtttccccaaactagacccagtggctccgatcacttccgagcccccgcaagccacgcccagcagtaacatctcctgagtagaacctacctccctgcccagtcagcaggctaggaactaagccccgcctccttcacgacaggctgtcaattacggttattatacttttcactccaacttccaataactgacaggtgattatttttgctgcactgtgtgcttaagcaaagcagccaatcaaagcagctagcagttgttaagtcttccccgccccttcgatgaacagccaatcaaagcgatttagctctgcttctgttccatttcttagtcccaccctcaccataaacatccaagtgtggtttggctgaggagctgagggtgtctgccaatcacagctgctcagctctggcttctgtaaaccgccaggtagaagagttaaagctgcgccctcccgagactatatatcattgtctttttcagcccgctccgggcaaactgcccatcatgtgcaccaaggccgttagccctgcctcctggcaaacgtccagtgacagctgctgggttccatcaactttgggcagccggttgtcgctgcagggaaggaaccaataagaatttctaaaggaaacctgatcttgctatcaattgctgctgcttaaatggcaggccaactggtcagctgctgatcagggtgtctaggctgaaggagttggagaccttgtgctaggtaggtgaaccagaaaccaccctcgccaccaagactcgctcccaacctggctcccggcaacctcaggtgccttcctcgcccaggtctttcaccctttctacagaaactacctcggtctggatctccccaccaccagcagcctgtgcaatatttattggtctatcaatttctcccgtctcctgtcccaaagtaataaatcatgtttaataagtct

SEQ ID NO: 193595 - DNA, 2272 bp, Homo sapiens
  Payload ID: 18226
  Gene Name: transmembrane protein 143
  ENST ID: ENST00000435956
  CDS Start-End: 140-1414
atgcgtagttgatgtagggagtcggcggtgagaaatggacagcccgcattgaccgaagctttgcgcatgcgttttactgctgggtgaagccgaacctcgggagcccaggacgccctcctgcacatgcgcaggaggctcaatgacagtcgagctttggctaaggctccggggaaagggtctagccatgctgcatgtgacccggggggtctgggggtccagggtccgagtatggccactgttgcccgcgctcctcgggcccccccgggccctctcatcgctggcagccaaaatgggggagtatcgcaagatgtggaaccccagggagccccgcgactgggcccagcagtaccgcgagcgcttcattcccttctccaaggagcagctgctccgcctcctaatacaggccttatatgaccccatcaaccctgacagggagaccctcgatcagccatcactaacggatccccagcgtctgtctaatgagcaggaggtgcttcgggctctggagcccctgctggcccaggccaacttctccccgctgtctgaggacaccctggcctacgcgctggtggtccaccaccctcaggatgaggtccaggtgacagtaaatttggatcagtatgtctacattcacttctgggccctgggccagcgagtcgggcagatgcccctgaagtccagcgtgggctccaggcgtggcttcttcaccaagctgccccctgcggagaggagatactttaagcgggtggtcctggcagcccggaccaaacggggacacctggtactgaagagtttcaaggacacgccgctggaaggcctggagcagctgctgccggagctgaaggtgcgcacgcccaccctgcagcgcgccctgctcaacctcatgctggtagtctccggcgtggcgatcttcgtcaacgtgggcatggtggtgctaaccgacctcaaggtggccacctccctgctgctgctgctcttcgccatcttcatgggcctgcgggcctccaagatgttcgggcagcggcgcagcgcgcaggcgttggagctggcgcacatgctgtactatcgcagtacgtccaacaactcggagctgctcagcgccctggccctgcgcgcgcaggacgagcacaccaaggaggcgctgctggctcacagcttcctggcccggcggccagggggcactcaaggctcgcccgaagagacctccaggtggctccggtcggaggtggagaactggctcctagccaagtcaggctgtgaggtgaccttcaacggaactcgggccctggcgcatctgcaggccctgacccccagcatgggattgtacccacccccgggtttccccaaactagacccagtggctccgatcacttccgagcccccgcaagccacgcccagcagtaacatctcctgagtagaacctacctccctgcccagtcagcaggctaggaactaagccccgcctccttcacgacaggctgtcaattacggttattatacttttcactccaacttccaataactgacaggtgattatttttgctgcactgtgtgcttaagcaaagcagccaatcaaagcagctagcagttgttaagtcttccccgccccttcgatgaacagccaatcaaagcgatttagctctgcttctgttccatttcttagtcccaccctcaccataaacatccaagtgtggtttggctgaggagctgagggtgtctgccaatcacagctgctcagctctggcttctgtaaaccgccaggtagaagagttaaagctgcgccctcccgagactatatatcattgtctttttcagcccgctccgggcaaactgcccatcatgtgcaccaaggccgttagccctgcctcctggcaaacgtccagtgacagctgctgggttccatcaactttgggcagccggttgtcgctgcagggaaggaaccaataagaatttctaaaggaaacctgatcttgctatcaattgctgctgcttaaatggcaggccaactggtcagctgctgatcagggtgtctaggctgaaggagttggagaccttgtgctaggtaggtgaaccagaaaccaccctcgccaccaagactcgctcccaacctggctcccggcaacctcaggtgccttcctcgcccaggtctttcaccctttctacagaaactacctcggtctggatctccccaccaccagcagcctgtgcaatatttattggtctatcaatttctcccgtctcctgtcccaaagtaataaatcatgtttaataa

SEQ ID NO: 193596 - DNA, 571 bp, Homo sapiens
  Payload ID: 18226
  Gene Name: transmembrane protein 143
  ENST ID: ENST00000601522
  CDS Start-End: 166-571
aggcaacaggggctttgaggcgagcggatgggctctgcgccctgcctggggtagagacggcttctggagggtgggacgtggaggtggagagggcgcttttcctctagatggcctttgacccctgcccattttcctctgtttaggctccggggaaagggtctagccatgctgcatgtgacccggggggtctgggggtccagggtccgagtatggccactgttgcccgcgctcctcgggcccccccgggccctctcatcgctggcagccaaaatgggggagtatcgcaagatgtggaaccccagggagccccgcgactgggcccagcagtaccgcgagcgcttcattcccttctccaaggagcagctgctccgcctcctaatacaggaattccactcgagtccggcagagaaggcggctttggaggcgttctcggcccacgtggacttctgcaccctgttccactaccaccaaatcctggcccggctgcaggccttatatgaccccatcaaccctgacagggagaccctcgatcagccatcactaacggatccccagcgtctgtctaatgagc

SEQ ID NO: 193597 - DNA, 565 bp, Homo sapiens
  Payload ID: 18226
  Gene Name: transmembrane protein 143
  ENST ID: ENST00000599220
  CDS Start-End: 19-327
acatgcgcaggaggctcaatgacagtcgagctttggctaaggctccggggaaagggtctagccatgctgcatgtgacccggggggtctgggggtccagggtccgagtatggccactgttgcccgcgctcctcgggcccccccgggccctctcatcgctggcagccaaaatgggggagtatcgcaagatgtggaaccccagggagccccgcgactgggcccagcagtaccgcgagcgcttcattcccttctccaaggagcagctgctccgcctcctaatacagagacaggatttcaccatgttggccacgctggtcttgaactcctgacttcaagtgatccactgcctcggcctcccaaagtgctgggattacaggaattccactcgagtccggcagagaaggcggctttggaggcgttctcggcccacgtggacttctgcaccctgttccactaccaccaaatcctggcccggctgcaggccttatatgaccccatcaaccctgacagggagaccctcgatcagccatcactaacggatccccagcgtctgtctaatgagcagga

SEQ ID NO: 193598 - DNA, 541 bp, Homo sapiens
  Payload ID: 18226
  Gene Name: transmembrane protein 143
  ENST ID: ENST00000598926
  CDS Start-End: 30-541
acaggcaacaggggctttgaggcgagcggatgggctctgcgccctgcctggggctccggggaaagggtctagccatgctgcatgtgacccggggggtctgggggtccagggtccgagtatggccactgttgcccgcgctcctcgggcccccccgggccctctcatcgctggcagccaaaatgggggagtatcgcaagatgtggaaccccagggagccccgcgactgggcccagcagtaccgcgagcgcttcattcccttctccaaggagcagctgctccgcctcctaatacaggaattccactcgagtccggcagagaaggcggctttggaggcgttctcggcccacgtggacttctgcaccctgttccactaccaccaaatcctggcccggctgcaggtgacagtaaatttggatcagtatgtctacattcacttctgggccctgggccagcgagtcgggcagatgcccctgaagtccagcgtgggctccaggcgtggcttcttcaccaagctgccccctgcggagaggagatactttaa

SEQ ID NO: 193599 - DNA, 748 bp, Homo sapiens
  Payload ID: 18226
  Gene Name: transmembrane protein 143
  ENST ID: ENST00000597370
  CDS Start-End: 2-283
aatgacagtcgagctttggctaaggctccggggaaagggtctagccatgctgcatgtgacccggggggtctgggggtccagggtccgagtatggccactgttgcccgcgctcctcgggcccccccgggccctctcatcgctggcagccaaaatgggggagtatcgcaagatgtggaaccccagggagccccgcgactgggcccagcagtaccgcgagcgcttcattcccttctccaaggagcagctgctccgcctcctaatacagagtcttgatgttgtctagtctggagggcagtggcacgatctcgactcactgcagcctccgcctccctggttcaagcaattctccagcttcagcctcctgagtagctgggactacaggtgcatgccatcacgcccggctaatttttgtatttttagtagagacaggatttcaccatgttggccacgctggtcttgaactcctgacttcaagtgatccactgcctcggcctcccaaagtgctgggattacaggccttatatgaccccatcaaccctgacagggagaccctcgatcagccatcactaacggatccccagcgtctgtctaatgagcaggaggtgcttcgggctctggagcccctgctggcccaggccaacttctccccgctgtctgaggacaccctggcctacgcgctggtggtccaccaccctcaggatgaggtccaggtgacagtaaatttggatcagtatgtctacattcactt

SEQ ID NO: 193600 - DNA, 3442 bp, Homo sapiens
  Payload ID: 18227
  Gene Name: transmembrane protein 144
  Uniprot ID: Q7Z5S9
  ENST ID: ENST00000296529
  CDS Start-End: 521-1558
aacctgctgtcctatgaaggcctctaggtcaccggtgctaaagccctcctttctccaccctccttaagtggaggtaaacgtcccagcaggaagtcaaggctggattggcgctcttcgcgagcaccctgggaacgggagtctgggtcacgggtgctagagccctcccctctcctcccggccggtgtatgggaaattgtccccgcagaaagtaaaggctggccaggccgcccccagcacgtagagggaatgagtcaggctccggctccacactggcacgtagtgggcggatcgcgccggcgctgagtaggaaggagcttcagccgccagcccggaacgcatcataggttagcttttcaagacacttcctgcatctctgacctgttgcacctctgttatcttggcacctctgttatcttagcagcaagcacctgcctcagctgacccttgagccataacccataagctcctgaaaagtacatcaagtctaaagtgaaccagctaactcattaagactggaatcatgagcaacaatggagcagacctaacctttggttacatctcctgttttgtagctatccttttgtttggctcaaattttgtgccacttaaaaaatttgatactggtgatggaatgtttctccagtgggttctttgtgctgccatatggttggttgccttggttgtcaatctgatattacattgtccaaagttttggccttttgcaatgcttgggggctgcatttgggcaacagggaacattgctgttgtcccaattatcaaaaccattggtttaggccttggaatcttaatctggggatcatttaatgccttaactggctgggcaagctcaaggtttggctggtttggattggatgcagaagaagtatcaaatccgctgctaaattacattggagctgggctatcagtagtaagtgctttcatatttttgttcatcaaaagtgaaataccaaataacacgtgttccatggataccactccattaataacagagcatgtgatcaacacaacccaagacccctgttcctgggtggataaactttctacagtacaccaccgcatagtgggctgcagtcttgcagtgatatctggagtactctatggatctacatttgtgccaatcatctacatcaaggaccacagcaaaagaaatgatagtatatatgcaggggcaagccaatatgatttagactatgtgtttgcgcacttcagtggcatctttcttacaagtactgtctactttctggcctactgcatagccatgaaaaatagtcctaaactatatcctgaagcagtcctaccaggattcctgtcaggagtactttgggctatagctacctgctgttggttcatagcaaatcactctctgagtgctgtggtcagttttccaataatcactgctggtccaggatttatagctgcaatgtggggtatcttcatgtttaaggaaataaagggtctacaaaactacctattaatgatacttgcattttgcatcatcttgactggagccttatgcactgctttttctaaaatctaacaatgacaaaaccagcaggtggcagcagtagttaagagaacgcgtctatcggacagcggagagatcatgctgagaaaagagtgcattttcatatagcaaatggatctcagccactgttggagtgggtaaatgatttttttccccaaaaatgtgagaatgaaggaagattgagtttcattcaagtataaaaatgaaaatttcttctgatgaactgtttatgaaggtagtactttactgggtgactaaaatgtctacattattatagcattacatacgaggatgctctttttaccacagtatgtacctagtgttgcataatctagaacacagtatagagtccatatacaaagaagttacagtccatatttctcacctattaccccagtgaagtgaggcagaaataccttgggcgaggagggagagccttaccttctaatggaattagattccaaagatatttggatcctttgtttcataaagtaaatgcatagttggtaactaaatgttaaaaaggccattttattattgttagccaaaacttctgtttatttcaagttaatatcgcccaactctacatcatctacccattttagctcataatgcttttgattatcgccagataaagtccattctcagagaacaaaaatttttcatcattgagaaaatgtgcataacataatacatacatacacaagtatattcacgtacataaatacacacagatatgttgctaaagtgagattgtaggttatcagtaacaatttaaaggaaacaaccactcttttgaatgtacaacttttttttctgaaatacacttttctaaaaccctcttaactggaggtttcctgttttcttcttgttttaactggtggtttccagtaggcaaaataaaatgacaggcatgctagttttttttttttttttttttttttaagaaaactgaaattaagccaggcagggtggcgcactactataatcccagctgctggggcggctgaagtaggagggtcacttagcccaagagtgcaaatctgccagcctaggcaacatagcaaggtcccatctctaaaaaagaaatttaatttaaatttgtaagaaaaaagaaaactgaaacagaactgccagtacaatgtttgttgcaattgtttccaaaactttgagataacgaaacccctattcaaatgtaaattttacccattcccacctgatagtactgtttattactttgctatgcaggagaaacaaaacagctttttatttgtgtgtatactctgaagtcaatgtgcatgggttaaatcccacctctgcttcattttatttgtgtggctttggacaagttcctaagccctctgtgtcaggcccctcattaacaaaatggagtttatgatggcatctacctcacatggttattgtgtggttgaaattagttcaaatctgtaaagtatgttgatgagtatctggtacttggcaaacactatataattgttagctttattattatgtgttgtttgaaggggaaaaaagtttttgtagattggagaacaccatgtaagagctactaagctcaccaccttcccatccaaacaattattactcctctaaatgaatactacttaaaagtgatggagcttctgtttgtttattgaattgctaatacaaataaatatttgactataacttcttatactcattttaattttaacctgaaatgtcattaaattatgctgataaactttgaataaattgtgatacaaaagctatttttctcatttaaatatattttagaattttatattggataacttttaattattctttagttgggatttccaatttatatgcaaaattttaaatgtgaagtaaagcagtttcagaagaaaaatg

SEQ ID NO: 193601 - DNA, 2861 bp, Homo sapiens
  Payload ID: 18227
  Gene Name: transmembrane protein 144
  ENST ID: ENST00000511532
  CDS Start-End: 215-799
ggaaggagcttcagccgccagcccggaacgcatcataggttagcttttcaagacacttcctgcatctctgacctgttgcacctctgttatcttggcacctctgttatcttagcagcaagcacctgcctcagctgacccttgagccataacccataagctcctgaaaagtacatcaagtctaaagtgaaccagctaactcattaagactggaatcatgagcaacaatggagcagacctaacctttggttacatctcctgttttgtagctatccttttgtttggctcaaattttgtgccacttaaaaaatttgatactggtgatggaatgtttctccagtgggttctttgtgctgccatatggttggttgccttggttgtcaatctgatattacattgtccaaagttttggccttttgcaatgcttgggggctgcatttgggcaacagggaacattgctgttgtcccaattatcaaaaccattggtttaggccttggaatcttaatctggggatcatttaatgccttaactggctgggcaagctcaaggtttggctggtttggattggatgcagaagaagtatcaaatccgctgctaaattacattggagctgggctatcagtagtaagtgctttcatatttttgttcatcaaaagtgaaataccaaataacacgtgttccatggataccactccattaataacagagcatgggctgcagtcttgcagtgatatctggagtactctatggatctacatttgtgccaatcatctacatcaaggaccacagcaaaagaaatgatagtatatatgcaggggcaagccaatatgatttagactatgtgtttgcgcacttcagtggcatctttcttacaagtactgtctactttctggcctactgcatagccatgaaaaatagtcctaaactatatcctgaagcagtcctaccaggattcctgtcaggagtactttgggctatagctacctgctgttggttcatagcaaatcactctctgagtgctgtggtcagttttccaataatcactgctggtccaggatttatagctgcaatgtggggtatcttcatgtttaaggaaataaagggtctacaaaactacctattaatgatacttgcattttgcatcatcttgactggagccttatgcactgctttttctaaaatctaacaatgacaaaaccagcaggtggcagcagtagttaagagaacgcgtctatcggacagcggagagatcatgctgagaaaagagtgcattttcatatagcaaatggatctcagccactgttggagtgggtaaatgatttttttccccaaaaatgtgagaatgaaggaagattgagtttcattcaagtataaaaatgaaaatttcttctgatgaactgtttatgaaggtagtactttactgggtgactaaaatgtctacattattatagcattacatacgaggatgctctttttaccacagtatgtacctagtgttgcataatctagaacacagtatagagtccatatacaaagaagttacagtccatatttctcacctattaccccagtgaagtgaggcagaaataccttgggcgaggagggagagccttaccttctaatggaattagattccaaagatatttggatcctttgtttcataaagtaaatgcatagttggtaactaaatgttaaaaaggccattttattattgttagccaaaacttctgtttatttcaagttaatatcgcccaactctacatcatctacccattttagctcataatgcttttgattatcgccagataaagtccattctcagagaacaaaaatttttcatcattgagaaaatgtgcataacataatacatacatacacaagtatattcacgtacataaatacacacagatatgttgctaaagtgagattgtaggttatcagtaacaatttaaaggaaacaaccactcttttgaatgtacaacttttttttctgaaatacacttttctaaaaccctcttaactggaggtttcctgttttcttcttgttttaactggtggtttccagtaggcaaaataaaatgacaggcatgctagttttttttttttttttttttttttaagaaaactgaaattaagccaggcagggtggcgcactactataatcccagctgctggggcggctgaagtaggagggtcacttagcccaagagtgcaaatctgccagcctaggcaacatagcaaggtcccatctctaaaaaagaaatttaatttaaatttgtaagaaaaaagaaaactgaaacagaactgccagtacaatgtttgttgcaattgtttccaaaactttgagataacgaaacccctattcaaatgtaaattttacccattcccacctgatagtactgtttattactttgctatgcaggagaaacaaaacagctttttatttgtgtgtatactctgaagtcaatgtgcatgggttaaatcccacctctgcttcattttatttgtgtggctttggacaagttcctaagccctctgtgtcaggcccctcattaacaaaatggagtttatgatggcatctacctcacatggttattgtgtggttgaaattagttcaaatctgtaaagtatgttgatgagtatctggtacttggcaaacactatataattgttagctttattattatgtgttgtttgaaggggaaaaaagtttttgtagattggagaacaccatgtaagagctactaagctcaccaccttcccatccaaacaattattactcctctaaatgaatactacttaaaagtgatggagcttctgtttgtttattgaattgctaatacaaataaatatttgactataa

SEQ ID NO: 193602 - DNA, 535 bp, Homo sapiens
  Payload ID: 18227
  Gene Name: transmembrane protein 144
  ENST ID: ENST00000503200
  CDS Start-End: 204-535
gtagagggaatgagtcaggctccggctccacactggcacgtagtgggcggatcgcgccggcgctgagtaggaaggagcttcagccgccagcccggaacgcacagcaagcacctgcctcagctgacccttgagccataacccataagctcctgaaaagtacatcaagtctaaagtgaaccagctaactcattaagactggaatcatgagcaacaatggagcagacctaacctttggttacatctcctgttttgtagctatccttttgtttggctcaaattttgtgccacttaaaaaatttgatactggtgatggaatgtttctccagtgggttctttgtgctgccatatggttggttgccttggttgtcaatctgatattacattgtccaaagttttggccttttgcaatgcttgggggctgcatttgggcaacagggaacattgctgttgtcccaattatcaaaaccattggtttaggccttggaatcttaatctggggatcatttaatgccttaactggctgggcaagctcaag

SEQ ID NO: 193603 - DNA, 764 bp, Homo sapiens
  Payload ID: 18227
  Gene Name: transmembrane protein 144
  ENST ID: ENST00000505189
  CDS Start-End: 504-764
agtgacattccatgagacaagcagtcctgtggtgaggcccatgtcaagaaggcctgagatctcccaccatcagctacagccaatttgtcagtcacagatcctcaaaatgagcagcagatacactcagtctgtaggatcatttagcaactcggggaaggaggtcataggttagcttttcaagacacttcctgcatctctgacctgttgcacctctgttatcttggcacctctgttatcttagcagcaagcacctgcctcagctgacccttgagccataacccatagggcttattccaaagggccagtgtgcaaaatatgaatccaagatggcattgtggaaagacgctgtacctcctgtgataaaattactttggtggtgcttttttctcatgtatctcgggaaactaaaaatctgaattgtattcagtggccttttccaaatgaagctcctgaaaagtacatcaagtctaaagtgaaccagctaactcattaagactggaatcatgagcaacaatggagcagacctaacctttggttacatctcctgttttgtagctatccttttgtttggctcaaattttgtgccacttaaaaaatttgatactggtgatggaatgtttctccagtgggttctttgtgctgccatatggttggttgccttggttgtcaatctgatattacattgtccaaagttttggccttttgcaatgcttgggggctgcatttgggcaacagggaacattgctgttgtcccaattatcaaa

SEQ ID NO: 193604 - DNA, 576 bp, Homo sapiens
  Payload ID: 18227
  Gene Name: transmembrane protein 144
  ENST ID: ENST00000504569
  CDS Start-End: 164-576
acgtagagggaatgagtcaggctccggctccacactggcacgtagtgggcggatcgcgccggcgctgagtaggaaggagcttcagccgccagcccggaacgcaaagctcctgaaaagtacatcaagtctaaagtgaaccagctaactcattaagactggaatcatgagcaacaatggagcagacctaacctttggttacatctcctgttttgtagctatccttttgtttggctcaaattttgtgccacttaaaaaatttgatactggtgatggaatgtttctccagtgggttctttgtgctgccatatggttggttgccttggttgtcaatctgatattacattgtccaaagttttggccttttgcaatgcttgggggctgcatttgggcaacagggaacattgctgttgtcccaattatcaaaaccattggtttaggccttggaatcttaatctggggatcatttaatgccttaactggctgggcaagctcaaggtttggctggtttggattggatgcagaagaagtatcaaatccgctgctaaattacattggagctgggctatcagtagtaag

SEQ ID NO: 193605 - DNA, 546 bp, Homo sapiens
  Payload ID: 18227
  Gene Name: transmembrane protein 144
  ENST ID: ENST00000511038
  CDS Start-End: 516-546
atgagacaagcagtcctgtggtgaggcccatgtcaagaaggcctgagatctcccaccatcagctacagccaatttgtcagtcactcatcatttctcattatacacagagatcctcaaaatgagcagcagatacactcagtctgtaggatcatttagcaactcggggaaggaggtcataggttagcttttcaagacacttcctgcatctctgacctgttgcacctctgttatcttggcacctctgttatcttagcagcaagcacctgcctcagctgacccttgagccataacccatagggcttattccaaagggccagtgtgcaaaatatgaatccaagatggcattgtggaaagacgctgtacctcctgtgataaaattactttggtggtgcttttttctcatgtatctcgggaaactaaaaatctgaattgtattcagtggccttttccaaatgaagctcctgaaaagtacatcaagtctaaagtgaaccagctaactcattaagactggaatcatgagcaacaatggagcagacctaacctttg

SEQ ID NO: 193606 - DNA, 1070 bp, Homo sapiens
  Payload ID: 18227
  Gene Name: transmembrane protein 144
  ENST ID: ENST00000508243
  CDS Start-End: 570-1070
ttttgagccacctgacaattcagtccagcacagcaactgaaggaaggcgttccccaacctgctgtcctatgaaggcctctaggtcaccggtgctaaagccctcctttctccaccctccttaagtggaggtaaacgtcccagcaggaagtcaaggctggattggcgctcttcgcgagcaccctgggaacgggagtctgggtcacgggtgctagagccctcccctctcctcccggccggtgtatgggaaattgtccccgcagaaagtaaaggctggccaggccgcccccagcacgtagagggaatgagtcaggctccggctccacactggcacgtagtgggcggatcgcgccggcgctgagtaggaaggagcttcagccgccagcccggaacgcagttagcttttcaagacacttcctgcatctctgacctgttgcacctctgttatcttggcacctctgttatcttagcagcaagcacctgcctcagctgacccttgagccataacccataagctcctgaaaagtacatcaagtctaaagtgaaccagctaactcattaagactggaatcatgagcaacaatggagcagacctaacctttggttacatctcctgttttgtagctatccttttgtttggctcaaattttgtgccacttaaaaaatttgatactggtgatggaatgtttctccagtgggttctttgtgctgccatatggttggttgccttggttgtcaatctgatattacattgtccaaagttttggccttttgcaatgcttgggggctgcatttgggcaacagggaacattgctgttgtcccaattatcaaaaccattggtttaggccttggaatcttaatctggggatcatttaatgccttaactggctgggcaagctcaaggtttggctggtttggattggatgcagaagaagtatcaaatccgctgctaaattacattggagctgggctatcagtagtaagtgctttcatatttttgttcatcaaaagtgaaataccaaataacacgtgttccatggataccactccattaataacagagcatgtgatc

SEQ ID NO: 193607 - DNA, 525 bp, Homo sapiens
  Payload ID: 18227
  Gene Name: transmembrane protein 144
  ENST ID: ENST00000514971
  CDS Start-End: 253-525
agtctctccgtttcagaggtgtagggcctttgtggagccttctcaataaaataatttgccactcttgaagtcataggttagcttttcaagacacttcctgcatctctgacctgttgcacctctgttatcttggcacctctgttatcttagcagcaagcacctgcctcagctgacccttgagccataacccataagctcctgaaaagtacatcaagtctaaagtgaaccagctaactcattaagactggaatcatgagcaacaatggagcagacctaacctttggttacatctcctgttttgtagctatccttttgtttggctcaaattttgtgccacttaaaaaatttgatactggtgatggaatgtttctccagtgggttctttgtgctgccatatggttggttgccttggttgtcaatctgatattacattgtccaaagttttggccttttgcaatgcttgggggctgcatttgggcaacagggaacattgctgttgtcccaattatcaaaaccattggttta

SEQ ID NO: 193608 - DNA, 731 bp, Homo sapiens
  Payload ID: 18227
  Gene Name: transmembrane protein 144
  ENST ID: ENST00000512481
  CDS Start-End: 471-731
aaaggctggccaggccgcccccagcacgtagagggaatgagtcaggctccggctccacactggcacgtagtgggcggatcgcgccggcgctgagtaggaaggagcttcagccgccagcccggaacgcatcataggttagcttttcaagacacttcctgcatctctgacctgttgcacctctgttatcttggcacctctgttatcttagcagcaagcacctgcctcagctgacccttgagccataacccatagggcttattccaaagggccagtgtgcaaaatatgaatccaagatggcattgtggaaagacgctgtacctcctgtgataaaattactttggtggtgcttttttctcatgtatctcgggaaactaaaaatctgaattgtattcagtggccttttccaaatgaagctcctgaaaagtacatcaagtctaaagtgaaccagctaactcattaagactggaatcatgagcaacaatggagcagacctaacctttggttacatctcctgttttgtagctatccttttgtttggctcaaattttgtgccacttaaaaaatttgatactggtgatggaatgtttctccagtgggttctttgtgctgccatatggttggttgccttggttgtcaatctgatattacattgtccaaagttttggccttttgcaatgcttgggggctgcatttgggcaacagggaacattgctgttgtcccaattatcaaa

SEQ ID NO: 193609 - DNA, 575 bp, Homo sapiens
  Payload ID: 18227
  Gene Name: transmembrane protein 144
  ENST ID: ENST00000505049
  CDS Start-End: 344-575
agtgacattccatgagacaagcagtcctgtggtgaggcccatgtcaagaaggcctgagatctcccaccatcagctacagccaatttgtcagtcacagatcctcaaaatgagcagcagatacactcagtctgtaggatcatttagcaactcggggaaggaggtcataggttagcttttcaagacacttcctgcatctctgacctgttgcacctctgttatcttggcacctctgttatcttagcagcaagcacctgcctcagctgacccttgagccataacccataagctcctgaaaagtacatcaagtctaaagtgaaccagctaactcattaagactggaatcatgagcaacaatggagcagacctaacctttggttacatctcctgttttgtagctatccttttgtttggctcaaattttgtgccacttaaaaaatttgatactggtgatggaatgtttctccagtgggttctttgtgctgccatatggttggttgccttggttgtcaatctgatattacattgtccaaagttttggccttttgcaatgcttgggggctgcatttgggcaacag

SEQ ID NO: 193610 - DNA, 1633 bp, Homo sapiens
  Payload ID: 18227
  Gene Name: transmembrane protein 144
  ENST ID: ENST00000509278
  CDS Start-End: 285-506
cgtagagggaatgagtcaggctccggctccacactggcacgtagtgggcggatcgcgccggcgctgagtaggaaggagcttcagccgccagcccggaacgcatcataggttagcttttcaagacacttcctgcatctctgacctgttgcacctctgttatcttggcacctctgttatcttagcagcaagcacctgcctcagctgacccttgagccataacccataagctcctgaaaagtacatcaagtctaaagtgaaccagctaactcattaagactggaatcatgagcaacaatggagcagacctaacctttggttacatctcctgttttgtagctatccttttgtttggctcaaattttgtgccacttaaaaaatttgatactggtgatggtaattatttttccttgattgttaacgttatattatttttaaaaatgaagttccttttttggtcttttaaaagtatagctacaaaaataaatcatgttgatcttgatacctagtgaatagagcttaaaattagtcatttgacagtgctcataccagtttgtctgaaagtcagaataggagaaccattaaggttgtttcatggtaaagttagggagggtacagtcaggaaatctcttgggccattatatgaatggaagaaatttatagtcagttctactataacacctgttttgaaaacatgaatcttcaacatgattgatatattagagaacaatgtaagcataacagatttttggcttgcttatgtgcaattttgtccctgagaaacctctagataggcacagaagactgcacctagatgaataaagatgtgtgataatacacataatgcacgcagacacacgtacaatcttcaaatatcgaccagctcccttagttcatcacatgtggttatgatgtattccacccaaccacatctcctgtcccaactcctcacccaataccttcacagtaactcgtaagctgcaaccctttggatgctcacttccaggagcaaacttctggtgtttttcaattaaaatgccctatttattacagcatcatgtaattaaccagttaaccagttaaaactgtactactattttaattaggttgagtgttgttctcctagccccattttcccattatgctctgtagtttttactgcatgattttgcatagtgcagtgatttcaaggaatgcacatgttacattatagcagaactgactaatgtgaattttggggaaggagaagcaagagttatttgtatttgcctgacttccatattaaagccaggagaaggaattgagatttatggtgaacacatgttgggaattacttccttggtagtatttatcacctgacagcagttgtgttatttccccaattctttgtcttcgtgcacttagaaaataggattacctcctattttcctccagggcctttcttctcttttcctctggagttaggacaagaatgggaactacccgaagaacaaaaaaatgggtagaggatctagcttttttagtcttccacaattagctttgtgatcctgggcaaatattaccagctctgctgttttcagtttctcatttgtaaagtgaacaacttataaaatgaagtttcttttcatctctgtga

SEQ ID NO: 193611 - DNA, 642 bp, Homo sapiens
  Payload ID: 18227
  Gene Name: transmembrane protein 144
  ENST ID: ENST00000502698
  CDS Start-End: 411-642
gtcgaaatgcacctcatgcactctaattagcacgtcaaattagtctctccgtttcagaggtgtagggcctttgtggagccttctcaataaaataatttgccactcttgaaggttagacattctcttctatcaatgtacacataaaggttttgttttgctttgcttgttgtgaattaaaatggggagaaaatgatgtgttagctatcacccagtcatgtgtctttttagtcataggttagcttttcaagacacttcctgcatctctgacctgttgcacctctgttatcttggcacctctgttatcttagcagcaagcacctgcctcagctgacccttgagccataacccataagctcctgaaaagtacatcaagtctaaagtgaaccagctaactcattaagactggaatcatgagcaacaatggagcagacctaacctttggttacatctcctgttttgtagctatccttttgtttggctcaaattttgtgccacttaaaaaatttgatactggtgatggaatgtttctccagtgggttctttgtgctgccatatggttggttgccttggttgtcaatctgatattacattgtccaaagttttggccttttgcaatgcttgggggctgcatttgggcaacag

SEQ ID NO: 193612 - DNA, 3699 bp, Homo sapiens
  Payload ID: 18227
  Gene Name: transmembrane protein 144
  Uniprot ID: Q7Z5S9
  ENST ID: ENST00000514558
  CDS Start-End: 1797-2306
cgtagagggaatgagtcaggctccggctccacactggcacgtagtgggcggatcgcgccggcgctgagtaggaaggagcttcagccgccagcccggaacgcagtgagtacagccactcaaaggaaagccaagtcgctttgcaggggagcgtctcatgatttttcagaaacgtgctcatggttaaaaagaaaaatcaaggctcggaataaatacattcaagcactgttaattttagcccaaagacaggcggtacttgcctggagatttgggaaaatcaacatgaaactaaaaatgaaattttagttggagtggagcaagcagtattgatcagaacataccaaatacgaattttttcaaagtctgcgtagaagtttaaattactaggaaaaatgtaaaggagaagtatttactaataaatgaaacaaaagtaataaaataaaaatgaattaatatagtttgacaaaatatcagcgaacgctgaaaagaaaacattaaaataatgtttgagactttttaggttttgtgcaggaagaattgggaaaaatgtgctggatggagtgatactgcttttcttttccacaaaaatttcattattttagagagcggtagagcctttttaaagacagtaagttattgccaattcacaatgaaataagatcacatgctctgaaatgtacaagagctgcatgcaataaacttcatttatctataggtaataactgattgatgtttattcagtagtcgaaatgcacctcatgcactctaattagcacgtcaaattagtctctccgtttcagaggtgtagggcctttgtggagccttctcaataaaataatttgccactcttgaaggttagacattctcttctatcaatgtacacataaaggttttgttttgctttgcttgttgtgaattaaaatggggagaaaatgatgtgttagctatcacccagtcatgtgtctttttagtcataggttagcttttcaagacacttcctgcatctctgacctgttgcacctctgttatcttggcacctctgttatcttagcagcaagcacctgcctcagctgacccttgagccataacccatgtaagtcactgcagggctgaacctctctttgagcctaacagtagaataataattatttttattgaatagtgttaatgtgtcaatgttgaaatgtgcctcagtgtgtcttcctcaaccacatccctatagaggatgttttcttaatagcaatgtgtttttgttttaagaaagtccacacaatttcaaatacacattttctttactaaagtttattgaccagttttgaagtgatccttgttttcagttaaactatctttaataatggtaaataacatattttgtaggttgttgtatatttaatattctctgcaagaacacataaggaacaatacatggacctttaaatatttgtcattgtgaaataaaataacaaggaaaggtgatttcaggtgtactttattcaatacatatatacaagaagttattactataacattaaatttgcaggaaaaaagaaaccactggattattctgcttctattccagagggcttattccaaagggccagtgtgcaaaatatgaatccaagatggcattgtggaaagacgctgtacctcctgtgataaaattactttggtggtgcttttttctcatgtatctcgggaaactaaaaatctgaattgtattcagtggccttttccaaatgaagctcctgaaaagtacatcaagtctaaagtgaaccagctaactcattaagactggaatcatgagcaacaatggagcagacctaacctttggttacatctcctgttttgtagctatccttttgtttggctcaaattttgtgccacttaaaaaatttgatactggtgatggaatgtttctccagtgggttctttgtgctgccatatggttggttgccttggttgtcaatctgatattacattgtccaaagttttggccttttgcaatgcttgggggctgcatttgggcaacagggaacattgctgttgtcccaattatcaaaaccattggtttaggccttggaatcttaatctggggatcatttaatgccttaactggctgggcaagctcaaggtttggctggtttggattggatgcagaagaagtatcaaatccgctgctaaattacattggagctgggctatcagtagtaagtgctttcatatttttgttcatcaaaagtgaaataccaaataacacgtgttccatggataccactccattaataacagagcatgtgagtatagtatgagagacaacttgatttgaaacataaaattaagataaatggataatacataaattttaaacacagatgaaaaagtggtgtttgctcatcactcctggctatgtaaaatatcttagcttatttattatgggtaggtctatgtagcaatcaatcaatatttccgcagttgagcttctcagcaagcacacgggtttatttattttgattaacagatctctactaggtgatatatatataaccccatttttgtaatgatttaaagattcctacaatagaggaaccctaaatactgtagaggaatgtgaaaataactttagaaagtcagaggaaggaggttttgaagttggtccaggggagaatagaccataggaggccaagaaaggtaagtgaagtcctatgagaataggaactggtatcccattctacccgaagtgaaaaacagaaaatatgataggagtcactgttttgatcttgaagaatctaaatcagtctggaatagtaaatctgaatgaaacaggagcaacttttaaaagggacctgataaagcgcaagtgtcagtagctacatatacaaaagtgacttcagggcaaagcctcattgtcatgaacccaggctctaatccttctcatctcaagaaatctctcctgtctgccctgggccagtgctatccagctgccctctgaatccagcgctcctcacccccagtggggtattgccccttggcagggtgcttatttaccccttacttcaaaattaatcttttctcctttccttcttcccctatccaaacttttatcaactaaaaccttagttaaattgacactaaagttgaatagtaattagcttaagtgtaaagagaagaggtttattaatccacaggcatctctaatcagggaaatgtttcagggagaagggaggagttggctttgggaaagggttccttgcctgcttcagggatccagacacctcctgcccaaccatcctccaaaacaatggaacaaaataataaaataaatgcagcttggtaaaagatacacagtaggctaactgcctgagatttttctaggcaataagtttaaagatccataaacagcatgattgatgggtacagaaccatgcatcatgagctccttatgatgaaagaaaccgttattgccaaaggaaaacttgacttagcacatgacaaagaattcaaatctactttcttgtctcttacaaaaataataggattataacatcaagaacacttcagttggccaggcgtgatggctcatgcccgtaatcccagcactgtgggaggtcaaggtgggcagatcacctgagttcaggagttcaagaccagcctgtccaacatggtgaaactctatctctactaagaatacaaaaaaaaaaaaaa

SEQ ID NO: 193613 - DNA, 1768 bp, Homo sapiens
  Payload ID: 18228
  Gene Name: transmembrane protein 145
  Uniprot ID: Q8NBT3
  ENST ID: ENST00000301204
  CDS Start-End: 42-1523
agtgcgggagccggagcggagccggggccggagcgggcggaatggagcccctgcgcgcgcccgcgctgcgccgcctgctgccgccgctgctgctcctgctgctgtcactgcccccccgcgcccgggccaagtacgtgcggggcaacctcagttccaaggaggactgggtgttcctgacaagattttgtttcctctcggattacggccgactggacttccgtttccgctaccctgaggccaagtgctgtcagaacatcctcctctattttgatgacccatcccagtggccagccgtgtacaaggcaggggacaaggactgcctggccaaggagtcagtgatccggccggagaacaaccaggtcatcaacctcaccacccagtatgcctggtccggctgtcaggtggtatcagaggagggaacccgctacctgagctgctccagtggccgcagcttccgctcaggtgatggattgcagctggagtatgagatggtcctcaccaatggcaagtccttctggacacgacacttctccgctgatgagtttgggatcctggagacagatgtgaccttcctcctcatcttcatcctcatcttcttcctctcttgttactttggatatttgctgaaaggtcgtcagttgctccacacaacttataaaatgttcatggccgcagcaggagtagaggtcctgagcctcctatttttctgcatctactggggtcaatatgccaccgatggcattggcaacgagagtgtgaagatcttggccaagctgctcttctcctccagcttcctcatcttcctgctgatgcttatcctcctggggaagggattcacggtgacacggggccgcatcagccacgcgggctccgtgaagttgtctgtctacatgaccctgtacacgctcacccatgtggtgctgctcatctacgaggcggaattctttgacccaggccaggtactgtacacgtatgagtcgccggccggctacgggctcattggactgcaggtggcggcctacgtgtggttctgctatgctgtgcttgtctcactgcgacactttcctgagaagcagcctttttatgtgcccttctttgctgcctataccctctggttctttgcggttcctgtcatggccctgattgccaatttcggcatccccaagtgggcccgggagaagattgtcaatggcatccagctggggatccacttgtacgcccatggcgtgtttctgatcatgacccgcccatcagcggccaacaagaacttcccgtaccacgtgcgcacgtcgcagatcgcttcagccggagtccctggacccggagggagccaatccgctgacaaggccttcccgcagcacgtctatgggaacgtgacgtttatcagcgactcggtgcccaacttcacggagctcttctccatccccccgcccgccacctcccccctgccccgagcggcgccggattctgggctcccgctgttccgtgacctccggccccctggcccccttcgagacctctgaccccgctggactccggaacacccgtggtgaccgccgggaccctgcctgtgactctccaggactctgcgaccccgggatggatattgcgatgctggtctcgaccctgaaaccctccctcggatctgtgacctcggacccgtactccatctgccgcatctccattccgggggccttccctcgggtccctggcagaaagacattttaccccttcttgccaaaataaaaaaggattcgtttttatctat

SEQ ID NO: 193614 - DNA, 338 bp, Homo sapiens
  Payload ID: 18228
  Gene Name: transmembrane protein 145
  ENST ID: ENST00000601644
  CDS Start-End: 1-237
catccccaagtgggcccgggagaagattgtcaatggcatccagctggggatccacttgtacgcccatggcgtgtttctggttctcctgcctcagcctccggagtagctgggactacaggagcacgccaccatgcccgtagagacggggtttcactatgttggccaggatggtctcgatctcctgacctcatgatccgcccgcctcggcctcccaaagtgctgggattacaggagtgagccactgcgcctggcccccaccacgtctattctttgccctggttcacatcctatctgacattcttggtgacagttctaatattcattaatttattcatcaa

SEQ ID NO: 193615 - DNA, 2011 bp, Homo sapiens
  Payload ID: 18228
  Gene Name: transmembrane protein 145
  ENST ID: ENST00000598766
  CDS Start-End: 1-1467
atggagcccctgcgcgcgcccgcgctgcgccgcctgctgccgccgctgctgctcctgctgctgtcactgcccccccgcgcccgggccaagtacgtgcggggcaacctcagttccaaggaggactgggtgttcctgacaagattttgtttcctctcggattacggccgactggacttccgtttccgctaccctgagctcccggtccccaacatctctggtctgcaggccaagtgctgtcagaacatcctcctctattttgatgacccatcccagtggccagccgtgtacaaggcaggggacaaggactgcctggccaaggagtcagtgatccggccggagaacaaccaggtcatcaacctcaccacccagtatgcctggtccggctgtcaggtggtatcagaggagggaacccgctacctgagctgctccagtggccgcagcttccgctcagtgcgtgaacggtggtggtatattgcgctcagcaagtgtgggggtgatggattgcagctggagtatgagatggtcctcaccaatggcaagtccttctggacacgacacttctccgctgatgagtttgggatcctggagacagatgtgaccttcctcctcatcttcatcctcatcttcttcctctcttgttactttggatatttgctgaaaggtcgtcagttgctccacacaacttataaaatgttcatggccgcagcaggagtagaggtcctgagcctcctatttttctgcatctactggggtcaatatgccaccgatggcattggcaacgagagtgtgaagatcttggccaagctgctcttctcctccagcttcctcatcttcctgctgatgcttatcctcctggggaagggattcacggtgacacggggccgcatcagccacgcgggctccgtgaagttgtctgtctacatgaccctgtacacgctcacccatgtggtgctgctcatctacgaggcggaattctttgacccaggccaggtactgtacacgtatgagtcgccggccggctacgggctcattggactgcaggtggcggcctacgtgtggttctgctatgctgtgcttgtctcactgcgacactttcctgagaagcagcctttttatgtgcccttctttgctgcctataccctctggttctttgcggttcctgtcatggccctgattgccaatttcggcatccccaagtgggcccgggagaagattgtcaatggcatccagctggggatccacttgtacgcccatggcgtgtttctgattcttccatttctcttttgtatccccactgccttccccaccctccttgatctctccactctccccctgcccctgcccaaattctgccatcacaggccactgttcaggaagaagcatctggggtggcacagggtgaagcttttgggctcctgggtcggcaacaggagggtacagcaccacatcttttttttttttttttgagacggagtctcactctgtcactaggctggagtgcagtggcgcgatcttggctcactgcaacctccacctcccaggttctcctgcctcagcctccggagtagctgggactacaggagcacgccaccatgcccggttaagtggtttttttttttttttttttttgagacggagtcttgctctgttgcccaggctggagtgcagaggtgcgatctcggctcactgcaacttctgcctcccaagttcatgccattcccctgcctcagcctccctagtagctgggactacaggcgcccaccaccacgcctagcaaattttttttgtatttttagtagagacggggtttcactatgttggccaggatggtctcgatctcctgacctcatgatccgcccgcctcggcctcccaaagtgctgggattacaggagtgagccactgcgcctggcccccaccacgtctattctttgccctggttcacatcctatctgacattcttggtgacagttctaatattcattaatttattcatcaattgttcactgggca

SEQ ID NO: 193616 - DNA, 899 bp, Homo sapiens
  Payload ID: 18229
  Gene Name: transmembrane protein 147
  Uniprot ID: Q9BVK8
  ENST ID: ENST00000222284
  CDS Start-End: 146-820
gctcccagaaggtcgcgcgcgggcccccgccagtcaggtgggtgccaggccctggccgtggcgaaagagccggcggagccggagacccgctcccggagacgccgcctcgcgatccccgcgcgggcgggaccgggcggccggcatcatgaccctgtttcacttcgggaactgcttcgctcttgcctacttcccctacttcatcacctacaagtgcagcggcctgtccgagtacaacgccttctggaaatgcgtccaggctggagtcacctacctctttgtccaactctgcaagatgctgttcttggccactttctttcccacctgggaaggcggcatctatgacttcattggggagttcatgaaggccagcgtggatgtggcagacctgataggtctaaaccttgtcatgtcccggaatgccggcaagggagagtacaagatcatggttgctgccctgggctgggccactgctgagcttattatgtcccgctgcattcccctatgggtcggagcccggggcattgagtttgactggaagtacatccagatgagcatagactccaacatcagtctggtccattacatcgtcgcgtctgctcaggtctggatgataacacgctatgatctgtaccacaccttccggccagctgtcctcctgctgatgttcctcagtgtctacaaggcctttgttatggagaccttcgtccacctctgctcgctgggcagttgggcagctctactggcccgagcagtggtaacggggctgctggccctcagcactttggccctgtatgtcgccgttgtcaatgtgcactcctaggcttggtgtctcagacattgatgtaccttttccctgcctcactccaggttttagtgaagtaaacagtatttggaaagtt

SEQ ID NO: 193617 - DNA, 935 bp, Homo sapiens
  Payload ID: 18229
  Gene Name: transmembrane protein 147
  Uniprot ID: Q9BVK8
  ENST ID: ENST00000392204
  CDS Start-End: 329-856
aggtgggtgccaggccctggccgtggcgaaagagccggcggagccggagacccgctcccggagacgccgcctcgcgatccccgcgcgggcgggaccgggcggccggcatcatgaccctgtttcacttcgggaactgcttcgctcttgcctacttcccctacttcatcacctacaagtgcagcggcctgtgagtgcgggaagggcgcggggcggagagggcgcggggcccgggccgaccctcacctcccgcttctccaggtccgagtacaacgccttctggaaatgcgtccaggctggagtcacctacctctttgtccaactctgcaagatgctgttcttggccactttctttcccacctgggaaggcggcatctatgacttcattggggagttcatgaaggccagcgtggatgtggcagacctgataggtctaaaccttgtcatgtcccggaatgccggcaagggagagtacaagatcatggttgctgccctgggctgggccactgctgagcttattatgtcccgctgcattcccctatgggtcggagcccggggcattgagtttgactggaagtacatccagatgagcatagactccaacatcagtctggtccattacatcgtcgcgtctgctcaggtctggatgataacacgctatgatctgtaccacaccttccggccagctgtcctcctgctgatgttcctcagtgtctacaaggcctttgttatggagaccttcgtccacctctgctcgctgggcagttgggcagctctactggcccgagcagtggtaacggggctgctggccctcagcactttggccctgtatgtcgccgttgtcaatgtgcactcctaggcttggtgtctcagacattgatgtaccttttccctgcctcactccaggttttagtgaagtaaacagtatttggaaagtt

SEQ ID NO: 193618 - DNA, 767 bp, Homo sapiens
  Payload ID: 18229
  Gene Name: transmembrane protein 147
  ENST ID: ENST00000392205
  CDS Start-End: 60-614
ccgctcccggagacgccgcctcgcgatccccgcgcgggcgggaccgggcggccggcatcatgaccctgtttcacttcgggaactgcttcgctcttgcctacttcccctacttcatcacctacaagtgcagcggcctgtccgagtacaacgccttctggaaatgcgtccaggctggagtcacctacctctttgtccaactctgcaagatgctgttcttggccactttctttcccacctgggaaggcggcatctatgacttcattggggagttcatgaaggccagcgtggatgtggcagacctgataggtctaaaccttgtcatgtcccggaatgccggcaagggagagtacaagatcatggttgctgccctgggctgggccactgctgagcttattatgtcccgctgcattcccctatgggtcggagcccggggcattgagtttgactggaagtacatccagatgagcatagactccaacatcagtctggtccattacatcgtcgcgtctgctcaggtctggatgataacacgctatgatctgtaccacaccttccggccagctgtcctcctgctgatgttcctcagtgtctacaaggcctttgttatggagtgagttgggtggggtttagggctgggtccaaagtggggtgggttatctagtctcccttccttattgtgacattttcctgcaggaccttcgtccacctctgctcgctgggcagttgggcagctctactggcccgagcagtggtaacggggctgctgg

SEQ ID NO: 193619 - DNA, 669 bp, Homo sapiens
  Payload ID: 18229
  Gene Name: transmembrane protein 147
  ENST ID: ENST00000593027
  CDS Start-End: 242-337
cagaaggtcgcgcgcgggcccccgccagtcaggtgggtgccaggccctggccgtggcgaaagagccggcggagccggagacccgctcccggagacgccgcctcgcgatccccgcgcgggcgggaccgggcggccggcatcatgaccctgtttcacttcgggaactgcttcgctcttgcctacttcccctacttcatcacctacaagtgcagcggcctgtccgagtacaacgccttctggaaatgcgtccaggctggagtcacctacctctttgtccaactctgcaagatgctgttcttggccactttctttcccacctgggaaggcggcatctatgacttcattggggtccattacatcgtcgcgtctgctcaggtctggatgataacacgctatgatctgtaccacaccttccggccagctgtcctcctgctgatgttcctcagtgtctacaaggcctttgttatggagaccttcgtccacctctgctcgctgggcagttgggcagctctactggcccgagcagtggtaacggggctgctggccctcagcactttggccctgtatgtcgccgttgtcaatgtgcactcctaggcttggtgtctcagacattgatgtaccttttccctgcctcactccaggttttagtgaagtaaacagtatttggaaa

SEQ ID NO: 193620 - DNA, 992 bp, Homo sapiens
  Payload ID: 18230
  Gene Name: transmembrane protein 14A
  Uniprot ID: Q9Y6G1
  ENST ID: ENST00000211314
  CDS Start-End: 154-453
gctcagcgcgagacggctgggcgccgagtgggacagcgctggtgcggagactgcttccggactccaggtaccgcgcttggcggcagctggccccagacttctgtcttttcagctgcagtgaaggctcggggctgcagaattgcaaccttgccaatggacctgatcggttttggttatgcagccctcgtgacatttggaagcatttttggatataagcggagaggtggtgttccgtctttgattgctggtctttttgttggatgtttggccggctatggagcttaccgtgtctccaatgacaaacgagatgtaaaagtgtcactgtttacagctttcttcctggctaccataatgggtgtgagatttaagaggtccaagaaaataatgcctgctggtttggttgcaggtttaagcctcatgatgatcctgagacttgtcttgttgctgctctgagcatctggaggaacagaaaactaagttcatgtcatcctgctgtaatgggcagagcatattttttttgtatttaaaagataaacttcaatatggaatgctagaaacacaaatagcactgtcacctctaatatgaacattagtttgaggtagtttttttctaaagcaaaaattttaactgttttctaattgtcaagcactattttcattaaaagtgtctaatgaatcatgatatactcttccatttgttgtgtctattttttatatatttggtattttttgaaaattccaaatactcatgtctcaagtaagcttaaactacaacttgtcacataaaggaagtcttaagtggagttcacagaatgataatgtatctatttgtcatttgtgttatatttgaaattattagaaattatgctttttccattttaattgtattgctgccagtgctatttttttctttaaaaaattttattcttagcacactgttatgtcctaactgaatgtattcagtattcaaataaaagacattttggttcaaa

SEQ ID NO: 193621 - DNA, 787 bp, Homo sapiens
  Payload ID: 18231
  Gene Name: transmembrane protein 14B
  Uniprot ID: Q9NUH8
  ENST ID: ENST00000379530
  CDS Start-End: 116-358
gtttccggagagacctggctgctgtgtcccgcggcttgcgctccgtagtggactccgcgggccttcggcagatgcaggcctggggtagtctcctttctggactgagaagagaagaatggagaagcccctcttcccattagtgcctttgcattggtttggctttggctacacagcactggttgtttctggtgggatcgttggctatgtaaaaacagccgctacatctgttacttttgttggtgttatgggaatgagatcctactactatggaaaattcatgcctgtaggtttaattgcaggtgccagtttgctgatggccgccaaagttggagttcgtatgttgatgacatctgattagcagaagtcatgttccagcttggactcatgaaggattaaaaatctgcatcttccactattttcaatgtattaagagaaataagtgcagcatttttgcatctgacattttacctaaaaaaaaaaagacaccaaatttggcggaggggtggaaaatcagttgttaccattataaccctacagaggtggtgagcatgtaacatgagcttattgagaccatcatagagatcgattcttgtatattgattttatctctttctgtatctataggtaaatctcaagggtaaaatgttaggtgttgacattgagaaccctgaaaccccattccctgctcagaggaacagtgtgaaaaaaaatctcttgagagatttagaatatcttttcttttgctcatcttagaccacagactgactttgaaattatgttaagtgaa

SEQ ID NO: 193622 - DNA, 975 bp, Homo sapiens
  Payload ID: 18231
  Gene Name: transmembrane protein 14B
  Uniprot ID: Q9NUH8
  ENST ID: ENST00000379542
  CDS Start-End: 168-512
gcctttctccccgccctgccgcggccccggggcgcagcgcgcacgcaatcgcgtttccggagagacctggctgctgtgtcccgcggcttgcgctccgtagtggactccgcgggccttcggcagatgcaggcctggggtagtctcctttctggactgagaagagaagaatggagaagcccctcttcccattagtgcctttgcattggtttggctttggctacacagcactggttgtttctggtgggatcgttggctatgtaaaaacaggcagcgtgccgtccctggctgcagggctgctcttcggcagtctagccggcctgggtgcttaccagctgtatcaggatccaaggaacgtttggggtttcctagccgctacatctgttacttttgttggtgttatgggaatgagatcctactactatggaaaattcatgcctgtaggtttaattgcaggtgccagtttgctgatggccgccaaagttggagttcgtatgttgatgacatctgattagcagaagtcatgttccagcttggactcatgaaggattaaaaatctgcatcttccactattttcaatgtattaagagaaataagtgcagcatttttgcatctgacattttacctaaaaaaaaaaagacaccaaatttggcggaggggtggaaaatcagttgttaccattataaccctacagaggtggtgagcatgtaacatgagcttattgagaccatcatagagatcgattcttgtatattgattttatctctttctgtatctataggtaaatctcaagggtaaaatgttaggtgttgacattgagaaccctgaaaccccattccctgctcagaggaacagtgtgaaaaaaaatctcttgagagatttagaatatcttttcttttgctcatcttagaccacagactgactttgaaattatgttaagtgaaatatcaatgaaaataaagtttactataaataata

SEQ ID NO: 193623 - DNA, 565 bp, Homo sapiens
  Payload ID: 18231
  Gene Name: transmembrane protein 14B
  ENST ID: ENST00000460341
  CDS Start-End: 166-273
ctttctccccgccctgccgcggccccggggcgcagcgcgcacgcaatcgcgtttccggagagacctggctgctgtgtcccgcggcttgcgctccgtagtggactccgcgggccttcggcagatgcaggcctggggtagtctcctttctggactgagaagagaagaatggagaagcccctcttcccattagtgcctttgcattggtttggctttggctacacagcactggttgtttctggtgggatcgttggctatgtaaaaacaggaatctagaaaactgtatctgaagttgttcctacctgaagccgttgcattgagaggtgctaagtggatcctctggccagctgactgcacttcttttttgagaaaggaaggaatatatcctgactgattattttgcaacagttctgaactcagttccgctgcctccctgagacccaatcctgcctctctgtcctaaaaacagtttccaccgccagcccaagcagcaggggagcagaggaaacggcgggggcagcaggcgggcctacggccggcccagagagggcgtggcctcgcgggaaat

SEQ ID NO: 193624 - DNA, 752 bp, Homo sapiens
  Payload ID: 18231
  Gene Name: transmembrane protein 14B
  ENST ID: ENST00000473166
  CDS Start-End: 168-275
gcctttctccccgccctgccgcggccccggggcgcagcgcgcacgcaatcgcgtttccggagagacctggctgctgtgtcccgcggcttgcgctccgtagtggactccgcgggccttcggcagatgcaggcctggggtagtctcctttctggactgagaagagaagaatggagaagcccctcttcccattagtgcctttgcattggtttggctttggctacacagcactggttgtttctggtgggatcgttggctatgtaaaaacaggaatctagaaaactgtatctgaagttgttcctacctgaagccgttgcattgagaggtgctaagtggatcctctggccagctgactgcacttcttttttgagaaaggaaggaatatatcctgactgattgtggagcactgcccaacacacagtagatactgcatgtggcagacacacgatagggtctcactaggtcacctaagctgaagtacagtagtggtggcactatcttggctcactgcagcctcgacctcctgggctcaagcaatcctcccacctcagcctcccgagtggctgggactatagcagccctagcaaaccaagagtgagccaccttggaagtagatcctgcagtcccagtcaagccttcggatgactgaaacttcggccaattatctgactgccatcagagaacccaagccagaactacccagctaagctacttctaaattcctgacccacagaaactatgtgaattaataaatg

SEQ ID NO: 193625 - DNA, 559 bp, Homo sapiens
  Payload ID: 18231
  Gene Name: transmembrane protein 14B
  ENST ID: ENST00000461342
  CDS Start-End: 122-427
aatcgcgtttccggagagacctggctgctgtgtcccgcggcttgcgctccgtagtggactccgcgggccttcggcagatgcaggcctggggtagtctcctttctggactgagaagagaagaatggagaagcccctcttcccattagtgcctttgcattggtttggctttggctacacagcactggttgtttctggtgggatcgttggctatgtaaaaacagccgctacatctgttacttttgttggtgttatgggaatgagatcctactactatggaaaattcatgcctgtaggtttaattgcaggtgccaggtactttcattctattactcttctttaccatgtagagttcagtttattgcccagaatactttatgcattcaaaaccttacttgtttcagagtatctgatgctatgcatcaactgacgtttgacttatacactaataggagatgcttcaaaaacaatagttgatttaatgtcaaatgacatgagtatatccattcactgtggagatggctttgttctctggtcctagctccttcctatatggtggcag

SEQ ID NO: 193626 - DNA, 992 bp, Homo sapiens
  Payload ID: 18231
  Gene Name: transmembrane protein 14B
  ENST ID: ENST00000475942
  CDS Start-End: 122-529
aatcgcgtttccggagagacctggctgctgtgtcccgcggcttgcgctccgtagtggactccgcgggccttcggcagatgcaggcctggggtagtctcctttctggactgagaagagaagaatggagaagcccctcttcccattagtgcctttgcattggtttggctttggctacacagcactggttgtttctggtgggatcgttggctatgtaaaaacaggcagcgtgccgtccctggctgcagggctgctcttcggcagtctagccggcctgggtgcttaccagctgtatcaggatccaaggaacgtttggggtttcctagccgctacatctgttacttttgttggtgttatgggaatgagatcctactactatggaaaattcatgcctgtaggtttaattgcaggtgccaggtactttcattctattactcttctttaccatgtagagttcagtttattgcccagaatactttatgcattcaaaaccttacttgtttcagagtatctgatgctatgcatcaactgacgtttgacttatacactaataggagatgcttcaaaaacaatagttgatttaatgtcaaatgacatgagtatatccattcactgtggagatggctttgttctctggtcctagctccttcctatatggtggcagaagttttattgcaaagctatgactgcagccttttgtgtgacttgcggaggatgtgtgggggtcccatatttcttaggtgtgtaggtgtcttttgtagaaaattttgctaaaaggaaattttgattgaatcctgttttctaattttgattataatacctaaaccaaattgtggtttttaaaaaatgtagttgtaggccaggcacggtggctcacacctgtaatccaagcacagtgggaggccatggcgggcatatcacttgaggtcaggagtttgagaccagcctggccaacatggtgaaactcctctctatgaaaaatacaaaaattaggt

SEQ ID NO: 193627 - DNA, 344 bp, Homo sapiens
  Payload ID: 18231
  Gene Name: transmembrane protein 14B
  ENST ID: ENST00000478732
  CDS Start-End: 1-144
gtttctggtgggatcgttggctatgtaaaaacaggcagcgtgccgtccctggctgcagggctgctcttcggcagtctagccggcctgggtgcttaccagctgtatcaggatccaaggaacgtttggggtttcctaggaatctagaaaactgtatctgaagttgttcctacctgaagccgttgcattgagaggtgctaagtggatcctctggccagctgactgcacttcttttttgagaaaggaaggaatatatcctgactgattgatctggctctgttatccaggttggagtgcagtggagcaatcatggctcactacagcctcaccctcccgggctcaaaaga

SEQ ID NO: 193628 - DNA, 559 bp, Homo sapiens
  Payload ID: 18231
  Gene Name: transmembrane protein 14B
  ENST ID: ENST00000473807
  CDS Start-End: 126-233
acgcaatcgcgtttccggagagacctggctgctgtgtcccgcggcttgcgctccgtagtggactccgcgggccttcggcagatgcaggcctggggtagtctcctttctggactgagaagagaagaatggagaagcccctcttcccattagtgcctttgcattggtttggctttggctacacagcactggttgtttctggtgggatcgttggctatgtaaaaacaggaatctagaaaactgtatctgaagttgttcctacctgaagccgttgcattgagaggtgctaagtggatcctctggccagctgactgcacttcttttttgagaaaggaaggaatatatcctgactgattgatctggctctgttatccaggttggagtgcagtggagcaatcatggctcactacagcctcaccctcccgggctcaaaagatcctcctacctcagactcctgagtagctgggactacaggtgcgcaccatcacacctggctaatttttttttgtggagacggggtttcactatgttgcccaggctggtcttgaactcctgggctcaa

SEQ ID NO: 193629 - DNA, 1589 bp, Homo sapiens
  Payload ID: 18231
  Gene Name: transmembrane protein 14B
  ENST ID: ENST00000463448
  CDS Start-End: 168-275
gcctttctccccgccctgccgcggccccggggcgcagcgcgcacgcaatcgcgtttccggagagacctggctgctgtgtcccgcggcttgcgctccgtagtggactccgcgggccttcggcagatgcaggcctggggtagtctcctttctggactgagaagagaagaatggagaagcccctcttcccattagtgcctttgcattggtttggctttggctacacagcactggttgtttctggtgggatcgttggctatgtaaaaacaggaatctagaaaactgtatctgaagttgttcctacctgaagccgttgcattgagaggtgctaagtggatcctctggccagctgactgcacttcttttttgagaaaggaaggaatatatcctgactgattacagagtctcactctgtcgccaggctggacaggctggagtgcagttgtgcgatctcggctcactacaacctctgcttcccgggttcaagtgattctcctgcctcagcctcccgagtagctgggattacaggtgcgcgtcaccacgcccagctaatttttgtattcttagtagagacggggtttcaccatgtcggcgaggatggtcttgatctcttgacctcatgatctgcccgcctcggccttccagagtgctgggattacaggcgtgaggcactgcgcccagcccagattggataatttctgaaaaattgtttgcaagtgcatggacactttcttctatcatctccaatctgctggtaagcctatcccatggtgttttattttattttaaagccttcgattttcagttctagacttttaaacttggatcatttaaatagtttccatattctgttgaaattctctatatctttttatttatgatgacaatattttccttaggtctttgaatatttataatagctgttttaaagttcttgtcagctatttccaacatctgagccatctcacatctttttctatagactgcttctcctcttaacctcatggtactagtcttatttacttaaatagctactattttgtttgtatattgtacatgatgaataatatgttgaagagttttggattttacctttcttaactgagtgttgctttctgttttaagtaatcaattgctttttcgacaaatcaccttaaatttgtggatgcttagtattaccctttctaaagatgcattcattttagctttggcactagttttagggtgaattccttagatgtagaacatacagtttactcttagggcatggccttagtgctatgcaaactccaaattccatctcccttgcagtgcgcagccgacgagatggttgctttgttttgacgctttccagctgttgctttacgttgacatctttagagtctcatctcgttaagccctgttcaggtgtcagccaagaattcaaagtgagtttaaacacaaattttagggtttcctctttgtggctccctcttttccaaggtccgtcccctcaatttccaggtcctttggcagccccagactccatcctctgacaagtcaaaagcatcgcaatttctgctcagtcctagccattccacgccttgtgcact

SEQ ID NO: 193630 - DNA, 483 bp, Homo sapiens
  Payload ID: 18231
  Gene Name: transmembrane protein 14B
  ENST ID: ENST00000467229
  CDS Start-End: 1-178
cagtctagccggcctgggtgcttaccagctgtatcaggatccaaggaacgtttggggtttcctagccgctacatctgttacttttgttggtgttatgggaatgagatcctactactatggaaaattcatgcctgtaggtttaattgcaggtgccaggaatctagaaaactgtatctgaagttgttcctacctgaagccgttgcattgagaggtgctaagtggatcctctggccagctgactgcacttcttttttgagaaaggaaggaatatatcctgactgattcagccctagcaaaccaagagtgagccaccttggaagtagatcctgcagtcccagtcaagccttcggatgactgaaacttcggccaattatctgactgccatcagagaacccaagccagaactacccagctaagctacttctaaattcctgacccacagaaactatgtgaattaataaatgtttcttcttattttaaatc

SEQ ID NO: 193631 - DNA, 502 bp, Homo sapiens
  Payload ID: 18231
  Gene Name: transmembrane protein 14B
  ENST ID: ENST00000463100
  CDS Start-End: 116-223
gtttccggagagacctggctgctgtgtcccgcggcttgcgctccgtagtggactccgcgggccttcggcagatgcaggcctggggtagtctcctttctggactgagaagagaagaatggagaagcccctcttcccattagtgcctttgcattggtttggctttggctacacagcactggttgtttctggtgggatcgttggctatgtaaaaacaggaatctagaaaactgtatctgaagttgttcctacctgaagccgttgcattgagaggtgctaagtggatcctctggccagctgactgcacttcttttttgagaaaggaaggaatatatcctgactgattcagccctagcaaaccaagagtgagccaccttggaagtagatcctgcagtcccagtcaagccttcggatgactgaaacttcggccaattatctgactgccatcagagaacccaagccagaactacccagctaagctacttctaaattcctgacccacaga

SEQ ID NO: 193632 - DNA, 1032 bp, Homo sapiens
  Payload ID: 18231
  Gene Name: transmembrane protein 14B
  ENST ID: ENST00000481240
  CDS Start-End: 96-449
gctgtgtcccgcggcttgcgctccgtagtggactccgcgggccttcggcagatgcaggcctggggtagtctcctttctggactgagaagagaagaatggagaagcccctcttcccattagtgcctttgcattggtttggctttggctacacagcactggttgtttctggtgggatcgttggctatgtaaaaacagccgctacatctgttacttttgttggtgttatgggaatgagatcctactactatggaaaattcatgcctgtaggtttaattgcaggtgccagatggagtatggctcttgttgcccaagctggggtgcaatggtgcgatctcagctcattgcaacctccacctcccaggttcaagcgattctcctgccttaccctcctgagtagctgggatttcaggtgtgcaccaccacacccagctaattttttgtatttttagtagagatggggtttcaccatgttggccaggctggtcttgaactgacctcaggtgatccacctgtcttgcctcccaaagtgctggaattacaggcatgagccaccgcaccaggccaagatctaattctttttaatggcttttaagttgtacggatgattactatttagtttactattcccctactgatagaaatatgtcttgtttaatgcctttgatagccgggagcagtggctcatgcttgtaatcccaacactttgggaggctgaggtgggcagatcccctgaggcctttgatattacaaaggatggtgtaccaagaaatatcctcatggaaatccccgtgaacatgtgcaaaggaatctgtaggttacattcctaaatgctgagtcagagcatctcagcatttaaaattgtgattgccttcagaagaggatgcaccaatttatcctcccactagtggtggctttgtgtaattggactttgtaaaaatctttgacacattaagctggaagtctgcaaacttgttctgtaaagggccagatagtgaatattttaggcttctcaggccatctgtgtcccagctg

SEQ ID NO: 193633 - DNA, 730 bp, Homo sapiens
  Payload ID: 18231
  Gene Name: transmembrane protein 14B
  ENST ID: ENST00000473276
  CDS Start-End: 110-271
ggagagacctggctgctgtgtcccgcggcttgcgctccgtagtggactccgcgggccttcggcagatgcaggcctggggtagtctcctttctggactgagaagagaagaatggagaagcccctcttcccattccgctacatctgttacttttgttggtgttatgggaatgagatcctactactatggaaaattcatgcctgtaggtttaattgcaggtgccagtttgctgatggccgccaaagttggagttcgtatgttgatgacatctgattagcagaagtcatgttccagcttggactcatgaaggattaaaaatctgcatcttccactattttcaatgtattaagagaaataagtgcagcatttttgcatctgacattttacctaaaaaaaaaaagacaccaaatttggcggaggggtggaaaatcagttgttaccattataaccctacagaggtggtgagcatgtaacatgagcttattgagaccatcatagagatcgattcttgtatattgattttatctctttctgtatctataggtaaatctcaagggtaaaatgttaggtgttgacattgagaaccctgaaaccccattccctgctcagaggaacagtgtgaaaaaaaatctcttgagagatttagaatatcttttcttttgctcatcttagaccacagactgactttgaaattatgttaagtgaaatatcaatgaaaataaagtttactat

SEQ ID NO: 193634 - DNA, 1224 bp, Homo sapiens
  Payload ID: 18231
  Gene Name: transmembrane protein 14B
  ENST ID: ENST00000467317
  CDS Start-End: 96-551
gctgtgtcccgcggcttgcgctccgtagtggactccgcgggccttcggcagatgcaggcctggggtagtctcctttctggactgagaagagaagaatggagaagcccctcttcccattagtgcctttgcattggtttggctttggctacacagcactggttgtttctggtgggatcgttggctatgtaaaaacaggcagcgtgccgtccctggctgcagggctgctcttcggcagtctagccggcctgggtgcttaccagctgtatcaggatccaaggaacgtttggggtttcctagccgctacatctgttacttttgttggtgttatgggaatgagatcctactactatggaaaattcatgcctgtaggtttaattgcaggtgccagatggagtatggctcttgttgcccaagctggggtgcaatggtgcgatctcagctcattgcaacctccacctcccaggttcaagcgattctcctgccttaccctcctgagtagctgggatttcaggtgtgcaccaccacacccagctaattttttgtatttttagtagagatggggtttcaccatgttggccaggctggtcttgaactgacctcaggtgatccacctgtcttgcctcccaaagtgctggaattacaggcatgagccaccgcaccaggccaagatctaattctttttaatggcttttaagttgtacggatgattactatttagtttactattcccctactgatagaaatatgtcttgtttaatgcctttgatagccgggagcagtggctcatgcttgtaatcccaacactttgggaggctgaggtgggcagatcccctgaggcctttgatattacaaaggatggtgtaccaagaaatatcctcatggaaatccccgtgaacatgtgcaaaggaatctgtaggttacattcctaaatgctgagtcagagcatctcagcatttaaaattgtgattgccttcagaagaggatgcaccaatttatcctcccactagtggtggctttgtgtaattggactttgtaaaaatctttgacacattaagctggaagtctgcaaacttgttctgtaaagggccagatagtgaatattttaggcttctcaggccatctgtgtcccagctgttcacctctgcctttgtagaatgaaagcagccacagccaatcaataaacgagtgtgactgttccaataaaactatgtatgggccctgaaa

SEQ ID NO: 193635 - DNA, 888 bp, Homo sapiens
  Payload ID: 18231
  Gene Name: transmembrane protein 14B
  ENST ID: ENST00000612333
  CDS Start-End: 124-435
gcctttctccccgccctgccgcggccccggggcgcagcgcgcacgcaatcgcgtttccggagagacctggctgctgtgtcccgcggcttgcgctccgtagtggactccgcgggccttcggcagatgcaggcctggggtagtctcctttctggactgagaagagaagaatggagaagcccctcttcccattgcagcgtgccgtccctggctgcagggctgctcttcggcagtctagccggcctgggtgcttaccagctgtatcaggatccaaggaacgtttggggtttcctagccgctacatctgttacttttgttggtgttatgggaatgagatcctactactatggaaaattcatgcctgtaggtttaattgcaggtgccagtttgctgatggccgccaaagttggagttcgtatgttgatgacatctgattagcagaagtcatgttccagcttggactcatgaaggattaaaaatctgcatcttccactattttcaatgtattaagagaaataagtgcagcatttttgcatctgacattttacctaaaaaaaaaaagacaccaaatttggcggaggggtggaaaatcagttgttaccattataaccctacagaggtggtgagcatgtaacatgagcttattgagaccatcatagagatcgattcttgtatattgattttatctctttctgtatctataggtaaatctcaagggtaaaatgttaggtgttgacattgagaaccctgaaaccccattccctgctcagaggaacagtgtgaaaaaaaatctcttgagagatttagaatatcttttcttttgctcatcttagaccacagactgactttgaaattatgttaagtgaaatatcaatgaaaataaagtttact

SEQ ID NO: 193636 - DNA, 1113 bp, Homo sapiens
  Payload ID: 18232
  Gene Name: transmembrane protein 14C
  Uniprot ID: Q9P0S9
  ENST ID: ENST00000229563
  CDS Start-End: 312-650
aggagctcgccgcgatgccccgccccactctccacccgctgaatgcagggcgcatgctgctacttggcggctcaagccccgcccgcaccgtccccattctctgaccgcccctctcccggtacactgcgcaggcacaacagagccgctcccctctcctcgccccgccaccgggacggagagcgcccgccgctgcatttccggcgacacctcgcagtcattcctgcggcttgcgcgcccttgtagacagccggggccttcgtgagaccggtgcaggcctggggtagtctcctgtctggacagagaagagaaaaatgcaggacactggctcagtagtgcctttgcattggtttggctttggctacgcagcactggttgcttctggtgggatcattggctatgtaaaagcaggcagcgtgccgtccctggctgcagggctgctctttggcagtctagccggcctgggtgcttaccagctgtctcaggatccaaggaacgtttgggttttcctagctacatctggtaccttggctggcattatgggaatgaggttctaccactctggaaaattcatgcctgcaggtttaattgcaggtgccagtttgctgatggtcgccaaagttggagttagtatgttcaacagaccccattagcagaagtcatgttccagcttagactgatgaagaattaaaaatctgcatcttccactattttcaatatattaagagaaataagtgcagcatttttgcatctgacattttacctaaaaaaaaagacaccaaacttggcagagaggtggaaaatcagtcatgattacaaacctacagaggtggcgagtatgtaacacaagagcttaataagaccctcatagagcttgattcttgtatattgatgttgtcttttctttctgtatctgtaggtaaatctcaagggtaaaatgttaggtgtcagctttcagggctctgaaaccccattccctgctctgaggaacagtgtgaaaaaaagtcttttaggagatttacaatatctgttcttttgctcatcttagaccacagactgactttgaaattatgttaagtgaaatatcaatgaaaataaagtttactataaataata

SEQ ID NO: 193637 - DNA, 1177 bp, Homo sapiens
  Payload ID: 18232
  Gene Name: transmembrane protein 14C
  Uniprot ID: Q9P0S9
  ENST ID: ENST00000541412
  CDS Start-End: 386-724
gccctgcaggcgctgcggacaggggaagcacagagattccccgccgcgttccctggactcaggagctcgccgcgatgccccgccccactctccacccgctgaatgcagggcgcatgctgctacttggcggctcaagccccgcccgcaccgtccccattctctgaccgcccctctcccggtacactgcgcaggcacaacagagccgctcccctctcctcgccccgccaccgggacggagagcgcccgccgctgcatttccggcgacacctcgcagtcattcctgcggcttgcgcgcccttgtagacagccggggccttcgtgagaccgcttgttttctgcaggtgcaggcctggggtagtctcctgtctggacagagaagagaaaaatgcaggacactggctcagtagtgcctttgcattggtttggctttggctacgcagcactggttgcttctggtgggatcattggctatgtaaaagcaggcagcgtgccgtccctggctgcagggctgctctttggcagtctagccggcctgggtgcttaccagctgtctcaggatccaaggaacgtttgggttttcctagctacatctggtaccttggctggcattatgggaatgaggttctaccactctggaaaattcatgcctgcaggtttaattgcaggtgccagtttgctgatggtcgccaaagttggagttagtatgttcaacagaccccattagcagaagtcatgttccagcttagactgatgaagaattaaaaatctgcatcttccactattttcaatatattaagagaaataagtgcagcatttttgcatctgacattttacctaaaaaaaaagacaccaaacttggcagagaggtggaaaatcagtcatgattacaaacctacagaggtggcgagtatgtaacacaagagcttaataagaccctcatagagcttgattcttgtatattgatgttgtcttttctttctgtatctgtaggtaaatctcaagggtaaaatgttaggtgtcagctttcagggctctgaaaccccattccctgctctgaggaacagtgtgaaaaaaagtcttttaggagatttacaatatctgttcttttgctcatcttagaccacagactgactttgaaattatgttaagtgaaatatcaatgaaaataaagtttact

SEQ ID NO: 193638 - DNA, 378 bp, Homo sapiens
  Payload ID: 18233
  Gene Name: transmembrane protein 14E, pseudogene
  Uniprot ID: Q6UXP3
  ENST ID: ENST00000408960
  CDS Start-End: 1-378
atgcagatggaccctggcccacaggtgcctttatactggcttggctttgtctatgcagcactggctgctttaggtgggatcagtggttatgcaaaagtaggttctgtccagtccccttctgctggattcttcttcagtgagttagcaggcctggatgcttctcagccatcacggaatccaaaggaacatttgagttctcccgtttacatctgggatcttgctaggtattatgcgaataagattctaacactctggaacatttacgcttgtgggtttagttgcaggtgcctgctgatagtttccaaacttggaagtatgtatggtgaacagatcctgtcagttgtagctatgtctcagcttggactcatgaagaattaa

SEQ ID NO: 193639 - DNA, 1484 bp, Homo sapiens
  Payload ID: 18234
  Gene Name: transmembrane protein 150A
  Uniprot ID: Q86TG1
  ENST ID: ENST00000306353
  CDS Start-End: 300-956
aaacctttcagggctgctccgagggccgcagctagagtcggcgccacgagggggccgagcagggtgcggcggcggcggggcgctccggggaggccaggacagctgatggttgtggcagaaacatctcaaggtagctggtccgcccccacttccccatctacctcttgtcctccccccaacaccaccaccaccctggctcccctccctcatgaccgcctggatcctcctgcctgtcagcctgtcagcgttctccatcactggcatatggactgtgtatgccatggctgtgatgaaccaccatgtatgccctgtggagaactggtcctacaacgagtcctgccctcctgaccctgctgagcaagggggtcccaagacctgctgcaccctggacgatgtccccctcatcagtggccctgatctgcctcctgcgctacgggcagctcctggagcagagtcggcactcttgggttaacaccacggcactcatcacaggctgcaccaacgctgcgggcctcttggtggttggcaactttcaggtggatcatgccaggtctctgcactacgttggagctggcgtggccttccctgcggggctgctctttgtttgcctgcactgtgctctctcctaccaaggggccaccgccccgctggacctggctgtggcctatctgcgaagtgtgctggctgtcatcgcctttatcaccctggtcctcagtggagtcttctttgtccatgagagttctcagctgcaacatggggcagccctgtgtgagtgggtgtgtgtcatcgatatcctcattttctatggcaccttcagctacgagtttggggcagtctcctcagacacactggtggctgcactgcagcctacccctggccgggcctgcaagtcctccgggagcagcagcacctccacccacctcaactgtgcccccgagagcatcgctatgatctaaggtctggggagggtggctggcccggcctccacagcaccccaccccatatcttctttccatttatttcgtaccaaaaacaattttgagaaagtattctgttgggatctgggcttcctcacttctggagaagtggccatcccatgcccacctgtgccatggaggagtgggccctgccagctgccacagctgcatgacctgcttccccaccccacggtgtcgttttgtttttaaaggtcacctgtcctcactcacccagccagcccttcaggtgccttctactcccagtgccaaagccagaccactggggtttcctgctgcaggaattgggggctgggaacagcagaggggatagaagtctggtggaggtggagtgggcacgccttagcctacggaaaggcccatttctgggcccactgagctgcactgggattcttcactctgcccctcacttcctttagggcaaataacacagcagaaccacgtgggtattttagtacttttttttatattaaaagaattctaatttgc

SEQ ID NO: 193640 - DNA, 1518 bp, Homo sapiens
  Payload ID: 18234
  Gene Name: transmembrane protein 150A
  Uniprot ID: Q86TG1
  ENST ID: ENST00000334462
  CDS Start-End: 189-1004
gagggccgcagctagagtcggcgccacgagggggccgagcagggtgcggcggcggcggggcgctccggggaggccaggacagctgatggttgtggcagaaacatctcaaggtagctggtccgcccccacttccccatctacctcttgtcctccccccaacaccaccaccaccctggctcccctccctcatgaccgcctggatcctcctgcctgtcagcctgtcagcgttctccatcactggcatatggactgtgtatgccatggctgtgatgaaccaccatgtatgccctgtggagaactggtcctacaacgagtcctgccctcctgaccctgctgagcaagggggtcccaagacctgctgcaccctggacgatgtccccctcatcagcaagtgtggctcctatcccccagaaagctgcctcttcagcctcattggcaacatgggtgctttcatggtggccctgatctgcctcctgcgctacgggcagctcctggagcagagtcggcactcttgggttaacaccacggcactcatcacaggctgcaccaacgctgcgggcctcttggtggttggcaactttcaggtggatcatgccaggtctctgcactacgttggagctggcgtggccttccctgcggggctgctctttgtttgcctgcactgtgctctctcctaccaaggggccaccgccccgctggacctggctgtggcctatctgcgaagtgtgctggctgtcatcgcctttatcaccctggtcctcagtggagtcttctttgtccatgagagttctcagctgcaacatggggcagccctgtgtgagtgggtgtgtgtcatcgatatcctcattttctatggcaccttcagctacgagtttggggcagtctcctcagacacactggtggctgcactgcagcctacccctggccgggcctgcaagtcctccgggagcagcagcacctccacccacctcaactgtgcccccgagagcatcgctatgatctaaggtctggggagggtggctggcccggcctccacagcaccccaccccatatcttctttccatttatttcgtaccaaaaacaattttgagaaagtattctgttgggatctgggcttcctcacttctggagaagtggccatcccatgcccacctgtgccatggaggagtgggccctgccagctgccacagctgcatgacctgcttccccaccccacggtgtcgttttgtttttaaaggtcacctgtcctcactcacccagccagcccttcaggtgccttctactcccagtgccaaagccagaccactggggtttcctgctgcaggaattgggggctgggaacagcagaggggatagaagtctggtggaggtggagtgggcacgccttagcctacggaaaggcccatttctgggcccactgagctgcactgggattcttcactctgcccctcacttcctttagggcaaataacacagcagaaccacgtgggtattttagtacttttttttatattaaaa

SEQ ID NO: 193641 - DNA, 1776 bp, Homo sapiens
  Payload ID: 18234
  Gene Name: transmembrane protein 150A
  Uniprot ID: Q86TG1
  ENST ID: ENST00000409668
  CDS Start-End: 469-1284
aggtggttgcctgcgcgccgccgactcgccaccgctccactgggccggcacccagcctctccttggcgtggcctcttcggttgtccagcccttctcccagccctggtccctcagaaggagggtaactcccttccagatgttacggtccgcctgcgtctctcagcacgccggtggcatttgggttgaccgcggaggcccccagtgccagagggtgttcacgttctgccgtgggctcagcccaaactttggacgctcagagacccaacgggagcgctggataaggtgttgacccccttcccctcccccttcccggccagttacccactcctggactttgatctctctccaccaggccaggacagctgatggttgtggcagaaacatctcaaggtagctggtccgcccccacttccccatctacctcttgtcctccccccaacaccaccaccaccctggctcccctccctcatgaccgcctggatcctcctgcctgtcagcctgtcagcgttctccatcactggcatatggactgtgtatgccatggctgtgatgaaccaccatgtatgccctgtggagaactggtcctacaacgagtcctgccctcctgaccctgctgagcaagggggtcccaagacctgctgcaccctggacgatgtccccctcatcagcaagtgtggctcctatcccccagaaagctgcctcttcagcctcattggcaacatgggtgctttcatggtggccctgatctgcctcctgcgctacgggcagctcctggagcagagtcggcactcttgggttaacaccacggcactcatcacaggctgcaccaacgctgcgggcctcttggtggttggcaactttcaggtggatcatgccaggtctctgcactacgttggagctggcgtggccttccctgcggggctgctctttgtttgcctgcactgtgctctctcctaccaaggggccaccgccccgctggacctggctgtggcctatctgcgaagtgtgctggctgtcatcgcctttatcaccctggtcctcagtggagtcttctttgtccatgagagttctcagctgcaacatggggcagccctgtgtgagtgggtgtgtgtcatcgatatcctcattttctatggcaccttcagctacgagtttggggcagtctcctcagacacactggtggctgcactgcagcctacccctggccgggcctgcaagtcctccgggagcagcagcacctccacccacctcaactgtgcccccgagagcatcgctatgatctaaggtctggggagggtggctggcccggcctccacagcaccccaccccatatcttctttccatttatttcgtaccaaaaacaattttgagaaagtattctgttgggatctgggcttcctcacttctggagaagtggccatcccatgcccacctgtgccatggaggagtgggccctgccagctgccacagctgcatgacctgcttccccaccccacggtgtcgttttgtttttaaaggtcacctgtcctcactcacccagccagcccttcaggtgccttctactcccagtgccaaagccagaccactggggtttcctgctgcaggaattgggggctgggaacagcagaggggatagaagtctggtggaggtggagtgggcacgccttagcctacggaaaggcccatttctgggcccactgagctgcactgggattcttcactctgcccctcacttcctttagggcaaataacacagcagaaccacgtgggtatttt

SEQ ID NO: 193642 - DNA, 779 bp, Homo sapiens
  Payload ID: 18234
  Gene Name: transmembrane protein 150A
  ENST ID: ENST00000451147
  CDS Start-End: 235-372
tggtgcctgggcacacagccccttgggacaagctggcaccactgctgtccagcagggtggccctgacaaatatacttctagccagggcaatttccagagggcctgtagctgggggcatgctgcaggtgctggtgtggcatcaagccttagggacctcaacttgagtccccagcaacaataatgaggctgaatggggccagaaatcaaggtatgccatggctgtgatgaaccaccatgtatgccctgtggagaactggtatgaaggactctgcagacaaccttgctctaaagcttccttcatctctgtcccctcttgggcctgaggctgccacgagccagactgcaaccctgagcctcactgctcttctctgaaattggtccccaggtcctacaacgagtcctgccctcctgaccctgctgagcaagggggtcccaagacctgctgcaccctggacgatgtccccctcatcagcaagtgtggctcctatcccccagaaagctgcctcttcagcctcattggcaacatgggtgctttcatggtggccctgatctgcctcctgcgctacgggcagctcctggagcagagtcggcactcttgggttaacaccacggcactcatcacaggctgcaccaacgctgcgggcctcttggtggttggcaactttcaggtggatcatgccaggtctctgcactacgttggagctggcgtggccttccctgcggggctgctctttgtttgcctgcactgtgctctctcctaccaaggggccaccgccccg

SEQ ID NO: 193643 - DNA, 428 bp, Homo sapiens
  Payload ID: 18234
  Gene Name: transmembrane protein 150A
  ENST ID: ENST00000425160
  CDS Start-End: 228-428
tgggcacacagccccttgggacaagctggcaccactgctgtccagcagggtggccctgacaaatatacttctagccagggcaatttccagagggcctgtagctgggggcatgctgcaggtgctggtgtggcatcaagccttagggacctcaacttgagtccccagcaacaataatgaggctgaatggggccagaaatcaaggtatgccatggctgtgatgaaccaccatgtatgccctgtggagaactggtcctacaacgagtcctgccctcctgaccctgctgagcaagggggtcccaagacctgctgcaccctggacgatgtccccctcatcagtggccctgatctgcctcctgcgctacgggcagctcctggagcagagtcggcactcttgggttaacaccacggcactcatcacaggctgcacc

SEQ ID NO: 193644 - DNA, 821 bp, Homo sapiens
  Payload ID: 18234
  Gene Name: transmembrane protein 150A
  ENST ID: ENST00000433956
  CDS Start-End: 165-344
cacgagggggccgagcagggtgcggcggcggcggggcgctccggggaggccaggacagctgatggttgtggcagaaacatctcaaggtagctggtccgcccccacttccccatctacctcttgtcctccccccaacaccaccaccaccctggctcccctccctcatgaccgcctggatcctcctgcctgtcagcctgtcagcgttctccatcactggcatatggactgtgtatgccatggctgtgatgaaccaccatgtatgccctgtggagaactggtatgaaggactctgcagacaaccttgctctaaagcttccttcatctctgtcccctcttgggcctgaggctgccacgagccagactgcaaccctgagcctcactgctcttctctgaaattggtccccaggtcctacaacgagtcctgccctcctgaccctgctgagcaagggggtcccaagacctgctgcaccctggacgatgtccccctcatcaggtcacacagctaataagcggaggcacctggatttaagctggagccctcagattgcccagcccgtgttctggctcaaggatagccaaaccagccgcagggctcagcaaagagtgtcagggttgcccgaacactcctgggcactcccttctctctcacacacatgagctctgctttgggggcccagcctggaaccagttgttcatgagggaccctggatcttcacataaatcagtggcctgcctgctaaggagcaggtgcagcaagtgtggctcctatcccccagaaagctgcctcttcagcctcattggcaacatgggtgctttcatgg

SEQ ID NO: 193645 - DNA, 803 bp, Homo sapiens
  Payload ID: 18234
  Gene Name: transmembrane protein 150A
  ENST ID: ENST00000422458
  CDS Start-End: 27-164
gtatgccatggctgtgatgaaccaccatgtatgccctgtggagaactggtatgaaggactctgcagacaaccttgctctaaagcttccttcatctctgtcccctcttgggcctgaggctgccacgagccagactgcaaccctgagcctcactgctcttctctgaaattggtccccaggtcctacaacgagtcctgccctcctgaccctgctgagcaagggggtcccaagacctgctgcaccctggacgatgtccccctcatcagtggccctgatctgcctcctgcgctacgggcagctcctggagcagagtcggcactcttgggttaacaccacggcactcatcacaggctgcaccaacgctgcgggcctcttggtggttggcaactttcaggtggatcatgccaggtctctgcactacgttggagctggcgtggccttccctgcggggctgctctttgtttgcctgcactgtgctctctcctaccaaggggccaccgccccgctggacctggctgtggcctatctgcgaagtgtgctggctgtcatcgcctttatcaccctggtcctcagtggagtcttctttgtccatgagagttctcagctgcaacatggggcagccctgtgtgagtgggtgtgtgtcatcgatatcctcattttctatggcaccttcagctacgagtttggggcagtctcctcagacacactggtggctgcactgcagcctacccctggccgggcctgcaagtcctccgggagcagcagcacctccacccacctcaactgtgcccccgagagcatcgct

SEQ ID NO: 193646 - DNA, 943 bp, Homo sapiens
  Payload ID: 18235
  Gene Name: transmembrane protein 150B
  Uniprot ID: A6NC51
  ENST ID: ENST00000326652
  CDS Start-End: 184-885
ggctccagacacccaacctacccgtggccggatgtctgcctgagccccaccccgaatgccagcccttcttccctgagctcacccagccccagctccaggactgagagccccaggaagcttggagaggtgtgagagagacaggtgtccagcctcagccccgatccttcacctgcagagcccggcatgtggggctacctgtcgctgatgcctgtcttcctagctgtctgggctatctctggcgtctggatcgtttttgccattgcagtgaccaacaggactgtggacctcagtaaaggctttccctacatcagcatctgcggatccttcccccctcagagctgcatcttcagccaggtgctcaatatgggagctgctctggccgcgtggatctgcattgtccgttaccaccagctccgggactggggcgtcagaaggtggcctaaccagctgatcctatggacgggtcttctgtgtgccctgggcacctccgtggtaggcaatttccaggaaaagaaccagcggcctacgcacttggcaggggccttccttgccttcatcttgggtaacgtctacttctggctgcagctcctcctgtggaggctgaagaggctgccccagcccggggctgcctggattgggcccctccgcctgggcctctgcagcgtctgcaccatcctcattgtggccatgatcgtcctccacgcctgctcgctgcgtagcgtctctgcggcctgcgagtgggtcgtggccatgctgctgttcgcgctcttcggtctcttagccgttgacttctccgccctggagagctgcaccctgtgtgttcagccgtggcccagcctcagccccccgccggcctcccccatctccctgccggtccagctgtagcaggcaccctgacccgggccttgccctcaccagtgaagcaggaaagatggggccaatc

SEQ ID NO: 193647 - DNA, 457 bp, Homo sapiens
  Payload ID: 18235
  Gene Name: transmembrane protein 150B
  ENST ID: ENST00000585918
  CDS Start-End: 1-457
ggatccttcccccctcagagctgcatcttcagccaggtgctcaatatgggagctgctctggccgcgtggatctgcattgtccgttaccaccagctccgggactggggcgtcagaaggtggcctaaccagctgatcctatggacgggtcttctgtgtgccctgggcacctccgtggtaggcaatttccaggaaaagaaccagcggcctacgcacttggcaggggccttccttgccttcatcttgggtaacgtctacttctggctgcagctcctcctgtggaggctgaagaggctgccccagcccggggctgcctggattgggcccctccgcctgggcctctgcagcgtctgcaccatcctcattgtggccatgatcgtcctccacgcctgctcgctgcgtagcgtctctgcggcctgcgagtgggtcgtggccatgctgctgttcgcgctcttcggtc

SEQ ID NO: 193648 - DNA, 519 bp, Homo sapiens
  Payload ID: 18235
  Gene Name: transmembrane protein 150B
  ENST ID: ENST00000592731
  CDS Start-End: 49-303
ggatccttcaggctccagacacccaacctacccgtggccgagcccggcatgtggggctacctgtcgctgatgcctgtcttcctagctgtctgggctatctctggcgtctggatcgtttttgccattgcagtgaccaacaggactgtggacctcagtaaaggctttccctacatcagcatctgcggatccttcccccctcagagctgcatcttcagccaggtgctcaatatgggagctgctctgggaaaagaaccagcggcctacgcacttggcaggggccttccttgccttcatcttgggtaacgtctacttctggctgcagctcctcctgtggaggctgaagaggctgccccagcccggggctgcctggattgggcccctccgcctgggcctctgcagcgtctgcaccatcctcattgtggccagtatccttctttgatcgtcctccacgcctgctcgctgcgtagcgtctctgcggcctgcgagtgggtcgtggccatgctgctgttcgcgctcttc

SEQ ID NO: 193649 - DNA, 576 bp, Homo sapiens
  Payload ID: 18235
  Gene Name: transmembrane protein 150B
  ENST ID: ENST00000591570
  CDS Start-End: 174-576
agccaggccagcagccctagcttctggaaggatccttcaggctccagacacccaacctacccgtggccggatgtctgcctgagccccaccccgaatgccagcccttcttccctgagctcacccagccccagctccaggactgagagccccaggaagcttggagagagcccggcatgtggggctacctgtcgctgatgcctgtcttcctagctgtctgggctatctctggcgtctggatcgtttttgccattgcagtgaccaacaggactgtggacctcagtaaaggctttccctacatcagcatctgcggatccttcccccctcagagctgcatcttcagccaggtgctcaatatgggagctgctctggccgcgtggatctgcattgtccgttaccaccagctccgggactggggcgtcagaaggtggcctaaccagctgatcctatggacgggtcttctgtgtgccctgggcacctccgtggtaggcaatttccaggaaaagaaccagcggcctacgcacttggcaggggccttccttgccttcatcttgggtaacgtctacttctggctgcagc

SEQ ID NO: 193650 - DNA, 878 bp, Homo sapiens
  Payload ID: 18235
  Gene Name: transmembrane protein 150B
  ENST ID: ENST00000586609
  CDS Start-End: 188-379
ttcaggctccagacacccaacctacccgtggccggatgtctgcctgagccccaccccgaatgccagcccttcttccctgagctcacccagccccagctccaggactgagagccccaggaagcttggagaggtgtgagagagacaggtgtccagcctcagccccgatccttcacctgcagagcccggcatgtggggctacctgtcgctgatgcctgtcttcctagctgtctgggctatctctggcgtctggatcgtttttgccattgcagtgaccaacaggactgtggacctcagtaaaggctttccctacatcagccgcgtggatctgcattgtccgttaccaccagctccgggactggggcgtcagaaggtggcctaaccagctgatcctatggacgggtcttctgtgtgccctgggcacctccgtggtaggcaatttccaggaaaagaaccagcggcctacgcacttggcaggggccttccttgccttcatcttgggtaacgtctacttctggctgcagctcctcctgtggaggctgaagaggctgccccagcccggggctgcctggattgggcccctccgcctgggcctctgcagcgtctgcaccatcctcattgtggccatgatcgtcctccacgcctgctcgctgcgtagcgtctctgcggcctgcgagtgggtcgtggccatgctgctgttcgcgctcttcggtctcttagccgttgacttctccgccctggagagctgcaccctgtgtgttcagccgtggcccagcctcagccccccgccggcctcccccatctccctgccggtccagctgtagcaggcaccctgacccgggccttgccctcaccagtgaagcaggaaagatggggccaat

SEQ ID NO: 193651 - DNA, 830 bp, Homo sapiens
  Payload ID: 18235
  Gene Name: transmembrane protein 150B
  ENST ID: ENST00000592603
  CDS Start-End: 139-330
ttcaggctccagacacccaacctacccgtggccggatgtctgcctgagccccaccccgaatgccagcccttcttccctgagctcacccagccccagctccaggactgagagccccaggaagcttggagagagcccggcatgtggggctacctgtcgctgatgcctgtcttcctagctgtctgggctatctctggcgtctggatcgtttttgccattgcagtgaccaacaggactgtggacctcagtaaaggctttccctacatcagccgcgtggatctgcattgtccgttaccaccagctccgggactggggcgtcagaaggtggcctaaccagctgatcctatggacgggtcttctgtgtgccctgggcacctccgtggtaggcaatttccaggaaaagaaccagcggcctacgcacttggcaggggccttccttgccttcatcttgggtaacgtctacttctggctgcagctcctcctgtggaggctgaagaggctgccccagcccggggctgcctggattgggcccctccgcctgggcctctgcagcgtctgcaccatcctcattgtggccatgatcgtcctccacgcctgctcgctgcgtagcgtctctgcggcctgcgagtgggtcgtggccatgctgctgttcgcgctcttcggtctcttagccgttgacttctccgccctggagagctgcaccctgtgtgttcagccgtggcccagcctcagccccccgccggcctcccccatctccctgccggtccagctgtagcaggcaccctgacccgggccttgccctcaccagtgaagcaggaaagatggggccaatc

SEQ ID NO: 193652 - DNA, 1990 bp, Homo sapiens
  Payload ID: 18236
  Gene Name: transmembrane protein 150C
  Uniprot ID: B9EJG8
  ENST ID: ENST00000449862
  CDS Start-End: 320-1069
aaaggcttcggaaggaagcggctcgcccgcccacacccggctcctgccccgggtgactattaggggccccgggggggtggcagaagcccgagacccaggggatcaactctccccgaaggcctagcagcggggaccccagaataagtcgggggcgggccccggcgcggcaggagggggccgggcgggcgggtgagcagatcccaccccttcctgaaggaagcgccctacccgccgctactgctgccgccgccgccaccgcagcaggtcacagcccctcgaggcgacagcggccccgccgcaccagagcagtggtacaggcatggatgggaagaaatgcagcgtatggatgttcctacctcttgtatttactttgtttacttcagctggattgtggatagtatacttcatagctgtggaagatgacaaaattttaccattaaattcagctgaaaggaaacctggtgtgaagcatgcaccatatataagcattgcaggtgatgatcctcctgcaagctgtgtgtttagtcaagttatgaacatggcagccttcctagcccttgtggtagctgttctgcgcttcatacaactgaaaccgaaggttttaaacccgtggctgaatattagtggattggtggctctgtgtctggcttccttcggaatgaccttacttggtaattttcagctcacaaatgatgaagaaatccataacgtcggaacttccttgacctttggatttggcacattgacctgctggatccaggctgcgctgacactcaaggtcaacatcaagaatgaaggacggagagttggaattccacgggttattctgtcggcatctatcactctctgtgtggtcctctacttcatcctcatggcccaaagcatccacatgtatgcagccagggtccagtggggcctggtcatgtgcttcctgtcttattttggcacctttgccgtggagttccggcattaccgctatgagattgtttgctctgagtaccaggagaatttcctaagcttctcagaaagcctgtcagaagcttctgaatatcagactgaccaggtgtaaaccatcagtttttccttgctggtgaggtgggtgtgacagtgggggaggggccagtaggacacactcacaggacttgacatagaacctcatttcacacacacacacacacacacattcatggccacatttgccaaatgagcttttcagggcgagttatttctttaatgaaaaagcacaagcccttatgtgtcgaaatacacgctgttacactgaaaatatatgcacgacagagcaagaagcttgtgcatgatcacttcttatccgtccccttcccagcactccctcctcttcccattctctccacatgtctcaagcaccctaccgagtagggcaggccaaatgttccttgggagtaatgccaactcccgacgttgccttcaggtccaaagggcttggaaccagctcgtgaggaagttctgaatctggcactaatattcttgagtggataatagtgtatcatagaataggacggaaattgtattgagatgtgaccctgtgtcgcctgtggaaaggcatagtgagaagaactttcccacgaaagcccccttcatcgttgttcagtggtcggctgtgtggatcccaggagagacatatgccacagactgtgagagcaaagcccgccgctgtgatctggacttgatgcactgtgactgagaatgatttccaaatgtgaatatgtgtagggacgtggtctatcaggcctggaacaagatgggggcagtgaaggtatggtttagtgtttgctttcatagtatgccatgtacaatgttttatatttcatagtttcttttaagtaactaccatgagtctctctaagcctcatggacaaagatgtagaccaaatgcaagagctgagcttgctttgggttcaaccatgatcaaagaaaaactgaggtcacctgcaggcttacgtgggaagct

SEQ ID NO: 193653 - DNA, 403 bp, Homo sapiens
  Payload ID: 18236
  Gene Name: transmembrane protein 150C
  ENST ID: ENST00000454948
  CDS Start-End: 202-403
actgctgccgccgccgccaccgcagcaggtcacagcccctcgaggcgacagcggccccgccgcaccagagcagagtctcactctgtcacccaggctggagtgaagtggagcgatctcggctcactgcaacctccgcctcctgggctcaagcgattctcctgccttagcctcctgcatagctgggactacagtggtacaggcatggatgggaagaaatgcagcgtatggatgttcctacctcttgtatttactttgtttacttcagctggattgtggatagtatacttcatagctgtggaagatgacaaaattttaccattaaattcagctgaaaggaaacctggtgtgaagcatgcaccatatataagcattgcaggtgatgatcctcctgcaagctgtgtgt

SEQ ID NO: 193654 - DNA, 3296 bp, Homo sapiens
  Payload ID: 18236
  Gene Name: transmembrane protein 150C
  Uniprot ID: B9EJG8
  ENST ID: ENST00000515780
  CDS Start-End: 206-955
ttgtgcaaaaaccctaggtgtgcggacgaaagagagccaggcagaaggttacaacaggtcaggaataaataaccaccaggcggaggatccaagattctgtccttccttttgttggatgaggagcgccaggcaaacgcgtccacaaaggcttcggaaggaagcggctcgcccgcccacacccggctcctgccccggtggtacaggcatggatgggaagaaatgcagcgtatggatgttcctacctcttgtatttactttgtttacttcagctggattgtggatagtatacttcatagctgtggaagatgacaaaattttaccattaaattcagctgaaaggaaacctggtgtgaagcatgcaccatatataagcattgcaggtgatgatcctcctgcaagctgtgtgtttagtcaagttatgaacatggcagccttcctagcccttgtggtagctgttctgcgcttcatacaactgaaaccgaaggttttaaacccgtggctgaatattagtggattggtggctctgtgtctggcttccttcggaatgaccttacttggtaattttcagctcacaaatgatgaagaaatccataacgtcggaacttccttgacctttggatttggcacattgacctgctggatccaggctgcgctgacactcaaggtcaacatcaagaatgaaggacggagagttggaattccacgggttattctgtcggcatctatcactctctgtgtggtcctctacttcatcctcatggcccaaagcatccacatgtatgcagccagggtccagtggggcctggtcatgtgcttcctgtcttattttggcacctttgccgtggagttccggcattaccgctatgagattgtttgctctgagtaccaggagaatttcctaagcttctcagaaagcctgtcagaagcttctgaatatcagactgaccaggtgtaaaccatcagtttttccttgctggtgaggtgggtgtgacagtgggggaggggccagtaggacacactcacaggacttgacatagaacctcatttcacacacacacacacacacacattcatggccacatttgccaaatgagcttttcagggcgagttatttctttaatgaaaaagcacaagcccttatgtgtcgaaatacacgctgttacactgaaaatatatgcacgacagagcaagaagcttgtgcatgatcacttcttatccgtccccttcccagcactccctcctcttcccattctctccacatgtctcaagcaccctaccgagtagggcaggccaaatgttccttgggagtaatgccaactcccgacgttgccttcaggtccaaagggcttggaaccagctcgtgaggaagttctgaatctggcactaatattcttgagtggataatagtgtatcatagaataggacggaaattgtattgagatgtgaccctgtgtcgcctgtggaaaggcatagtgagaagaactttcccacgaaagcccccttcatcgttgttcagtggtcggctgtgtggatcccaggagagacatatgccacagactgtgagagcaaagcccgccgctgtgatctggacttgatgcactgtgactgagaatgatttccaaatgtgaatatgtgtagggacgtggtctatcaggcctggaacaagatgggggcagtgaaggtatggtttagtgtttgctttcatagtatgccatgtacaatgttttatatttcatagtttcttttaagtaactaccatgagtctctctaagcctcatggacaaagatgtagaccaaatgcaagagctgagcttgctttgggttcaaccatgatcaaagaaaaactgaggtcacctgcaggcttacgtgggaagctaagaaaatatcacagaaaaatggaaagaaatatggatgtgcagaggtaataaaaagagctgctgctggacatttatcaaagataggcaccttacagtatcttgttgcaagtccaaatcaggggagactttgttaatatgtatcttttgctcaaatttagtagggttttttttttttttggattaagggcttttcaaatttggaatttgtagaagccaattaaaagaatacccttcctaaaaaccaaattgacacagctggcccccctgctagccaacccgcagttcccagttcccacctgctgagagttcagaactcagaccgtaggtgtgggcttatgagactgtgcttcatgaagaaaagcagaattccaaattcaaactgttggagtgagccaagtggacagaccctccatgagtgcactttcttccaagaaatccccagatttaccccatagaggtctgggattacctggaatataatatgaaaaacattttttaggctgggtgtggggctcacacctgtaatcccagcactttgggaggctgaggcgggcggatcacctgaggttgggagctcgagaccagcctgaccaatgtgaagaaaccccgtctctactaaaaaaaatacaaaattagcctggtgtggtggcgcatgcctgtaatcccggctactcaggaggcggaggcaggagaatcacttgaacccgggaggcaggttgcggtgagacgagatcacgccattgcactccagcctgggcaaaaagagctaaaaactccatctcaaaaaaaaaagaaaaaaagaaaaacgttttttaattcaacccaaagtctgaatttcttgaggaaaaggtcaatgtcttttcatctctgtattgttccccacctcttaacacagtgcctggcacatactaggtgctcaataaatgtctgttgaatagaattattaataatttaagagtaggaaaaaggagtgtcagagagagactcaaagatgagtgagagagcatggaagatggctgtttcatgtgagacaggaatggaagaagttatgaatagggatcagatgggggagtgagaatccctgtaagtaaaatgtgaggaaaagaacaagctgagaacaagattctcctgtcaaaaaggcgtcttactgtaaatagtccaaggtgacatttgttagttttgaatactgcttttgggtttctttttttcatttttatattttaaaatttttatcaaagaacaaagacttatgtagttttcttttattctacacaatccaaattaaacagcttttggtgatgcaattgtacactttcttaagaatatatctaataccacattttagcagaaccaagcaatgactgacattattcattgggatctggccactaaataaaattcttttatgcataattgtta

SEQ ID NO: 193655 - DNA, 566 bp, Homo sapiens
  Payload ID: 18236
  Gene Name: transmembrane protein 150C
  ENST ID: ENST00000508701
  CDS Start-End: 61-423
agcaggtcacagcccctcgaggcgacagcggccccgccgcaccagagcagtggtacaggcatggatgggaagaaatgcagcgtatggatgttcctacctcttgtatttactttgtttacttcagctggattgtggatagtatacttcatagctgtggaagatgacaaaattttaccattaaattcagctgaaaggaaacctggtgtgaagcatgcaccatatataagcattgcaggtgatgatcctcctgcaagctgtgtgtttagtcaagttatgaacatggcagccttcctagcccttgtggtagctgttctgcgcttcatacaactgaaaccgaaggttttaaacccgtggctgaatattagtggattggtggctctgtgtctggcttccttcggaatgaccttacttgctcacaaatgatgaagaaatccataacgtcggaacttccttgacctttggatttggcacattgacctgctggatccaggctgcgctgacactcaaggtcaacatcaagaatgaaggacggagagttggaattccacgggttattctgtcggcat

SEQ ID NO: 193656 - DNA, 2562 bp, Homo sapiens
  Payload ID: 18237
  Gene Name: transmembrane protein 151A
  Uniprot ID: Q8N4L1
  ENST ID: ENST00000327259
  CDS Start-End: 145-1551
gccgcgctcgggctcgagctccgcgcactccctccgcggccgctgagccgagcggacgcccccgggggccgcgtcgcagccctccgtgctcccccctatcatgcccggtgcccaggctggggccgcccaagcagccaggacaccatgcccgaggacggcgctggcgacggcggggaggtgcccgcgctcatcccggacggcgagccgctgcgggaagagcagcggcccctgaaacagtccctgggaagctccctgtgccgcgagtcgcactggaagtgcctgctcctcacgctgctcatccacgcctgcggggccgtggtggcctggtgtcgcctggccacagtgccgcggctggtcctggggcccgaggccgccttggcccggggagccgggggcccgccaccgacctacccggccagcccctgctccgatggctacctgtacatcccgctggccttcgtctccctcctctacctcctctacctggctgagtgctggcactgtcacgtgcggtcctgccaggcgccacgcaccgacgcccacacggtgctggcgctgatccgccggctgcagcaggcgccgccgtgcgtctggtggaaggccaccagctatcactacgtgcggcgcacacgccagatcacgcgctaccgcaacggcgacgcctacaccaccacgcaggtgtaccatgagcgcgctgacagccgcacggcccgcggcgagtttgactactcggcgcacggcgtccgcgacgtctccaaggagctggtggggctggcggagcacgcggccacgcggctgcgcttcaccaagtgcttcagcttcggcagcgcggaggccgaggcctcgtacctcacgcagcgggcgcgcttcttcagcgccaacgagggcctggacgactatctggaggcgcgcgagggcatgcacctgaaggacgtagacttccgcgagtcgctcatggtcttcgccgacccccgcagcccgccctggtacgcgcgcgcctgggtcttctggctcgtgtcggcggccacgctgtcgtggcccctgcgcgtcgtggccgcctatggcacggctcacgtgcactaccaggtggagaagctctttggcgccagctcgcccccgccgggggccgtgcccagcgggcccccgctgtcccgcgtggccacagtggacttcactgagctcgagtggcacatctgctccaaccggcagctggtgcccagctactcggaggccgtggtcatgggcgcgggctcgggcgcctacctcagaggctgccagcgctgccgccgctctgtcagcagcaactcgctgccccccgcccggcccagcgggccccgcctgcccttcagccgcagccgcctctcgctgggcgctggcggccgggccacgccaggggtcttccgcagcctgagcggggggccgctggggcgccgtggagaggacacggaacccctggagagcccgccctgctatgaggacgccctctacttcccggtgctcattgtccacggagacagcggctgccagggggatgggcagggtgctctctgagaccccccacggcccccagagtggccccctccccaccattccaccatgggcttagatgcccgagtgattgttgtccaaaacaggcgggaaaacagaccagccacacacaaggggcaggggtgagggtgggggtgggggtccttaaacagactaaaatgcagttacctgtggtcattttggaggaagtggaagcctaagaatcgcccccagcatggcttcatcccccaagatggccgatgatctggcctgaaggcctctcacaaagggcaggagaagaagcttccagaaaggctgggatggaggaggagtcctgcggccagctgttgcctgcagcagaggctgcctgtggacacttccctaccggggctgaggccatgctgggagcccccccagtgacgcagaagcacaaattggaggcttggggccatgcccagccaggttggcttccctggggctgaagagctggctgtggtggcaccatggccttggccctgctactcacccaacattcccatcctcccctgataggcccctcctccttgcctgccctctctcccgctgctcagggccagtcactccccccacatgcagctacccctacaacctggggttccttctcagggcctcacctggtccccacatcccctggcctctgctcctgcctcccaaagtccatgtctgcctccatcagccacacacacgcagggacgcccgttccttgccctcccggacttatctactcttcactttcctgatgatccatggggcccaggcctagagggcatccgaggggctgggccttggccacagcctcttggatgatgtccttgctccaccacgcaggcccttgcttctcccatcaacgagtcttggcccaggggacactgaccctcccccagggaggagagaggagttccttccctttcaacgagggcttccacgccctctaaggggtggcggggaagggaggaggctgagaagatgcagattaaataaaggtatggaatggaa

SEQ ID NO: 193657 - DNA, 4895 bp, Homo sapiens
  Payload ID: 18238
  Gene Name: transmembrane protein 151B
  Uniprot ID: Q8IW70
  ENST ID: ENST00000451188
  CDS Start-End: 278-1978
cgggagcgggcgggaggcggagcggcgccgcgagggcctcaaggtgacacccgcccccggccccggccccccccggcccggccccccagcctgcctcccaccctcagcccccagccccttactcccggtgccctttccgggccccctcccccggcggggggtggggagcagcgagggccccgccccctcccgtcctctccccagggcccgcgcaggatgcccccggcccctggcagccccccgggaggtcctgagctcgacgcgccccctctacgccatgtccccccctggctcggccgcgggagagagcgccgccggcggcggcggcggcggtggcggccccggggtctcggaggagctcacggcggcggcggcagcggcggcggcggacgagggccccgcccgagaggagcagcgtcccatccagccctctttcaccaagtccctctgccgtgagtcccactggaagtgcctcctgctctcgctgctcatgtacggctgcctgggggcagtggcctggtgccacgtcaccacagtgacgcgcctcaccttcagcagcgcctaccagggcaacagcctcatgtaccatgacagcccctgctccaacggctatgtctacatccccctggccttcctgctcatgttgtacgccgtctacctggtggagtgttggcactgccaagcccgccatgagctgcagcaccgtgttgatgtgagcagtgtgcgggaacgtgtgggccgcatgcagcaagccacgccctgcatctggtggaaggccatcagctaccactatgtccgccgcacccgccaggtcaccagataccgcaatggagacgcctataccaccacccaggtctaccacgaacgcgtcaacacgcacgtggcggaggctgagttcgactacgcgcgctgcggcgttcgcgacgtgtccaagacgctggtggggctggagggcgcgccggccacgcggctgcgcttcaccaagtgcttcagtttcgccagcgtggaggccgagaacgcgtacctgtgccagcgcgcgcgcttcttcgcagagaacgagggcctagacgactacatggaggcacgcgagggcatgcacctcaagaacgtggacttccgtgagttcatggtggccttcccggacccggcccggccgccctggtacgcctgctcgtcggccttctgggccgcggcgctgctcacgctgtcgtggccgctgcgagtgctggccgagtaccgcacggcctacgcgcactaccacgtggagaagctatttggcctggagggcccgggctcggccagcagcgcaggcggtggcctcagccccagcgatgagctgctgcccccgctcacccaccgcctgccgcgggtcaacacagtagacagcacggagctcgagtggcacatccgctccaaccagcagctggtgcccagctactctgaggcggtgctcatggacctggcggggctcgggacgcgctgcggcggggcaggcggcggctacgcgccctcgtgccgctacggtggggtaggcggcccgggcgcggcgggcgtggctccctaccggcgcagctgcgagcactgccagcgcgccgtcagcagctcgtctatcttctcgcgcagcgccctaagcatctgcgccagcccgcgggccggcccggggcccggtgggggcgcgggctgcgggggcagccgcttctcgctgggccgtctctacggctcccggcgcagctgcctgtggcgcagccgcagcgggagcgtcaacgaggccagctgccccacggagcagacgcggctgtccagccaggccagcatgggggacgacgaggacgacgacgaggaggaggccgggccgccgccgccctaccacgacgccctctactttccggtcctcatcgtccaccggcaggaggggtgtctgggccacagccaccggccgctgcaccgccacggctcctgcgtagagacctcactgtgacctccggccccggagtggcccgcgccgtcctcccgcctgcccctcgccggactgtgctccctctgcgacgcagggcgagtcaccacggtgactgaggccgcgcggggggcagggaaagggaggtgagggccgcaagacaggcccggatggggccgagacccccgctgtccctgtacataaagagaccgatgggtgggagggggtcggctgctccccgagatccccctggcagagtcattcttccagccccaaccctgagttcctaaagggacacctccctcctgtccagcccttcaacagatcttctgttagatgacaaccgtgccgtgggccccgcgttgggccttgtctgaagggagaggccctggcatgcggatgggagatttagaggctgtggagaagggaacttggggctttccttccttcgtggcctcactcccctggggcctctctctatggagggggcaatggtttggtgaccagcaggctggattccaactagctaatgcattcagcaggtctgaggctggggccaggtgtcagccctaggcctccatccaacaccgtggaaatgttgctgccctcttcttggcgctgaccccaagattggggtttcctttctgccgctccctccactgttgtttatctaactgggcccccactccaggtccagagggactgtgctcactgcacagacatcactcaccttccgctccccagtcctgcagagctgttgccagggtgcagtggggaggggagtgaaatgtggaggactgtgtacctcagtcctctctctaaactcctcagcctcccaacaggggcctcctcacctgggttctgagtgtataccccttttagagagtgagatgccacccgggcagcactcgttaaagctggccagcacgagtgactaaggggagagagcatgacatagacctgggtggcaacggggacctctggaagcaggtgggagtaagagaggagagggcagtggagggtagaggaaaaggacctccagaggtggggtgtctgtgggggcggcctttgcctccctaaacctgtgcggaggagtggagtgtgcttgtcgctcaaacacatctctgggggactgaggacgttgtcacaagccccaactggagaaataattccaatggcagggtcagaggcaagcattctctaaatcttgcccaacccttccatccttccctatcctatgagctgaagccctgctgtgtgtcgcagggtcttcaaaggggcatcctgccaccaccccagggcgctggccccacgtcctgttcccctaaagctctgacaccgccttctctccgtgtgctccccccaccacctccaccctgatgtgcttcagtgtgcatgtctgtgaacagccctcctgccctgccaactcccctggctaaagtctccccagcagatttagcacccagggattgagctcacatttcaggctagagaggataacccttgggccacccacatctctcacccctgatgcttcttacttcgcctgagccatcagaactcctccttaccctccttcagcccctctcatcttccttcagcccagccaggcctgcaccaccaactgtgtggcctccacctatgcaacatcgcctctggctccccttcccttcttcctagcggggagtgcgaggggcccaaattgtggggataccatggcccatggcttctaaagggtttagctttactttcaggtagagatggctgagtgaggagggagaagaggctagagagagggaggcttgggcaggggaaacagctgcccaccaggttttcctggacagcagtgcccacctgcctactagcactgaacctgcctggaccctgagtctgtgctccttgggggcctggcgtttggagcacccttctttcctctgaatggacatctgtgaggtacaggtggtgagctgcagcctcaggctccatttcttagccagctggcacctggatgtcatgctttgtgtggggacagcctggccacctcagggctccaaggaaggaggaacgtggctcctcctccctcaggcctgttcctgagacagagcctggtctcacaagaggggaagggggacctctattattatttttgcctgtattgaccatttctgcctaggtcgtctcagacagcctcatctcccacacatgcacagacttagagagaaaccaattctttggtctattttcttggtagctttactgattgccagggaaaatgaaaaccagaaaattaattaatctctaaaattaaactttacactgaatgttcttgtttctctaattagaacttctgctagcagctgtggctatacacacacacacacacacacacaccctcacacctacacgtttgcactccggaactgtcagagggtgtcaggcacagacagactctaggttgcctagacaggcacacacatgcagtcactcccaagccccctttggtgctctgctcagcgcctgcttagcggaaggagtccctggagagcaggcactcctggactggggttgtagcccatgacctgccctttggggacacagttctggaggctctgggccaatgaatcagcccaaggaggatgggcaatggcgctcagcctgaatcagtcagctaggtctcttgtggccctgggggctgatgtgattcctgtaggtgtggccccagggtggacagctacagagtgatgggggactcatgtagggcacctggaaggctccatgtgtcctggggacaagggcttgtggggtgggctgggcctggctggggagaagacaggtctctgtcaattgggtgcatcacactgtggcctttttgtcgtggatttaagcgcaaagattgtacaaatcaaactggtggataataaagtcgtggatgactcactga

SEQ ID NO: 193658 - DNA, 1140 bp, Homo sapiens
  Payload ID: 18238
  Gene Name: transmembrane protein 151B
  Uniprot ID: Q8IW70
  ENST ID: ENST00000438774
  CDS Start-End: 1-669
atgtccccccctggctcggccgcgggagagagcgccgccggcggcggcggcggcggtggcggccccggggtctcggaggagctcacggcggcggcggcagcggcggcggcggacgagggccccgcccgagaggagcagcgtcccatccagccctctttcaccaagtccctctgccgtgagtcccactggaagtgcctcctgctctcgctgctcatgtacggctgcctgggggcagtggcctggtgccacgtcaccacagtgacgcgcctcaccttcagcagcgcctaccagggcaacagcctcatgtaccatgacagcccctgctccaacggctatgtctacatccccctggccttcctgctcatgttgtacgccgtctacctggtggagtgttggcactgccaagcccgccatgagctgcagcaccgtgttgatgtgagcagtgtgcgggaacgtgtgggccgcatgcagcaagccacgccctgcatctggtggaaggccatcagctaccactatgtccgccgcacccgccaggtcaccagataccgcaatggagacgcctataccaccacccaggtaccaggctgcctaggaagccaggtggtgcctttaagatctccatggagaaacgcacagctcgacgcaggatccgacgaagaaccagcctaaaggggttcagagcccagacatgaatccccagcggctcatggtcagcaatatggggagtgggaaggacgaggtccagtgtgtgctcccacctcaaagctctccctctccccattcctcctactggctcaaccagacccacctctcctgttccctccctcctccacctgagacccccagcagcccctgtcctctctgtagcccttccagactcacgggggacctgacatcccagggaagatgccatcagagatgcagacactgagtgtgcggatgtggtcagccaccacgcggtacgctgtgtctgtgcgcccctcgtctgccacccctactcggcccaagtaagggggtgccctgcagccctgggaagcagaagagtcagccagtggccctgcctgacctggcccaggtgggtgctctttatcgcctctagagcatctgccctcagccctaaagccaaccacatccagaatg

SEQ ID NO: 193659 - DNA, 10698 bp, Homo sapiens
  Payload ID: 18239
  Gene Name: transmembrane protein 154
  Uniprot ID: Q6P9G4
  ENST ID: ENST00000304385
  CDS Start-End: 233-784
ggctggagaggcgtgataatagaaccagtgcttcaacagcaacttctcttttgcaatccttgctggtctgacaggctcctgcagaattacatcacttcctaaaaaacaggcacacacctctccttcaagtcagcaccgacccaaacaagcaggaaacaggaaatgttcacgtttcagagaggctgcagcccggcgcagcatcctgagcgcgcctctgccgaggcgagcggacatgcaggctccccgcgcagccctagtcttcgccctggtgatcgcgctcgttcccgtcggccggggtaattatgaggaattagaaaactcaggagatacaactgtggaatctgaaagaccaaataaagtgactattccaagcacatttgctgcagtgaccatcaaagaaacattaaatgcaaatataaattctaccaactttgctccggatgaaaatcagttagagtttatactgatggtgttaatcccattgattttattggtcctcttacttttatccgtggtattccttgcaacatactataaaagaaaaagaactaaacaagaaccttctagccaaggatctcagagtgctttacagacatatgaactgggaagtgaaaacgtgaaagtccctatttttgaggaagatacaccctctgttatggaaattgaaatggaagagcttgataaatggatgaacagcatgaatagaaatgccgactttgaatgtttacctaccttgaaggaagagaaggaatcaaatcacaacccaagtgacagtgaatcctaaacctgaatggcgctcatgttttccaagagaagcagcccctgagggagtctgctgaggctgccaacagaggatgaagaggatacaaatttaattaatttcaaatcaacatagacacaagaaccttttgctgtttcttccaacgcccactcttcctaatgatggcatcacttgcacttggaagaatgtgcaattgagaagtactaggaaaaggcctggctgccatccatcgctgcctctgagggtggagaaggaggcgggtgatgtgctcacttctgatcaacatgtgttgcctcctctcagccaacttctagctcactgaactcactctggtcatgataaatgttcgtcacctttctgcttcattccttagggcctaaatcaggaagctgttttatcgatggtttccttttgggtcagtaaccagctttggataatttcctctgattattcaagtcgtgggacaggtaaactacattcagcaggaacttttctcgaggagtgttatgtcatggaaaagacaccaaacacagcaagtattttaatgaatacaccatcccagggggtcagtaagctctgcctgccaagaagacacagtgagaggggtccacagtcctgatgaggtggcgtttggtaacttgtagaccctagcatggccaggtctggtcacccttaagaacttctcagagaaactaggaatcttcagtgaaagaactaatgttctcctcagctgaaattcccttgcttgtcagcatttctgcaaagctcacacttgtttcaccatacctcccttggatgtgacatgtaggtaggaagtatgtgcaggtgggagtcatctgtcagccttctatgtttcagagatcctgaaggtggtttgaaacaaacagaagaggagcaggaaatatccgtgcctgtggcagatctcactcatcatgcttagcattctctcccgccaagctgggataagcctcatgtcctaacacagcacaacaggaggtctctgtcagtccatcagagatgacattctatgtgatatttttgacatccttgtgctaaaagcaatggcacaaaatggaaaagggcctattgaccacacctactccagtaaaattgttcttcatttattccttaattttctaaatctgacccctttaaagcaatctagcaaattgagaatcctcagctctccttggatacctgatattttatttcaagaaagagacaaagaaggaaaattttatttattttactacccacatataaaccgaagggagatgggactacccaaacatttgctgctcaattttgtgtcttgtgcttgaaagtctgccctaatgcataacaaaaactacttgtctcctaccttttgggatccctttaacaagtatttgccttctgaactacgtggataatttcaaaggcagagttccagaccagagaggtctttccatacaatgaaagctataactagctggttgtgtttaaccactgctatcacgctatcctgggactgcatagaactttgacaaaagacagacttcatggtacacaacttcaacagattttctgtcatattctcaccagcacatctgaatgaggctttgtgttttccttgctctcttgcatgttccttttcaactcatggcccacagtgactctcagatatttatgccaaaattgcatacaattgttttctgaatcataacttgtctatttttctgcctatgtgtgctactttcagtttgtttctcatcaacattttgactctcagaagagcctccatttgcccctttctctctttaggtatctaagatctttgaacacctgggcctttacatttgatccaaccctatcaaataatgaacttctcagagaggcatctggggtcctggaacttcatgttgatgaagtcatattatataatatgataaaaatattctcatgcagtattttaaataatttcaaattctagaagaagcaaatttcagcgacatgtcattgagtttttatttggtaaagctataattgtgcagtgtacaaagcactttttaaaaagatagtttattctgtcagggtatatgaagttagtatacagccagaacagccaagcctcaattcttgtaccttgtgtctttttattactgtttaatcaatagatatcatatgtttatgacagtttcaagaattgtttttaaacccaaacttaattttatgtttcagactattgttaaaaaaacaaaacaaaaaccaaaaaaaccctcactaatttgccctaattggatagggcaatcagaacaaaatctgactttcgaatatttaaaagatatgtaagtttgattgcattttcgtacattttaagcaaactaggttaacaacaacatagcctagtcaaacttctcaggaaacttgttttaataaatatgtaaaaatacccattcatgactcttgacccaatggtgtgactcctccctctgggaagggctttgttacccaatgcaagaccacagcctggatccaccttgatgtaggtggctcctggataacccacatcaaacaaatgtgataaagatgagtaaaactggtcttgggaaaataatttcatagtttttttttctcctagttatgctgtataatacaggagaaccaaaagctgtaaaattattttattttattttttaaagacagggtctcactatgttgcccaggctggtttcaaactcctgggctcaagcagtcctcctgtctcagcctcccaaagtgctgggattacaggcatgagccactgagcccgaccagctgtaaaattattatattcattttcactatgtgctacttcttctcacctgactttttttttttttttttgagatggagtctcactctgtcacccaggttagagtgcagtgtcacgatctcggctcactgcaacctccgcctcccaggttcaagcaattctcttgcctcagcctcccaagcaactgagattacaggcctgtgtcactatgcccagctaatttttgtatttttagtagagatggggttttcaccatgttggtcaggctggtctcaaactcctgacctcaagtgatccaccagcctcggcctcccaaagtgctggattacaattgtgagccactgtgtctggccacacactgactttcactgtaatatctggatgttttatgtaacatatctgggcaatagggcttatggcagaattggccctcgtggtgtaggccttccaagttccaagtctcatttttagtattcctccgttccaacccctggatccaccagttccaacagcctggatccaccttgatattgacagccaggcagatgcttctgctgatcaccgcagctctagcaatggaaatggatatgttaagaaaatacttgtctattcttttattttggtggtttaaactattaattcacaccatctctgaaaaaaggccttatgttgactaaagaaaacataggctttagtttcagcttctgtcagaattagtaccaattctgaatctggtggagtgataagacatggtttcatgctgggaagacactgctgaaatcctccttgtgggagaacatggaaattttatactgaattaaattaacgcatgtgacttttcacattcagagacattcaggatgaattctggggtttccatttaatagctataacaggcagtccagaacaacttcacatatagcagcatttctgctatgtgacaatgaccaaaagagttcctgtatattagtgtctagtggaatatttcaaattgcagaacccagacaaccaattgcctgaattattattattttttgtttttagcaactctttggctttatcttgatactgtcttgtctggcaccaaagttttatttccttcttagtcctcttggggatagtttttgggtgtttttttttatttttctttttttgagacggggtctcatgctgatgcccaggctggagtgcaatggtgtgattatggctcactgcagcctcaacttcccaggctcaggtgattctattacctcagcctcccaagtagctgggactactggtgtgcactactaggactggctaattttttgtatcttttgtacagatagggtttcaccgtgttgctcaggctggttttgaacttctaggttcaagcaatcctcccaccacagcctccaaaagtcctgggattacaggtgtgagccaccataactggctggaattatttgtacctggaccttgtgttttgtttttttgccctactatcttttctaaataacatatcatgttcctgagatagcagtatatacaattatgtaaaatagagctttatatgaactctgtacatgctctaagctctttttgaatgatattttaagaagtttctaaaccaaagtgcttaagaaaacatgaagatgttaatttcatgaagactgtacaagtttagaagtacaatgtagacctgtttaagacaaaggtggatgggctttggggttttttttacaattggacttcaggtacagaaggcttgggtaatggtactcctcagttcatatcaccttatcattggcctttagtattttgtaaataagtaactggacttttatgaaaagcatattcttaacagtttcccatttcctttttttttttttttaagatagtgttttgctctgttgccctggctggagtgcagtggcatgatcttggctcactgcagcctccacctcccaggctcaggcgatcctcctgccccagcctcccaagtagctgggattacaggcgtgcacaactgcatgcacaactaatttttgtatttttagtagagacagggtttcgccatgttggccaagctagtctcaaactcctgggctcaagtgatccgcccacctcagcctcccaacatgttgggattataggcataagccaccatgcccagccagttttcatttctttggtctgcatgtaaaggactaaagaatgatatgtagctactacactgcagcaaacaacatttttccagtgtacaaatcagtggagagtaagcaatgtattactctgatgtcggtgaaacacctcaaattataaataatgccaggaacatgtgaaaactccacatgtttaataaatgccagctttcagaaaaagcagagattataggtattcaacaagttaaacaataatctggtagattagtaataatttaacacatgtgtatcttgtatttaaagttaactgaaaattatgtaaaaaaaaaaaacactgtgtttgactttcttttgttttacaagtgatgcagagtatctgctgagaaggtcagttagatcatctgatgtcatatttgccacttagcttttgtcccagcagcatataaattctaccttgtaagcctcatattagaagtggtcccagccaggcacagtggcttacttcccaacactttgggagtccacggctggtggattgcctgagctcgggagtttgagaccagcctggccaacatggtgaaaccccatttttacaaaaatgcaaaaattagccaggtgtggtagtacacacctgtaatcccacctactcggggggctgaggcccaagaatcacttgaacccaggaggcggcagttgcagtgagccaagattgtgccactgcactgcatcctgggtgacagagcaagattctgtctcaaagaaaagaaaaagaaatggtcccattgctacggattagaactaatttgtaaaactatcagaattttaagactgattaaaggttttaggtgtttttctcctactttgcatactgagaataatatgtatagtatttttccagtatgatttacaattttataaatgtcagtatacatatgtatatataaattattctcaactccatttttttttaaataaaataagtacatgtttgtgtgctaaattgctcatttggcagtgatagattgaaaaacatttataaatttaaaaataaagcactataagatatgaggaatgaatagcttctatgtgaatttctatgtaattaatatcaatatttagaataaaagtgtatttgaggataagatatttgtttactaaaatgttttatttactaagagtagaggtgaattatgcatctttctaaggaaaagttcttttaatttctgtgtctatgaaaaagaattcataattcataattcttaattgccctcttttgatccatataattctttaaataaacgaaacaataccaattcaaaaaggggcctgctttgtataaaattgtctaacctaaaaattaagtagactttctgcatatctaaaatatattattacacattcttgtctttattcttccttacaaaacatttttaaatgaaggaatgaaattttaattgtttatgagaatataacttttaaaaatatttctagtaggccaggcatggtggctcatgcctgtaatcccagcactttgggaggctgaggcacgtggatcacctgaggtcaggagttcgagaccagtctgaccaatatggtgaaaccctgtctctactaaaaatacaaaaattagccaggcatggtggctgtcgcctgtaatcccagctattcgggaggctgaggcaggagaattgcttgaacctgggaggcggggtttgcagtgagtgccaagactgagccactgcactgcaggctgggtgacagagtgaaactccatctcaaaaaaaaaaaaaattctagtaaaaatggaaaaatccacaagaaaacctctttttttcctgattactcacttttcttcatgcctttaattttaacctcatctcacaccttgatattagaagaaagtaaggctgaaaggcagattcataagttgtagataacatgaagacttccttgaataaggatttattctttcggctcacaaagaccagtcagtattattgacaaacaacaggcaggaagatttctcctaaaagtctcaactaaagttaaacctggtccattatggcatcaatctacccctagaaactgatgcagagtctatttcctccctgttttaactagaacttagccagactggagacagcatggacccaaagagcatgcagtcccacagagttagggaaaggatgcatcttgaccagcattcatcatgtggatcagttaggaattaagttcctgattcaaggtgagctcatatggccgctccctggtcatctaggacacaagttccttctaactcttccccaccttcattagtacagggcttctttcctgtgttgccacatgatccaaaatggtggttgtaactccagcatgatattcacaagaaggaaagagagggaaccagcacaagggtgagcctcccaagtaggtcagccacttttaaatagctttcctgccagcccagtgaagcaactctgcttacatctcattggccaatctctgcaaggcagcagggaacagtcatctctatggttggtacattatcactttcaacaataagggattctgtctcacaaagtggtggaagaatattgggtatctgaagaggtagccaccctggccagaaggtgctaaacactaaacatacatcatctcattttaatcctagtaattacttatgaggtaggtttagagaacttataccttgttccatgtctttccaactccaaagcacaagtttttaatcactgcactgcactgcatccccaataactagccgtaggaaagtgttttaaaaggcatcacttggcggggtgcagtggctcacacctgtaatcccaccactttgggaggccgaggcaggcggatcacctgaggtcaggagtttgagaccagcctggccaacatggtgaaacccccgtctcaactaaaaatacaaaaattagccaggcatagtggcatgtacctgtaatcccagctactcaggaggctgaggcaggagaatcacttgaacctgggaggcggaggttacagtgagatgagatcacaccattgtactccagccttgtctaaaaaaaaacaacaaaaaaacaaacaaaaaaaagtttcagtcattgtcaaggatgccttaaggtgagcatagcctgagataagaagtaacagaggctgcaggctgagataagaaggaacagaggcagtgaaggcaggaccctaggcccagaagtaatggtctatcatgctgagaaaaaagccagggcttagaataggggtgataagtaaaaagcctagttttaaaatctaagtgctggtaaaggtttggtcactaggtgaaaaaataaagttcccacttactagagctgacataaacagcatatgatcctctttaaggttgcagtggagaggcatgtccagggactctcaagttagagacaggtgtgtttagtgctagaattggaaagacattcaagcagactggcatgttgcctcttcacagccatagtcgtgctggcttgcaggatactccagcctagaatgtatataggagtgtggagaacagcaaaatcagcattgcttgggattcagcctgagctcaagtggcccacccctggaggcatccagtgttcacacttcccaagagagaaaacctgattggatgggtgtttcagcagtctattgctgcttaaacacctcaaaacttagcagcttaaaacaacaacactcaatttatttttcacacaaatctgcaatttgcatgaggctcagtgcaaatggttcaactctctcccacacggcattggctgggcagttcaactggatctgggggtcccactttcagatgactcacatggctggcaagtttgttctggctgtcggataggagcccagccaagcctgtggtccagcggccttggcttttatgatgtgggcctctccatagactccttgggcttcttcacagcatggcagctgagttccaagagcaagtgtcccaagagagcaaagtagaaatgcatagtatttttataatttagactcagaaatcacatcacatcacttctgccatactttattgtttgagacagttacaaagtctacctaggttcaaggtggaaaggacataaaccccacttgtccttggaggcgtgtcaaagccacattatgagaagagcaagtgggataagggatttgttgcaggcaccgttggaaaatgtgatctgcccaaattggtgtgtcttcatgcaatatcgaggaaatatattaggtagtttcgtgtcaaggaacattgtggatatttgacctccctgaatcccagtgcctatgtgctctttggcttggacatagacccctggtccagtagtctgtagtaggtggtagaactagttttaccaactacatgagtcatgagccatgggactgaatgggttgtaggtggatcagacacatagaaatgtatgactactctcaaagcatgaggttaaaatgggagcagattagactgagcaccttgaggatagggatcagtcttactcatctctgtatcctgaaaagtgcttggcgctactgcacgctccataataacagaaaaaccaattatttaatgagctaggagttacatatcatctttccttaagtacctaatcagtctttatcatcagtgagtgcagaactcaaatatggtattgttcatcttccatcaccattttctcccaagtttcctggtttaattgcattttcctcactttccatctaatggatcctgatgtcattctttatctttatttcatattgtcctattgtgtgtattgtattgtatttttagctacattaaatccaatatggaaggaagcagagaacgatcataattgaactaacaagcaagtggaggtggagagaaagtggccccaatttggaaggtgaaggaaaactggggatggagcctaactgatcattaaaatgctcgaagcagctctttccaa

SEQ ID NO: 193660 - DNA, 878 bp, Homo sapiens
  Payload ID: 18239
  Gene Name: transmembrane protein 154
  ENST ID: ENST00000504064
  CDS Start-End: 80-457
aaacaggaaatgttcacgtttcagagaggctgcagcccggcgcagcatcctgagcgcgcctctgccgaggcgagcggacatgcaggctccccgcgcagccctagtcttcgccctggtgatcgcgctcgttcccgtcggccggggtaattatgaggaattagaaaactcaggagatacaactgtggaatctgaaagaccaaataaagtgactattccaagcacatttgctgcagtgaccatcaaagaaacattaaatgcaaatataaattctaccaactttgctccggatgaaaatcagttagagtttatactgatggtgttaatcccattgattttattggtcctcttacttttatccgtggtattccttgcaacatactataaaagaaaaagaactaaacaagaaccttctagccaaggatctcagagtgctttacagacatacctcctggtatgaaatttgcagtgtcttgatgtgtgaggtctctctgaaagagctgcagggaaaacagcgggcgataaactacccctttaaacaggctgtggctacatgatgcctggcttactcagtaaatcttctggaaagagactctttctcttgctcactgctcagcgtggaaacaagaaaaggaagccagaggctcctgtagctcctgccctcccctagcctccaccagacaaccccactatcgaatgcacagaggagaggatctgagaggagagtactgtcaggctaagtgggggggaagtaggaactgaaggaggaggacaaagtgggttggaggagatgaaatggaaggattgttggagggaaaatggaataggggtttgagatggagctttgtaagagctgcatttgcctcctggttgcaaaggga

SEQ ID NO: 193661 - DNA, 486 bp, Homo sapiens
  Payload ID: 18239
  Gene Name: transmembrane protein 154
  ENST ID: ENST00000613578
  CDS Start-End: 1-486
ggtaattatgaggaattagaaaactcaggagatacaactgtggaatctgaaagaccaaataaagtgactattccaagcacatttgctgcagtgaccatcaaagaaacattaaatgcaaatataaattctaccaactttgctccggatgaaaatcagttagagtttatactgatggtgttaatcccattgattttattggtcctcttacttttatccgtggtattccttgcaacatactataaaagaaaaagaactaaacaagaaccttctagccaaggatctcagagtgctttacagacatatgaactgggaagtgaaaacgtgaaagtccctatttttgaggaagatacaccctctgttatggaaattgaaatggaagagcttgataaatggatgaacagcatgaatagaaatgccgactttgaatgtttacctaccttgaaggaagagaaggaatcaaatcacaacccaagagattccaggtca

SEQ ID NO: 193662 - DNA, 2313 bp, Homo sapiens
  Payload ID: 18240
  Gene Name: transmembrane protein 155
  Uniprot ID: Q4W5P6
  ENST ID: ENST00000337677
  CDS Start-End: 560-952
gggtgtgcgggcggcgcgctcgccctccagctgcagcccgcgccgagcgcgcagggccagcgagcgccggcgcctccagcatggagtgggaactcaacttgctgctctacctggcgctcttcttcttcctgctcttcttacttttcctcctgctcttcgtggtcatcaagcagctgaagaactccgtggccaacacggccggggcgctccagcccgggcgcctctcggtgcaccgcgagccttggggcttctcccgagagcaagcggtgtgacccgagtgcgggcactggcgggagggcaccgagctgcgcgggcgctgggctgggtctccgcctcgattctccgtcctcgcggcctcccagcttccagagccgagctgctgcccttgactggtgctcaggggaccacagctgcaatgacagtttgggcctgcaaaaagaaggctggaacaacgggagatggaagctttctgcaaatgcagcaccactggtatccatgaatttaacctgcccatcattcttcctaaacaagagactattgaaaagtcagggtgttcaaaatggcttcagatcttatcaggacaatcttggctgttgcactaatttccaaacttggcacagctgtagatgcagaactgatgccatctggtgcgattctacagaataagagagaaaatttacccagagtgtgccatgcactggcttttctgggaatggcaaggtgccaggatttgtttttggttcgcttgcaggggtggaaacttggaactaggttccaagatggtccccgcagcaccccacaagaagaaggaggaagcccacagagaaaacggggcatgccagttcaaatccacttccttttaaagagcttcctcagcagcccaataacttttgccttcatctcattggccagaactgtgtcattggctactgctatctgcaagattgtctgagaaatgtagtttttgtagctggatatataactgcctttgacaaaaatccagtttctcttgatgaagaagaagatgatggtggatcttgggaggacaactaacattttatgccctggctacagaatacagttgcagaggagcataaagttcaaaaagatcaaaactctagttccttcacaactgtcaaagctccaagcagcactgctcccctctgacagagtgagcagagtgaaggcatgtcaggtgttctcacaaaactcttgacagggctgacctctctcagtcaatatccttgtcccacatcaggattttctagagggccctgggtacctgtgcacttccttggtggccgtaacctctttgtggagggttggtgtaggataaagaatgttctattacgctgctccctcatctgtatcatttctctcctctctaattttcctgtcagttatattttggtggagtctgggtttgtgtatttgattcctatagaaagaccatcgctttcatgcatggaggaggggaatctacgcaaagaaaggctaccttactcctttctgtgactccaccaccagtctaggaatatcctgggagaagaattgcctctcaaagctgcttctataagcagcctacatcctagctaagcaaagaagaaacacttcccacatctagggctgtctaaaagaactttctgtgatgacagaaatgttctatatctgcagtgtccaatatggtaaccatataggcacatgtggctagtgaacacttgaaatgtggctagtgtgactgaggaaggaaaatttaaattttgtttaattgtaattaatttaaattcagatagccaaatggggctactagctattgtgttagatagcacggtatactttattctctttcttgtgttgtagaaccagctgggagaggtgtgggtcagtcatgggcttggtatcccctggtcttcactattctagcttgccattgaatttgtctcccagaggaaaagaaagaatggtatttggaattaaattcaagatgttaacttgacatctatatattgcacatattcctgtatagtgaatggatgacctcctgggaatagttcctgtgactgattttagtgataattgatcatgaagaaatggcagtactgctccacttcaccttcctagtgactattatgtgttcctagtcagagtgactcagcagagattattttgttctcttgtgcaatttattctgtgtcattttatttttgtaatattgtggcagctaaatgattattctgtgtatgtttttcaaaatattaggtggcttatattttttaaaaggctatgaaataaaaataaactatacgtaacaca

SEQ ID NO: 193663 - DNA, 1753 bp, Homo sapiens
  Payload ID: 18240
  Gene Name: transmembrane protein 155
  Uniprot ID: Q4W5P6
  ENST ID: ENST00000394394
  CDS Start-End: 431-823
gctgttacctcttctggcgtccgtgcccgcggaagttcgctcctagggaagtcgctcgcgtcctcaagagcacctgagaggatctcggcgaagcggaaggctttggtgccagctgggagagtctgcgccggatttcctcagctccttggcgcgtttcctcggagccgggggaggcaaagcacggaccccggagtcggcgcccatagcgggacgccctcgcgaggggcgggagtgcgggagagccgagctgctgcccttgactggtgctcaggggaccacagctgcaatgacagtttgggcctgcaaaaagaaggctggaacaacgggagatggaagctttctgcaaatgcagcaccactggtatccatgaatttaacctgcccatcattcttcctaaacaagagactattgaaaagtcagggtgttcaaaatggcttcagatcttatcaggacaatcttggctgttgcactaatttccaaacttggcacagctgtagatgcagaactgatgccatctggtgcgattctacagaataagagagaaaatttacccagagtgtgccatgcactggcttttctgggaatggcaaggtgccaggatttgtttttggttcgcttgcaggggtggaaacttggaactaggttccaagatggtccccgcagcaccccacaagaagaaggaggaagcccacagagaaaacggggcatgccagttcaaatccacttccttttaaagagcttcctcagcagcccaataacttttgccttcatctcattggccagaactgtgtcattggctactgctatctgcaagattgtctgagaaatgtagtttttgtagctggatatataactgcctttgacaaaaatccagtttctcttgatgaagaagaagatgatggtggatcttgggaggacaactaacattttatgccctggctacagaatacagttgcagaggagcataaagttcaaaaagatcaaaactctagttccttcacaactgtcaaagctccaagcagcactgctcccctctgacagagtgagcagagtgaaggcatgtcaggtgttctcacaaaactcttgacagggctgacctctctcagtcaatatccttgtcccacatcaggattttctagagggccctgggtacctgtgcacttccttggtggccgtaacctctttgtggagggttggtgtaggataaagaatgttctattacgctgctccctcatctgtatcatttctctcctctctaattttcctgtcagttatattttggtggagtctgggtttgtgtatttgattcctatagaaagaccatcgctttcatgcatggaggaggggaatctacgcaaagaaaggctaccttactcctttctgtgactccaccaccagtctaggaatatcctgggagaagaattgcctctcaaagctgcttctataagcagcctacatcctagctaagcaaagaagaaacacttcccacatctagggctgtctaaaagaactttctgtgatgacagaaatgttctatatctgcagtgtccaatatggtaaccatataggcacatgtggctagtgaacacttgaaatgtggctagtgtgactgaggaaggaaaatttaaattttgtttaattgtaattaatttaaattcagatagccaaatggggctactagctattgtgttagatagcacggtatactttattctctttcttgtgttgtagaaccagctgggagaggtgtggg

SEQ ID NO: 193664 - DNA, 2032 bp, Homo sapiens
  Payload ID: 18240
  Gene Name: transmembrane protein 155
  Uniprot ID: Q4W5P6
  ENST ID: ENST00000394396
  CDS Start-End: 279-671
tttggagggaggaatcccttcctcccggtgatccttactcatattctagccaccaaccacggttagtgcttgcggattgccgtgcaggagccgagctgctgcccttgactggtgctcaggggaccacagctgcaatgacagtttgggcctgcaaaaagaaggctggaacaacgggagatggaagctttctgcaaatgcagcaccactggtatccatgaatttaacctgcccatcattcttcctaaacaagagactattgaaaagtcagggtgttcaaaatggcttcagatcttatcaggacaatcttggctgttgcactaatttccaaacttggcacagctgtagatgcagaactgatgccatctggtgcgattctacagaataagagagaaaatttacccagagtgtgccatgcactggcttttctgggaatggcaaggtgccaggatttgtttttggttcgcttgcaggggtggaaacttggaactaggttccaagatggtccccgcagcaccccacaagaagaaggaggaagcccacagagaaaacggggcatgccagttcaaatccacttccttttaaagagcttcctcagcagcccaataacttttgccttcatctcattggccagaactgtgtcattggctactgctatctgcaagattgtctgagaaatgtagtttttgtagctggatatataactgcctttgacaaaaatccagtttctcttgatgaagaagaagatgatggtggatcttgggaggacaactaacattttatgccctggctacagaatacagttgcagaggagcataaagttcaaaaagatcaaaactctagttccttcacaactgtcaaagctccaagcagcactgctcccctctgacagagtgagcagagtgaaggcatgtcaggtgttctcacaaaactcttgacagggctgacctctctcagtcaatatccttgtcccacatcaggattttctagagggccctgggtacctgtgcacttccttggtggccgtaacctctttgtggagggttggtgtaggataaagaatgttctattacgctgctccctcatctgtatcatttctctcctctctaattttcctgtcagttatattttggtggagtctgggtttgtgtatttgattcctatagaaagaccatcgctttcatgcatggaggaggggaatctacgcaaagaaaggctaccttactcctttctgtgactccaccaccagtctaggaatatcctgggagaagaattgcctctcaaagctgcttctataagcagcctacatcctagctaagcaaagaagaaacacttcccacatctagggctgtctaaaagaactttctgtgatgacagaaatgttctatatctgcagtgtccaatatggtaaccatataggcacatgtggctagtgaacacttgaaatgtggctagtgtgactgaggaaggaaaatttaaattttgtttaattgtaattaatttaaattcagatagccaaatggggctactagctattgtgttagatagcacggtatactttattctctttcttgtgttgtagaaccagctgggagaggtgtgggtcagtcatgggcttggtatcccctggtcttcactattctagcttgccattgaatttgtctcccagaggaaaagaaagaatggtatttggaattaaattcaagatgttaacttgacatctatatattgcacatattcctgtatagtgaatggatgacctcctgggaatagttcctgtgactgattttagtgataattgatcatgaagaaatggcagtactgctccacttcaccttcctagtgactattatgtgttcctagtcagagtgactcagcagagattattttgttctcttgtgcaatttattctgtgtcattttatttttgtaatattgtggcagctaaatgattattctgtgtatgtttttcaaaatattaggtggcttatattttttaaaaggctatgaaataaaaataaactatacgtaacaca

SEQ ID NO: 193665 - DNA, 573 bp, Homo sapiens
  Payload ID: 18240
  Gene Name: transmembrane protein 155
  ENST ID: ENST00000514885
  CDS Start-End: 362-573
agagcacctgagaggatctcggcgaagcggaaggctttggtgccagctgggagagtctgcgccggatttcctcagctccttggcgcgtttcctcggagccgggggaggcaaagcacggaccccggagtcggcgcccatagcgggacgccctcgcgaggggcgggagtgcgggagagccgagctgctgcccttgactggtgctcaggggaccacagctgcaatgacagtttgggcctgcaaaaagaaggctggaacaacgggagatggaagctttctgcaaatgcaccactggtatccatgaatttaacctgcccatcattcttcctaaacaagagactattgaaaagtcagggtgttcaaaatggcttcagatcttatcaggacaatcttggctgttgcactaatttccaaacttggcacagctgtagatgcagaactgatgccatctggtgcgattctacagaataagagagaaaatttacccagagtgtgccatgcactggcttttctgggaatggcaaggtgccaggatttgtttttggttcgcttgcaggggtggaaacttggaactag

SEQ ID NO: 193666 - DNA, 949 bp, Homo sapiens
  Payload ID: 18241
  Gene Name: transmembrane protein 156
  ENST ID: ENST00000344606
  CDS Start-End: 412-949
tctcactctgtcacccaggctggagtgcagtggcctgtcatggctcactgcagtctcaaatttctgggttcaagtgatcctcagcttcctgagtagctgggactacaggagtgcaccaccacacctagctatattaaaattatttttgtagagaggagggcttgctctattgaccagtctggactcaaactcctgaactcaagtgatccttctgccttggcctcccaaagtgctgggattacagatgtgagccacttcgcccagcccaccgttttattttttcttactcaaaaggaagtgagtatgaggtgaactgcattaacctaaagtgctgcagagataaacttaaagcaggaagcaacataccatgaatgtactgcaagggaacacatttgtgtcatgtgaagagacatgacaaaaacagccctccttaaattatttgtggcaatagtgatcacattcattttaattttgccggaatatttcaagacaccgaaagaaagaacattggagctatcatgtctggaagtgtgtttgcaatctaattttacctattcactctcctccttaaatttttcttttgtgacttttctgcaaccagtaagggaaactcagattatcatgagaatctttctaaatccctccaattttcgtaacttcaccaggacttgccaagacatcacagttcttatcaggagaggatcaatggaagtgaaagcaaatgattttcattcaccttgtcagcactttaacttcagtgtagctcctctggttgaccacttggaggaatataacactacctgtcatctaaaaaaccacactggaagatcaacaatcatggaggatgagccaagcaaggagaaatcgataaactacacttgtagaatcatggaatacccgaatgattgtatacacatttctttgcacctagagatggatataaaaagta

SEQ ID NO: 193667 - DNA, 1935 bp, Homo sapiens
  Payload ID: 18241
  Gene Name: transmembrane protein 156
  Uniprot ID: Q8N614
  ENST ID: ENST00000381938
  CDS Start-End: 109-999
atgaggtgaactgcattaacctaaagtgctgcagagataaacttaaagcaggaagcaacataccatgaatgtactgcaagggaacacatttgtgtcatgtgaagagacatgacaaaaacagccctccttaaattatttgtggcaatagtgatcacattcattttaattttgccggaatatttcaagacaccgaaagaaagaacattggagctatcatgtctggaagtgtgtttgcaatctaattttacctattcactctcctccttaaatttttcttttgtgacttttctgcaaccagtaagggaaactcagattatcatgagaatctttctaaatccctccaattttcgtaacttcaccaggacttgccaagacatcacaggtgaatttaaaatgtgctcctcgtgtttggtttgtgagtctaaaggaaacatggattttatttctcaggaacaaacatcaaaagttcttatcaggagaggatcaatggaagtgaaagcaaatgattttcattcaccttgtcagcactttaacttcagtgtagctcctctggttgaccacttggaggaatataacactacctgtcatctaaaaaaccacactggaagatcaacaatcatggaggatgagccaagcaaggagaaatcgataaactacacttgtagaatcatggaatacccgaatgattgtatacacatttctttgcacctagagatggatataaaaaatatcacttgttccatgaagatcacttggtatattttagttctattagtttttatatttttgatcatcctcactatccgcaaaatacttgaaggccagagaagagtgcaaaagtggcagagtcatagagacaaacctacatctgttctcttaagaggaagtgattcggagaaactgagagcattgaatgtgcaggttctttcagcagagaccacgcagaggctgcctttggatcaagtccaggaagtgcttcccccaattccagaactataagttacttccacagtgcatcagtgagatcaatatacacgaatatccccgggcaagttggaccgagccctttgaagaatactcagaagtttattttgtgaatgagtagactggaaaatgtttgtgtccagctgaggatgcacagttggaaagcaggaggaatgctgactggttgatgaaaactagcttaagagcattcattcgctccatgagatcaagggaacaagagtgtttgcaagaagccattatgagtcatggaaaaaaagatgatgaaacccatggaaacagcaagagaattcccactctctctcttcttaaaaaaaatctatcattatacagcacagagtggagccaagtttttaattttgaggaaccaaaaacaggatcaaatatgaaaaccctttcttttattgggccacattgtagatgctgatttgataattgtttcctatgcagatagattatttttatttcacagattatttaaaagggaagagggcctggttgtttatttatatgtttgtttgcatttatgaatcttgctgccttttagcaccaggatgtttttaaaaaaattcaaagaggccaggcgcagtggctcatgcctgtaatcccagcactttgggattctgaggtgggaggatcatgaggtcaagggatcgagaccatcctggccaacatggtgaaaccctgtctctactaaaaacacaaaaattagctgggtgtggtggtgcgcgcctgtagtcccagctcctcaggaggctgaggcaggagaatcacttgaacctggcaggcagagtttgcagtgaaccaagatcacgccactgcattacagcctggtgcagagcaagactctgtctcaaaaaaaaaaaaaaaaaaaaatcaaagataccaataaaacgaatttaaataaaatacttaagtactttaatagcaaaa

SEQ ID NO: 193668 - DNA, 1813 bp, Homo sapiens
  Payload ID: 18242
  Gene Name: transmembrane protein 158 (gene/pseudogene)
  Uniprot ID: Q8WZ71
  ENST ID: ENST00000503771
  CDS Start-End: 252-1154
cggcagcccaagggccccggcgccgggggcggcggggaaccccaaacgcaaccgggtctggagggatccccgcgccgagccagccgccgtcaccgcctccgcgccgcccctgcgggcttggcaggcgcccggcgcgcccgcactgcgcccggccgccggctcccgcggtcccaccgtgagctcgccggcccgtcgcccgctcgccatgcaaccgccgccggcctcgcgcgcgtaggcgcccgccgcaggccatgctgcccctgctcgccgcgctcctggccgccgcctgcccgctgccgcccgtccgcggcggggccgcggacgcgcccggcctcctcggggtgccctccaatgcttcagtcaacgcgtcctccgcggacgagcccatcgccccgcggctgctggcctcggcggcccccgggccccccgagcgcccgggcccggaggaggcggcggcggcggcggcgccgtgcaacatcagcgtgcagcggcagatgctgagctcgctgctcgtgcgctggggccgcccgcggggcttccagtgcgacctactgctcttctccaccaacgcgcacggccgcgctttcttcgccgccgccttccaccgcgtcgggccgccgctgctcatcgagcacctggggctggcggcgggcggcgcgcagcaggacctgcgcctctgcgtgggctgcggctgggtgcgcggtcgccgcaccggccgcctccggcccgccgccgcccccagcgccgccgccgccaccgccggggcgcccaccgcgctgccagcctaccccgcggccgagccgcccgggccgctgtggctgcagggcgagccgctgcatttctgctgcctagacttcagcctggaggagctgcagggcgagccgggctggcggctgaaccgtaagcccattgagtccacgctggtggcctgcttcatgaccctggtcatcgtggtgtggagcgtggccgccctcatctggccggtgcccatcatcgccggcttcctgcccaacggcatggaacagcgccggaccaccgccagcaccaccgcagccacccccgccgcagtgcccgcagggaccaccgcagccgccgccgccgccgccgctgccgccgccgccgcggccgtcacttcgggggtggcgaccaagtgacccgctccgctcctccctgtgtccgtcctgtgtccgcgcgcgcgggtgcctttcccgccggagactcggccggtgtgcttcgtgctgtagttatcgttagttcctcttcccgagatggggccgccgagagaccccagcgcctttgaaaagcaaggtttgtgctgcgcttccagttccgaaaagcagatgtttaagcccttggactgagggtgggatcgcagctccgaagacggagaggagggaaatggggccctttcccctctattgcatccccctgcccgactccttccccgcacccacgtgccctagattcatggcagaaaatgaccaaatcctgtgtatttgttttatatatttaataactgttttaaatgaaagttttagtaaaaaaaatacaaaacaaaaagattaaattgctattgctgtagtaagagaagctctttgtatctgaacatagttgtatttgaaatttgtggttttttaatttatttaaaattggggggagggcatgggaaggatttaacaccgatatattgttaccgctgaaaatgaactttatgaaccttttccaagttgatctatccagtgacgtggcctggtgggcgtttcttcttgtacttatgtggttttttggcttttaatacagacattttcctcca

SEQ ID NO: 193669 - DNA, 2014 bp, Homo sapiens
  Payload ID: 18243
  Gene Name: transmembrane protein 159
  Uniprot ID: Q96B96
  ENST ID: ENST00000233047
  CDS Start-End: 469-954
tgtcttgaaggtggtctgagctttctcactccaagccagtcgtgtgggaagggacactctctgagcctcagtttcctcagctgtcaacctctcagggcttgttctagtggctccgaaagccagtgggagcgagcgcgctttgcaaagccttgggcgccgggccttggcgcgcctttgccggatccttccggccacgggcggggcgagcccagaggagaagagccgaggggcggtgcccgggccagggggcggaggcaggcggctctggctccctctcgggacgctctttccttcttcctcttgttcctcctcctgcctctcttcgcttcgcctgcaaacgcggtgggggctgctcggcggtcaggagcagcaagagacagagcgacatgagagattggaccgcgggctgcactggagaatttactggtaggataattcatccctaaagagattgaagtgagcttcagaatggcaaaagaggagccccagagtatctcaagggacttgcaggaactgcagaagaagctgtctctgctgatagactccttccagaataactcaaaggtggtggcctttatgaagtctccagtgggtcagtacttggacagccatccgtttctggccttcaccttgctggtgttcattgtcatgtcggccgttcctgttggattcttcctgctcatcgtggtgcttaccaccctggctgctctgctgggggtcataatattggaaggattggtcatctctgtgggtggcttctcactgctctgcatcctctgtggtttgggcttcgtatcactcgccatgtcggggatgatgatagcatcttatgtagtggtctccagcctcatcagctgctggttttctcccaggccactgacacagcaaaacaccagttgtgactttctgccagccatgaagtctgcagaattcgaggggctttaccaggaatgagtgactgctcagaggccgggcttcttttcaagtactgctggatcatactcaccccttgggattatggcttagaagaagggggctgggtaggcaagcactccttggctgtgtcctctcgctttttcacttacttgtaggatcccgcagcagccaatttagggattgtgttgttcttgtgttggttcccatgtaaagaagcagcagagaaatgcgatggttcaacagctcgccctgccccaagtatgcagacttgaccttggcggggtcctgggcttctagagtctagcccgttgaccccaaagcctcagggcttatgtccaacggtcccattgggagcaacagtgattgtttatagttttttgttttcagaaatgagggcagctgttaattttttcactcatgtgaaacaaaatgaaaaaaaaaatccaaaacagaacaagcccttctgtggtatttgctttttatcagaaagaacagcaacatttggcctctccaagttggaaaatagagtccaaatgtaactttgtggccaagagtattttcaaaaaagtctaaaggtgtagtttccactgtaactgttgagtactgttaagtactgttaatcttttacatatttgcacttggtactgttgtattgttctaaagagcttgtcctttaagtaatttctttcttttttttttttttttttttttgtgacggagtttccctcttgttgcccaggctggagtgcaatggtgcagtctcggctcactgcaacctccaactcccaggttcaagtgagtctcgtgcctcagcctcccaagtagctgggattacaggcacccgccaccgtgcccggctagtttttttttgtattttttttagtacagatggggtttcaccatgttggtcaggctagtctcaaactcctgacctcaggtgctccacctgccttggcctcccaaagtgctgggattacaggcgtgagccactgtgcccagcctaagccatttcttaaaataaaaatgctaaaggactagtaagtaaaaataaaacttcctatgggatttcccagtggaa

SEQ ID NO: 193670 - DNA, 1812 bp, Homo sapiens
  Payload ID: 18243
  Gene Name: transmembrane protein 159
  Uniprot ID: Q96B96
  ENST ID: ENST00000261388
  CDS Start-End: 274-759
gttcctcctcctgcctctcttcgcttcgcctgcaaacgcggtgggggctgctcggcggtcaggagcaggttaccctccgtctgcatgcccaccatcaaggtatgaggatggtagaagctctcgtcgaaccagatggatgaagaccactaacggcttttgtttcctctggtaacagcaagagacagagcgacatgagagattggaccgcgggctgcactggagaatttactggtaggataattcatccctaaagagattgaagtgagcttcagaatggcaaaagaggagccccagagtatctcaagggacttgcaggaactgcagaagaagctgtctctgctgatagactccttccagaataactcaaaggtggtggcctttatgaagtctccagtgggtcagtacttggacagccatccgtttctggccttcaccttgctggtgttcattgtcatgtcggccgttcctgttggattcttcctgctcatcgtggtgcttaccaccctggctgctctgctgggggtcataatattggaaggattggtcatctctgtgggtggcttctcactgctctgcatcctctgtggtttgggcttcgtatcactcgccatgtcggggatgatgatagcatcttatgtagtggtctccagcctcatcagctgctggttttctcccaggccactgacacagcaaaacaccagttgtgactttctgccagccatgaagtctgcagaattcgaggggctttaccaggaatgagtgactgctcagaggccgggcttcttttcaagtactgctggatcatactcaccccttgggattatggcttagaagaagggggctgggtaggcaagcactccttggctgtgtcctctcgctttttcacttacttgtaggatcccgcagcagccaatttagggattgtgttgttcttgtgttggttcccatgtaaagaagcagcagagaaatgcgatggttcaacagctcgccctgccccaagtatgcagacttgaccttggcggggtcctgggcttctagagtctagcccgttgaccccaaagcctcagggcttatgtccaacggtcccattgggagcaacagtgattgtttatagttttttgttttcagaaatgagggcagctgttaattttttcactcatgtgaaacaaaatgaaaaaaaaaatccaaaacagaacaagcccttctgtggtatttgctttttatcagaaagaacagcaacatttggcctctccaagttggaaaatagagtccaaatgtaactttgtggccaagagtattttcaaaaaagtctaaaggtgtagtttccactgtaactgttgagtactgttaagtactgttaatcttttacatatttgcacttggtactgttgtattgttctaaagagcttgtcctttaagtaatttctttcttttttttttttttttttttttgtgacggagtttccctcttgttgcccaggctggagtgcaatggtgcagtctcggctcactgcaacctccaactcccaggttcaagtgagtctcgtgcctcagcctcccaagtagctgggattacaggcacccgccaccgtgcccggctagtttttttttgtattttttttagtacagatggggtttcaccatgttggtcaggctagtctcaaactcctgacctcaggtgctccacctgccttggcctcccaaagtgctgggattacaggcgtgagccactgtgcccagcctaagccatttcttaaaataaaaatgctaaaggactagtaagtaaaaataaaacttcctatgggatttccc

SEQ ID NO: 193671 - DNA, 1378 bp, Homo sapiens
  Payload ID: 18243
  Gene Name: transmembrane protein 159
  Uniprot ID: Q96B96
  ENST ID: ENST00000451578
  CDS Start-End: 157-714
ctgcctctcttcgcttcgcctgcaaacgcggtgggggctgctcggcggtcaggagcagcaagagacagagcgacatgagagattggaccgcgggctgcactggagaatttactggtaggataattcatccctaaagagattgaagtgagcttcagaatggcaaaagaggagccccagagtatctcaagggacttgcaggaactgcagaagaagctgtctctgctgatagactccttccagaataactcaaagctgccccaacacagcaggatctcactggactctgatgatggagtgtccaggctgggcagtgctggctccaaggtggtggcctttatgaagtctccagtgggtcagtacttggacagccatccgtttctggccttcaccttgctggtgttcattgtcatgtcggccgttcctgttggattcttcctgctcatcgtggtgcttaccaccctggctgctctgctgggggtcataatattggaaggattggtcatctctgtgggtggcttctcactgctctgcatcctctgtggtttgggcttcgtatcactcgccatgtcggggatgatgatagcatcttatgtagtggtctccagcctcatcagctgctggttttctcccaggccactgacacagcaaaacaccagttgtgactttctgccagccatgaagtctgcagaattcgaggggctttaccaggaatgagtgactgctcagaggccgggcttcttttcaagtactgctggatcatactcaccccttgggattatggcttagaagaagggggctgggtaggcaagcactccttggctgtgtcctctcgctttttcacttacttgtaggatcccgcagcagccaatttagggattgtgttgttcttgtgttggttcccatgtaaagaagcagcagagaaatgcgatggttcaacagctcgccctgccccaagtatgcagacttgaccttggcggggtcctgggcttctagagtctagcccgttgaccccaaagcctcagggcttatgtccaacggtcccattgggagcaacagtgattgtttatagttttttgttttcagaaatgagggcagctgttaattttttcactcatgtgaaacaaaatgaaaaaaaaaatccaaaacagaacaagcccttctgtggtatttgctttttatcagaaagaacagcaacatttggcctctccaagttggaaaatagagtccaaatgtaactttgtggccaagagtattttcaaaaaagtctaaaggtgtagtttccactgtaactgttgagtactgttaagtactgttaatcttttacatatttgcacttggtactgttgtattgttctaaagagcttgtcctttaagtaat

SEQ ID NO: 193672 - DNA, 584 bp, Homo sapiens
  Payload ID: 18243
  Gene Name: transmembrane protein 159
  ENST ID: ENST00000572258
  CDS Start-End: 185-457
tctttccttcttcctcttgttcctcctcctgcctctcttcgcttcgcctgcaaacgcggtgggggctgctcggcggtcaggagcagcaagagacagagcgacatgagagattggaccgcgggctgcactggagaatttactggtaggataattcatccctaaagagattgaagtgagcttcagaatggcaaaagaggagccccagagtatctcaagggacttgcaggaactgcagaagaagctgtctctgctgatagactccttccagaataactcaaaggtggtggcctttatgaagtctccagtgggtcagtacttggacagccatccgtttctggccttcaccttgctggtgttcattgtcatgtcggccgttcctgttggattcttcctgctcatcgtggtgcttaccaccctggctgctctgctgggggtcataatattggaaggccactgacacagcaaaacaccagttgtgactttctgccagccatgaagtctgcagaattcgaggggctttaccaggaatgagtgactgctcagaggccgggcttcttttcaagtactgctggatcatactcacc

SEQ ID NO: 193673 - DNA, 1495 bp, Homo sapiens
  Payload ID: 18243
  Gene Name: transmembrane protein 159
  ENST ID: ENST00000573688
  CDS Start-End: 1-295
cttggacagccatccgtttctggccttcaccttgctggtgttcattgtcatgtcggccgttcctgttggattcttcctgctcatcgtggtgcttaccaccctggctgctctgctgggggtcataatattggaaggattggtcatctctgtgggtggcttctcactgctctgcatcctctgtggtttgggcttcgtatcactcgccatgtcggggatgatgatagcatcttatgtagtggtctccagcctcatcagctgctggttttctcccagatctctttcatatctgccttaacagttgtcagccggcttctcgtttgtgtggctgcattcattctgttgtgctatgttgtcctgtttggagtatttgaagaagacctagcatcactaacatgcggttgggagagggaggcaaagcttttttaaacgattgtggatattctatgatagtccaccaaaactccgccactgacacagcaaaacaccagttgtgactttctgccagccatgaagtctgcagaattcgaggggctttaccaggaatgagtgactgctcagaggccgggcttcttttcaagtactgctggatcatactcaccccttgggattatggcttagaagaagggggctgggtaggcaagcactccttggctgtgtcctctcgctttttcacttacttgtaggatcccgcagcagccaatttagggattgtgttgttcttgtgttggttcccatgtaaagaagcagcagagaaatgcgatggttcaacagctcgccctgccccaagtatgcagacttgaccttggcggggtcctgggcttctagagtctagcccgttgaccccaaagcctcagggcttatgtccaacggtcccattgggagcaacagtgattgtttatagttttttgttttcagaaatgagggcagctgttaattttttcactcatgtgaaacaaaatgaaaaaaaaaatccaaaacagaacaagcccttctgtggtatttgctttttatcagaaagaacagcaacatttggcctctccaagttggaaaatagagtccaaatgtaactttgtggccaagagtattttcaaaaaagtctaaaggtgtagtttccactgtaactgttgagtactgttaagtactgttaatcttttacatatttgcacttggtactgttgtattgttctaaagagcttgtcctttaagtaatttctttcttttttttttttttttttttttgtgacggagtttccctcttgttgcccaggctggagtgcaatggtgcagtctcggctcactgcaacctccaactcccaggttcaagtgagtctcgtgcctcagcctcccaagtagctgggattacaggcacccgccaccgtgcccggctagtttttttttgtattttttttagtacagatggggtttcaccatgttggtcaggctagtctcaaactcctgacctcaggtgctccacctgccttggcctcccaaagtg

SEQ ID NO: 193674 - DNA, 713 bp, Homo sapiens
  Payload ID: 18243
  Gene Name: transmembrane protein 159
  Uniprot ID: Q96B96
  ENST ID: ENST00000572599
  CDS Start-End: 172-657
cgcctgcaaacgcggtgggggctgctcggcggtcaggagcaggttaccctccgtctgcatgcccaccatcaagcaagagacagagcgacatgagagattggaccgcgggctgcactggagaatttactggtaggataattcatccctaaagagattgaagtgagcttcagaatggcaaaagaggagccccagagtatctcaagggacttgcaggaactgcagaagaagctgtctctgctgatagactccttccagaataactcaaaggtggtggcctttatgaagtctccagtgggtcagtacttggacagccatccgtttctggccttcaccttgctggtgttcattgtcatgtcggccgttcctgttggattcttcctgctcatcgtggtgcttaccaccctggctgctctgctgggggtcataatattggaaggattggtcatctctgtgggtggcttctcactgctctgcatcctctgtggtttgggcttcgtatcactcgccatgtcggggatgatgatagcatcttatgtagtggtctccagcctcatcagctgctggttttctcccaggccactgacacagcaaaacaccagttgtgactttctgccagccatgaagtctgcagaattcgaggggctttaccaggaatgagtgactgctcagaggccgggcttcttttcaagtactgctggatcatactcacccct

SEQ ID NO: 193675 - DNA, 305 bp, Homo sapiens
  Payload ID: 18243
  Gene Name: transmembrane protein 159
  ENST ID: ENST00000577162
  CDS Start-End: 167-305
gcaaacgcggtgggggctgctcggcggtcaggagcaggttaccctccgtctgcatgcccaccatcaagcaagagacagagcgacatgagagattggaccgcgggctgcactggagaatttactggtaggataattcatccctaaagagattgaagtgagcttcagaatggcaaaagaggagccccagagtatctcaagggacttgcaggaactgcagaagaagctgtctctgctgatagactccttccagaataactcaaagctgccccaacacagcaggatctcactggactctgatgatggag

SEQ ID NO: 193676 - DNA, 1593 bp, Homo sapiens
  Payload ID: 18243
  Gene Name: transmembrane protein 159
  ENST ID: ENST00000573487
  CDS Start-End: 469-960
tgtcttgaaggtggtctgagctttctcactccaagccagtcgtgtgggaagggacactctctgagcctcagtttcctcagctgtcaacctctcagggcttgttctagtggctccgaaagccagtgggagcgagcgcgctttgcaaagccttgggcgccgggccttggcgcgcctttgccggatccttccggccacgggcggggcgagcccagaggagaagagccgaggggcggtgcccgggccagggggcggaggcaggcggctctggctccctctcgggacgctctttccttcttcctcttgttcctcctcctgcctctcttcgcttcgcctgcaaacgcggtgggggctgctcggcggtcaggagcagcaagagacagagcgacatgagagattggaccgcgggctgcactggagaatttactggtaggataattcatccctaaagagattgaagtgagcttcagaatggcaaaagaggagccccagagtatctcaagggacttgcaggaactgcagaagaagctgtctctgctgatagactccttccagaataactcaaagctgccccaacacagcaggatctcactggactctgatgatggagtgtccaggctgggcagtgctggctccaaggtggtggcctttatgaagtctccagtgggtcagtacttggacagccatccgtttctggccttcaccttgctggtgttcattgtcatgtcggccgttcctgttggattcttcctgctcatcgtggtgcttaccaccctggctgctctgctgggggtcataatattggaaggattggtcatctctgtgggtggcttctcactgctctgcatcctctgtggtttgggcttcgtatcactcgccatgtcggggatgatgatagcatcttatgtagtggtctccagcctcatcagctgctggttttctcccaggtctcacgagatctgatggttttataaagggcatttcccctgcacatgctctcttgcctgccgccatgtaagaagtgcctctgatcttcctttgccttccaccatgattgtgaggcctccccagccatgtggaattgccactgacacagcaaaacaccagttgtgactttctgccagccatgaagtctgcagaattcgaggggctttaccaggaatgagtgactgctcagaggccgggcttcttttcaagtactgctggatcatactcaccccttgggattatggcttagaagaagggggctgggtaggcaagcactccttggctgtgtcctctcgctttttcacttacttgtaggatcccgcagcagccaatttagggattgtgttgttcttgtgttggttcccatgtaaagaagcagcagagaaatgcgatggttcaacagctcgccctgccccaagtatgcagacttgaccttggcggggtcctgggcttctagagtctagcccgttgaccccaaagcctcagggcttatgtccaacggtcccattgggagcaacagtgattgtttatagttttttgttttcagaaatgagggcagctgttaattttttcactcatgtgaaacaaaatgaaaaaaaaaatccaaaa

SEQ ID NO: 193677 - DNA, 663 bp, Homo sapiens
  Payload ID: 18244
  Gene Name: transmembrane protein 160
  Uniprot ID: Q9NX00
  ENST ID: ENST00000253047
  CDS Start-End: 17-583
ggccgtagtgcgaatcatgggaggcggctggtggtgggctcgggccgctcgccttgcccgtcttcgcttccggaggtcgctactgccgcctcagcggccccggagcgggggcgcccgggggtccttcgcccccggccacggtccccgcgccggggcttcgccgcccccagtgtccgagctggatcgtgcggacgcctggctcctccgaaaagcgcacgagacagccttcctctcctggttccgcaatggcctcctggcatcgggcatcggggtcatctccttcatgcagagtgacatgggtcgggaagcagcatatggcttcttcctgctgggcggcctgtgcgtggtgtggggcagcgcctcgtacgccgtgggcctggcggcgctgcgaggacccatgcagctgacgctggggggcgcggccgtgggcgcgggcgccgtgctggccgccagcctgctctgggcgtgcgccgtgggcctctacatggggcagctggagctggacgtggagctggtgcccgaggacgacgggacggcctccgcggaaggccctgatgaggcgggtcggccgccacccgagtgagcgacacggccgtggggcctggcaggcgctggacagcgcccgaggactgggacattaaacctgacctcccctcctccaga

SEQ ID NO: 193678 - DNA, 1820 bp, Homo sapiens
  Payload ID: 18245
  Gene Name: transmembrane protein 161A
  Uniprot ID: Q9NX61
  ENST ID: ENST00000162044
  CDS Start-End: 66-1505
gagtttccgcagagtgcccggagccctaggccggtgggtgagtgcaccgcgttctcgcacgcgtcatggcggtcctcggagtacagctggtggtgaccctgctcactgccaccctcatgcacaggctggcgccacactgctccttcgcgcgctggctgctctgtaacggcagtttgttccgatacaagcacccgtctgaggaggagcttcgggccctggcggggaagccgaggcccagaggcaggaaagagcggtgggccaatggccttagtgaggagaagccactgtctgtgccccgagatgccccgttccagctggagacctgccccctcacgaccgtggatgccctggtcctgcgcttcttcctggagtaccagtggtttgtggactttgctgtgtactcgggcggcgtgtacctcttcacagaggcctactactacatgctgggaccagccaaggagactaacattgctgtgttctggtgcctgctcacggtgaccttctccatcaagatgttcctgacagtgacacggctgtacttcagcgccgaggaggggggtgagcgctctgtctgcctcacctttgccttcctcttcctgctgctggccatgctggtgcaagtggtgcgggaggagaccctcgagctgggcctggagcctggtctggccagcatgacccagaacttagagccacttctgaagaagcagggctgggactgggcgcttcctgtggccaagctggctatccgcgtgggactggcagtggtgggctctgtgctgggtgccttcctcaccttcccaggcctgcggctggcccagacccaccgggacgcactgaccatgtcggaggacagacccatgctgcagttcctcctgcacaccagcttcctgtctcccctgttcatcctgtggctctggacaaagcccattgcacgggacttcctgcaccagccgccgtttggggagacgcgtttctccctgctgtccgattctgccttcgactctgggcgcctctggttgctggtggtgctgtgcctgctgcggctggcggtgacccggccccacctgcaggcctacctgtgcctggccaaggcccgggtggagcagctgcgaagggaggctggccgcatcgaagcccgtgaaatccagcagagggtggtccgagtctactgctatgtgaccgtggtgagcttgcagtacctgacgccgctcatcctcaccctcaactgcacacttctgctcaagacgctgggaggctattcctggggcctgggcccagctcctctactatcccccgacccatcctcagccagcgctgcccccatcggctctggggaggacgaagtccagcagactgcagcgcggattgccggggctctgggtggcctgcttactcccctcttcctccgtggcgtcctggcctacctcatctggtggacggctgcctgccagctgctcgccagccttttcggcctctacttccaccagcacttggcaggctcctagctgcctgcagaccctcctggggccctgaggtctgttcctggggcagcgggacactagcctgccccctctgtttgcgcccccgtgtccccagctgcaaggtggggccggactccccggcgttcccttcaccacagtgcctgacccgcggccccccttggacgccgagtttctgcctcagaactgtctctcctgggcccagcagcatgagggtcccgaggccattgtctccgaagcgtatgtgccaggtttgagtggcaagggtgatgctggctgctcttctgaacaaataaaggagcatgccgatttttacaaaca

SEQ ID NO: 193679 - DNA, 1930 bp, Homo sapiens
  Payload ID: 18245
  Gene Name: transmembrane protein 161A
  Uniprot ID: Q9NX61
  ENST ID: ENST00000450333
  CDS Start-End: 39-1169
aggccggtgggtgagtgcaccgcgttctcgcacgcgtcatggcggtcctcggagtacagctggtggtgaccctgctcactgccaccctcatgcacaggctggcgccacactgctccttcgcgcgctggctgctctgtaacggcagtttgttccgatacaagcacccgtctgaggaggagcttcgggccctggcggggaagccgaggcccagaggcaggaaagagcggtgggccaatggccttagtgaggagaagccactgtctgtgccccgagatgccccgttccagctggagacctgccccctcacgaccgtggatgccctgggtctggccagcatgacccagaacttagagccacttctgaagaagcagggctgggactgggcgcttcctgtggccaagctggctatccgcgtgggactggcagtggtgggctctgtgctgggtgccttcctcaccttcccaggcctgcggctggcccagacccaccgggacgcactgaccatgtcggaggacagacccatgctgcagttcctcctgcacaccagcttcctgtctcccctgttcatcctgtggctctggacaaagcccattgcacgggacttcctgcaccagccgccgtttggggagacgcgtttctccctgctgtccgattctgccttcgactctgggcgcctctggttgctggtggtgctgtgcctgctgcggctggcggtgacccggccccacctgcaggcctacctgtgcctggccaaggcccgggtggagcagctgcgaagggaggctggccgcatcgaagcccgtgaaatccagcagagggtggtccgagtctactgctatgtgaccgtggtgagcttgcagtacctgacgccgctcatcctcaccctcaactgcacacttctgctcaagacgctgggaggctattcctggggcctgggcccagctcctctactatcccccgacccatcctcagccagcgctgcccccatcggctctggggaggacgaagtccagcagactgcagcgcggattgccggggctctgggtggcctgcttactcccctcttcctccgtggcgtcctggcctacctcatctggtggacggctgcctgccagctgctcgccagccttttcggcctctacttccaccagcacttggcaggctcctagctgcctgcagaccctcctggggccctgaggtctgttcctggggcagcgggacactagcctgccccctctgtttgcgcccccgtgtccccagctgcaaggtggggccggactccccggcgttcccttcaccacagtgcctgacccgcggccccccttggacgccgagtttctgcctcagaactgtctctcctgggcccagcagcatgagggtcccgaggccattgtctccgaagcgtatgtgccaggtttgagtggcaagggtgatgctggctgctcttctgaacaaataaaggagcatgccgatttttacaaacagggtctgagtggtttgggactcgggcttgtgcagggtggtagctgtcttgcacgtccctgtggcacctgcccgggtgcagggtgggggctgcgcgggagggagagaggagcaggactgagaggggagcaaaggtctgggaggagaaaggagagcaagaaggaggccaggctcggcggctcacgcccgtaatcccaaatcccagcactttgggaagccaaggcgggcagatcacttgaggccagcagtttgagaccagcctggtcaacgcatggtgaaacccagtctttactaaaataacaaaaattaggcatggtggcgcatgcatgtagttccagctactgagaaggatgagccagaagagtcgcttgaacctgagaggtggaggctgcagtgagccgagatcgcatcacactccagcctgggtgacagagtgaaactctgtctc

SEQ ID NO: 193680 - DNA, 789 bp, Homo sapiens
  Payload ID: 18245
  Gene Name: transmembrane protein 161A
  ENST ID: ENST00000590216
  CDS Start-End: 26-148
agtgcaccgcgttctcgcacgcgtcatggcggtcctcggagtacagctggtggtgaccctgctcactgccaccctcatgcacaggctggcgccacactgctccttcgcgcgctggctgctctgtaacggcaggctaccctctaactagaatccctggatttggggttcactgcctcaacctcccaaccccacgcctgagcttccctgactgcccgtccttgctctcagtttgttccgatacaagcacccgtctgaggaggagcttcgggccctggcggggaagccgaggcccagaggcaggaaagagcggtgggccaatggccttagtgaggagaagccactgtctgtgccccgagatgccccgttccagctggagacctgccccctcacgaccgtggatgccctggtcctgcgcttcttcctggagtaccagtggtttgtggactttgctgtgtactcgggcggcgtgtacctcttcacagaggcctactactacatgctgggaccagccaaggagactaacattgctgtgttctggtgcctgctcacggtgaccttctccatcaagatgttcctgacagtgacacggctgtacttcagcgccgaggaggggggtgagcgctctgtctgcctcacctttgccttcctcttcctgctgctggccatgctggtgcaagtggtgcgggaggagaccctcgagctgggcctggagcctggtctggccagcatgacccagaacttagagccacttctgaagaagcagggctgggactgggcgcttcctgtggc

SEQ ID NO: 193681 - DNA, 582 bp, Homo sapiens
  Payload ID: 18245
  Gene Name: transmembrane protein 161A
  ENST ID: ENST00000587925
  CDS Start-End: 1-582
gagactaacattgctgtgttctggtgcctgctcacggtgaccttctccatcaagatgttcctgacagtgacacggctgtacttcagcgccgaggaggggggtgagcgctctgtctgcctcacctttgccttcctcttcctgctgctggccatgctggtgcaagtggtgcgggaggagaccctcgagctgggcctggagcctggtctggccagcatgacccagaacttagagccacttctgaagaagcagggctgggactgggcgcttcctgtggccaagctggctatccgcgtgggactggcagtggtgggctctgtgctgggtgccttcctcaccttcccaggcctgcggctggcccagacccaccgggacgcactgaccatgtcggaggacagacccatgctgcagctgtccgattctgccttcgactctgggcgcctctggttgctggtggtgctgtgcctgctgcggctggcggtgacccggccccacctgcaggcctacctgtgcctggccaaggcccgggtggagcagctgcgaagggaggctggccgcatcgaagcccgtgaaatccagcagagg

SEQ ID NO: 193682 - DNA, 1654 bp, Homo sapiens
  Payload ID: 18245
  Gene Name: transmembrane protein 161A
  ENST ID: ENST00000587583
  CDS Start-End: 20-1384
ccgcgttctcgcacgcgtcatggcggtcctcggagtacagctggtggtgaccctgctcactgccaccctcatgcacaggctggcgccacactgctccttcgcgcgctggctgctctgtaacggcagtttgttccgatacaagcacccgtctgaggaggagcttcgggccctggcggggaagccgaggcccagaggcaggaaagagcggtgggccaatggccttagtgaggagaagccactgtctgtgccccgagatgccccgttccagctggagacctgccccctcacgaccgtggatgccctggaggcctactactacatgctgggaccagccaaggagactaacattgctgtgttctggtgcctgctcacggtgaccttctccatcaagatgttcctgacagtgacacggctgtacttcagcgccgaggaggggggtgagcgctctgtctgcctcacctttgccttcctcttcctgctgctggccatgctggtgcaagtggtgcgggaggagaccctcgagctgggcctggagcctggtctggccagcatgacccagaacttagagccacttctgaagaagcagggctgggactgggcgcttcctgtggccaagctggctatccgcgtgggactggcagtggtgggctctgtgctgggtgccttcctcaccttcccaggcctgcggctggcccagacccaccgggacgcactgaccatgtcggaggacagacccatgctgcagttcctcctgcacaccagcttcctgtctcccctgttcatcctgtggctctggacaaagcccattgcacgggacttcctgcaccagccgccgtttggggagacgcgtttctccctgctgtccgattctgccttcgactctgggcgcctctggttgctggtggtgctgtgcctgctgcggctggcggtgacccggccccacctgcaggcctacctgtgcctggccaaggcccgggtggagcagctgcgaagggaggctggccgcatcgaagcccgtgaaatccagcagagggtggtccgagtctactgctatgtgaccgtggtgagcttgcagtacctgacgccgctcatcctcaccctcaactgcacacttctgctcaagacgctgggaggctattcctggggcctgggcccagctcctctactatcccccgacccatcctcagccagcgctgcccccatcggctctggggaggacgaagtccagcagactgcagcgcggattgccggggctctgggtggcctgcttactcccctcttcctccgtggcgtcctggcctacctcatctggtggacggctgcctgccagctgctcgccagccttttcggcctctacttccaccagcacttggcaggctcctagctgcctgcagaccctcctggggccctgaggtctgttcctggggcagcgggacactagcctgccccctctgtttgcgcccccgtgtccccagctgcaaggtggggccggactccccggcgttcccttcaccacagtgcctgacccgcggccccccttggacgccgagtttctgcctcagaactgtctctcctgggcccagcagcatgagggtcccgaggccattgtctccgaagcgtatgtgccaggtttgagtggcaagggtgatgctgg

SEQ ID NO: 193683 - DNA, 1065 bp, Homo sapiens
  Payload ID: 18245
  Gene Name: transmembrane protein 161A
  ENST ID: ENST00000587096
  CDS Start-End: 120-1065
taggccggtgggtgagtgcaccgcgttctcgcacgcgtcatggtgctgccagtcatgtcccctccccccaggcggtcctcggagtacagctggtggtgaccctgctcactgccaccctcatgcacaggctggcgccacactgctccttcgcgcgctggctgctctgtaacggcagtttgttccgatacaagcacccgtctgaggaggagcttcgggccctggcggggaagccgaggcccagaggcaggaaagagcggtgggccaatggccttagtgaggagaagccactgtctgtgccccgagatgccccgttccagctggagacctgccccctcacgaccgtggatgccctggtcctgcgcttcttcctggagtaccagtggtttgtggactttgctgtgtactcgggcggcgtgtacctcttcacagaggcctactactacatgctgggaccagccaaggagactaacattgctgtgttctggtgcctgctcacggtgaccttctccatcaagatgttcctgacagtgacacggctgtacttcagcgccgaggaggggggtgagcgctctgtctgcctcacctttgccttcctcttcctgctgctggccatgctggtgcaagtggtgcgggaggagaccctcgagctgggcctggagcctggtctggccagcatgacccagaacttagagccacttctgaagaagcagggctgggactgggcgcttcctgtggccaagctggctatccgcgtgggactggcagtggtgggctctgtgctgggtgccttcctcaccttcccaggcctgcggctggcccagacccaccgggacgcactgaccatgtcggaggacagacccatgctgcagttcctcctgcacaccagcttcctgtctcccctgttcatcctgtggctctggacaaagcccattgcacgggacttcctgcaccagccgccgtttggggagacgcgtttctccctgctgtccgattctgccttcgactctgggcgcctctggttgctggtggtgctgtgcctgctgcggctggcggtgacccggcccc

SEQ ID NO: 193684 - DNA, 540 bp, Homo sapiens
  Payload ID: 18245
  Gene Name: transmembrane protein 161A
  ENST ID: ENST00000587915
  CDS Start-End: 106-540
gagtcgggctctaattggtcgagtttccgcagagtgcccggagccctaggccggtgggcggtcctcggagtacagctggtggtgaccctgctcactgccaccctcatgcacaggctggcgccacactgctccttcgcgcgctggctgctctgtaacggcagtttgttccgatacaagcacccgtctgaggaggagcttcgggccctggcggggaagccgaggcccagaggcaggaaagagcggtgggccaatggccttagtgaggagaagccactgtctgtgccccgagatgccccgttccagctggagacctgccccctcacgaccgtggatgccctggtcctgcgcttcttcctggagtaccagtggtttgtggactttgctgtgtactcgggcggcgtgtacctcttcacagaggcctactactacatgctgggaccagccaaggagactaacattgctgtgttctggtgcctgctcacggtgaccttctccatcaagatgttcctgacagtgacacggctgtacttcagcgccgag

SEQ ID NO: 193685 - DNA, 1754 bp, Homo sapiens
  Payload ID: 18245
  Gene Name: transmembrane protein 161A
  ENST ID: ENST00000587985
  CDS Start-End: 35-1012
cggtgggtgagtgcaccgcgttctcgcacgcgtcatggcggtcctcggagtacagctggtggtgaccctgctcactgccaccctcatgcacaggctggcgccacactgctccttcgcgcgctggctgctctgtaacggcagtttgttccgatacaagcacccgtctgaggaggagcttcgggccctggcggggaagccgaggcccagaggcaggaaagagcggtgggccaatggccttagtgaggagaagccactgtctgtgccccgagatgccccgttccagctggagacctgccccctcacgaccgtggatgccctggtcctgcgcttcttcctggagtaccagtggtttgtggactttgctgtgtactcgggcggcgtgtacctcttcacagaggcctactactacatgctgggaccagccaaggagactaacattgctgtgttctggtgcctgctcacggtgaccttctccatcaagatgttcctgacagtgacacggctgtacttcagcgccgaggaggggggtgagcgctctgtctgcctcacctttgccttcctcttcctgctgctggccatgctggtgcaagtggtgcgggaggagaccctcgagctgggcctggagcctggtctggccagcatgacccagaacttagagccacttctgaagaagcagggctgggactgggcgcttcctgtggccaagctggctatccgcgtgggactggcagtggtgggctctgtgctgggtgccttcctcaccttcccaggcctgcggctggcccagacccaccgggacgcactgaccatgtcggaggacagacccatgctgcagttcctcctgcacaccagcttcctgtctcccctgttcatcctgtggctctggacaaagcccattgcacgggacttcctgcaccagccgccgtttggggagacgcgctgtccgattctgccttcgactctgggcgcctctggttgctggtggtgctgtgcctgctgcggctggcggtgacccggccccacctgcaggcctacctgtgcctggccaaggcccgggtggagcagctgcgaagggaggctggccgcatcgaagcccgtgaaatccagcagagggtggtccgagtctactgctatgtgaccgtggtgagcttgcagtacctgacgccgctcatcctcaccctcaactgcacacttctgctcaagacgctgggaggctattcctggggcctgggcccagctcctctactatcccccgacccatcctcagccagcgctgcccccatcggctctggggaggacgaagtccagcagactgcagcgcggattgccggggctctgggtggcctgcttactcccctcttcctccgtggcgtcctggcctacctcatctggtggacggctgcctgccagctgctcgccagccttttcggcctctacttccaccagcacttggcaggctcctagctgcctgcagaccctcctggggccctgaggtctgttcctggggcagcgggacactagcctgccccctctgtttgcgcccccgtgtccccagctgcaaggtggggccggactccccggcgttcccttcaccacagtgcctgacccgcggccccccttggacgccgagtttctgcctcagaactgtctctcctgggcccagcagcatgagggtcccgaggccattgtctccgaagcgtatgtgccaggtttgagtggcaagggtgatgctggctgctcttctgaacaaataa

SEQ ID NO: 193686 - DNA, 528 bp, Homo sapiens
  Payload ID: 18245
  Gene Name: transmembrane protein 161A
  ENST ID: ENST00000592369
  CDS Start-End: 345-528
aattggtcgagtttccgcagagtgcccggagccctaggccggtgggtgagtgcaccgcgttctcgcacgcgtcatgtttgttccgatacaagcacccgtctgaggaggagcttcgggccctggcggggaagccgaggcccagaggcaggaaagagcggtgggccaatggccttagtgaggagaagccactgtctgtgccccgagatgccccgttccagctggagacctgccccctcacgaccgtggatgccctggtcctgcgcttcttcctggagtaccagtggtttgtggactttgctgtgtactcgggcggcgtgtacctcttcacagaggcctactactacatgctgggaccagccaaggagactaacattgctgtgttctggtgcctgctcacggtgaccttctccatcaagatgttcctgacagtgacacggctgtacttcagcgccgaggaggggggtgagcgctctgtctgcctcacctttgccttcctcttcctgctgctggccatgctggtgcaagtgg

SEQ ID NO: 193687 - DNA, 2594 bp, Homo sapiens
  Payload ID: 18246
  Gene Name: transmembrane protein 161B
  Uniprot ID: Q8NDZ6
  ENST ID: ENST00000296595
  CDS Start-End: 126-1589
ggcagagccggaagaccctctctttcgctgtttgagagtctctcggctcaaggaccgggaggtaagaggtttgggactgccccggcaactccagggtgtctggtccacgacctatcctaggcgccatgggtgtgataggtatacagctggttgttaccatggtgatggccagtgtcatgcagaagattatacctcactattctcttgctcgatggctactctgtaatggcagtttgaggtggtatcaacatcctacagaagaagaattaagaattcttgcagggaaacaacaaaaagggaaaaccaaaaaagataggaaatataatggtcacattgaaagtaagccattaaccattccaaaggatattgaccttcatctagaaacaaagtcagttacagaagtggatactttagcattgcattactttccagaataccagtggctggtggatttcacagtggctgctacagttgtgtatctagtaactgaagtctactacaattttatgaagcctacacaggaaatgaatatcagcttagtctggtgcctacttgttttgtcttttgcaatcaaagttctattttcattaactacacactattttaaagtagaagatggtggtgaaagatctgtttgtgtcacctttggattttttttctttgtcaaagcaatggcagtgttgattgtaacagaaaattatctggaatttggacttgaaacagggtttacaaatttttcagacagtgcgatgcagtttcttgaaaagcaaggtttagaatctcagagtcctgtttcaaaacttactttcaaatttttcctggctattttctgttcattcattggggcttttttgacatttcctggattacgactggctcaaatgcatctggatgccctgaatttggcaacagaaaaaattacacaaactttacttcatatcaacttcttggcacctttatttatggttctgctctgggtaaaaccaatcaccaaagactacattatgaacccaccactgggcaaagaaagtatccctttaatgacagaagccacattcgatactctgcgactctggttaataatcctgctgtgtgctttgcggttggccatgatgcgtagtcacctgcaagcttatttaaatttagcccaaaaatgtgtggatcagatgaagaaagaagcggggcgaataagcacggttgagctacagaaaatggtggctcgagtcttttattatctttgtgtcattgcactgcagtatgtggcgcctctggtaatgctgcttcacacaactctgcttttgaaaacactaggtaatcattcctggggtatttatccagaatctatctctaccttaccagtggataatagtctactgtccaattctgtttactctgaattaccatcagctgaagggaaaatgaaggtaactgttacacaaataacagtggcactgagcagcttaaaaaatatttttactcctcttctttttcgaggacttctgtcttttctgacctggtggattgctgcttgcctcttttctacaagcctttttgggcttttctatcaccagtatctgactgtggcatgaatctcagttaacaaaaaagcatatccaaatcaccctttaaattaaaatatctgtgcccttaaagggctgatgaaaaccagaagaaagcaaatacaatgggaaaaaaaaaacatatcagaatgtcttgtattaaatgtttcctctgtattctcagggtgaattaatgtagtaatatttaaaattacaaaatagattgttaactgttacactgtggcattggaattttaactctttgtatttactggtatgagagggctatctacaagggtaatatttctgattaccctggtttacagaaacctccagcagtctttgaaacatctcacatgactctagttattgattgcttttaatggttttatggtactgttgatagtcatagtggctgcctatagaacaatcttcaaactgagccatgctttaggggagggaaaggggctaaagtctcttctgttggtaatttattagttactcttgaaacaataaaatccaacagaaaggaagagatagctactgtatattacagtaaagaaagctgcatagttattttaaatttaatggagatgaatatggttaaaatatataactactgctgcttgagaatagcaagagtattgttttaaaacatattccacccaacttgagagttcttttaaaatgattggccatatgaacatttgtaatcttgccattaggtttggacctgccatattttgttttattctgtgatcctaactagttccttttaataggctaaaatatttatcaatactgatcagactttaaagaaattactttgtaaacctgctgactacctgtatgtattgtatatatattatatattaaatatataatatattgagattataaaagatgaaaatattgaatccttataatattttaagttgcagaatgtatgttaaaaagtgacttgaatgagatgtatttgtatctagaaattttatttctttttggaatgagattaaaatacattttgaaagttca

SEQ ID NO: 193688 - DNA, 1796 bp, Homo sapiens
  Payload ID: 18246
  Gene Name: transmembrane protein 161B
  ENST ID: ENST00000512429
  CDS Start-End: 272-1702
ctctttcgctgtttgagagtctctcggctcaaggaccgggaggtaagaggtttgggactgccccggcaactccagggtgtctggtccacgacctatcctaggcgccatggttgcaaagaagaatgtaatcttgtagagtaccttgccttcccttccatacattcagcagacatagttcctttaagggattttactgctaggagaatttcataggtcatattcccatgttactgcttcacagggtgtgataggtatacagctggttgttaccatggtgatggccagtgtcatgcagaagattatacctcactattctcttgctcgatggctactctgtaatggcagtttgaggtggtatcaacatcctacagaagaagaattaagaattcttgcagggaaacaacaaaaagggaaaaccaaaaaagataggaaatataatggtcacattgaaagtaagccattaaccattccaaaggatattgaccttcatctagaaacaaagtcagttacagaagtggatactttagcattgcattactttccagaataccagtggctggtggatttcacagtggctgctacagttgtgtatctagtaactgaagtctactacaattttatgaagcctacacaggaaatgaatatcagcttagtctggtgcctacttgttttgtcttttgcaatcaaagttctattttcattaactacacactattttaaagtagaagatggtggtgaaagatctgtttgtgtcacctttggattttttttctttgtcaaagcaatggcagtgttgattgtaacagaaaattatctggaatttggacttgaaacagggtttacaaatttttcagacagtgcgatgcagtttcttgaaaagcaaggtttagaatctcagagtcctgtttcaaaacttactttcaaatttttcctggctattttctgttcattcattggggcttttttgacatttcctggattacgactggctcaaatgcatctggatgccctgaatttggcaacagaaaaaattacacaaactttacttcatatcaacttcttggcacctttatttatggttctgctctgggtaaaaccaatcaccaaagactacattatgaacccaccactgggcaaagaaagtatccctttaatgacagaagccacattcgatactctgcgactctggttaataatcctgctgtgtgctttgcggttggccatgatgcgtagtcacctgcaagcttatttaaatttagcccaaaaatgtgtggatcagatgaagaaagaagcggggcgaataagcacggttgagctacagaaaatggtggctcgagtcttttattatctttgtgtcattgcactgcagtatgtggcgcctctggtaatgctgcttcacacaactctgcttttgaaaacactaggtaatcattcctggggtatttatccagaatctatctctaccttaccagtggataatagtctactgtccaattctgtttactctgaattaccatcagctgaagggaaaatgaaggtaactgttacacaaataacagtggcactgagcagcttaaaaaatatttttactcctcttctttttcgaggacttctgtcttttctgacctggtggattgctgcttgcctcttttctacaagcctttttgggcttttctatcaccagtatctgactgtggcatgaatctcagttaacaaaaaagcatatccaaatcaccctttaaattaaaatatctgtgcccttaaagggctgatgaaaaccagaagaaagcaaatac

SEQ ID NO: 193689 - DNA, 2328 bp, Homo sapiens
  Payload ID: 18246
  Gene Name: transmembrane protein 161B
  ENST ID: ENST00000506536
  CDS Start-End: 504-1157
gctgtttgagagtctctcggctcaaggaccgggaggtaagaggtttgggactgccccggcaactccagggtgtctggtccacgacctatcctaggcgccatgtttgaggtggtatcaacatcctacagaagaagaattaagaattcttgcagggaaacaacaaaaagggaaaaccaaaaaagataggaaatataatggtcacattgaaagtaagccattaaccattccaaaggatattgaccttcatctagaaacaaagtcagttacagaagtggatactttagcattgcattactttccagaataccagtggctggtggatttcacagtggctgctacagttgtgtatctagtaactgaagtctactacaattttatgaagcctacacaggaaatgaatatcagcttagtctggtgcctacttgttttgtcttttgcaattagaagatggtggtgaaagatctgtttgtgtcacctttggattttttttctttgtcaaagcaatggcagtgttgattgtaacagaaaattatctggaatttggacttgaaacagggtttacaaatttttcagacagtgcgatgcagtttcttgaaaagcaaggtttagaatctcagagtcctgtttcaaaacttactttcaaatttttcctggctattttctgttcattcattggggcttttttgacatttcctggattacgactggctcaaatgcatctggatgccctgaatttggcaacagaaaaaattacacaaactttacttcatatcaacttcttggcacctttatttatggttctgctctgggtaaaaccaatcaccaaagactacattatgaacccaccactgggcaaagaaagtatccctttaatgacagaagccacattcgatactctgcgactctggttaataatcctgctgtgtgctttgcggttggccatgatgcgtagtcacctgcaagcttatttaaatttagcccaaaaatgtgtggatcagatgaagaaagaagcggggcgaataagcacggttgagctacagaaaatggtaatcattcctggggtatttatccagaatctatctctaccttaccagtggataatagtctactgtccaattctgtttactctgaattaccatcagctgaagggaaaatgaaggtaactgttacacaaataacagtggcactgagcagcttaaaaaatatttttactcctcttctttttcgaggacttctgtcttttctgacctggtggattgctgcttgcctcttttctacaagcctttttgggcttttctatcaccagtatctgactgtggcatgaatctcagttaacaaaaaagcatatccaaatcaccctttaaattaaaatatctgtgcccttaaagggctgatgaaaaccagaagaaagcaaatacaatgggaaaaaaaaaacatatcagaatgtcttgtattaaatgtttcctctgtattctcagggtgaattaatgtagtaatatttaaaattacaaaatagattgttaactgttacactgtggcattggaattttaactctttgtatttactggtatgagagggctatctacaagggtaatatttctgattaccctggtttacagaaacctccagcagtctttgaaacatctcacatgactctagttattgattgcttttaatggttttatggtactgttgatagtcatagtggctgcctatagaacaatcttcaaactgagccatgctttaggggagggaaaggggctaaagtctcttctgttggtaatttattagttactcttgaaacaataaaatccaacagaaaggaagagatagctactgtatattacagtaaagaaagctgcatagttattttaaatttaatggagatgaatatggttaaaatatataactactgctgcttgagaatagcaagagtattgttttaaaacatattccacccaacttgagagttcttttaaaatgattggccatatgaacatttgtaatcttgccattaggtttggacctgccatattttgttttattctgtgatcctaactagttccttttaataggctaaaatatttatcaatactgatcagactttaaagaaattactttgtaaacctgctgactacctgtatgtattgtatatatattatatattaaatatataatatattgagattataaaagatgaaaatattgaatccttataatattttaagttgcagaatgtatgttaaaaagtgacttgaatgagatgtatttgtatctagaaattttatttctttttggaatgagattaaaatacattttgaaagttc

SEQ ID NO: 193690 - DNA, 2804 bp, Homo sapiens
  Payload ID: 18246
  Gene Name: transmembrane protein 161B
  ENST ID: ENST00000511087
  CDS Start-End: 77-442
aaggaccgggaggtaagaggtttgggactgccccggcaactccagggtgtctggtccacgacctatcctaggcgccatgggtgtgataggtatacagctggttgttaccatggtgatggccagtgtcatgcagaagattatacctcactattctcttgctcgatggctactctgtaatggcagtttgaggtggtatcaacatcctacagaagaagaattaagaattcttgcagggaaacaacaaaaagggaaaaccaaaaaagataggaaatataatggtcacattgaaagtaagccattaaccattccaaaggatattgaccttcatctagaaacaaagtcagttacagaagtggatactttaggaggccttctaaaaaatgatgttgatgttttggactacactctggtagaagtaaaccagaatacctatgccacctgagatgcaaaggcattgcattactttccagaataccagtggctggtggatttcacagtggctgctacagttgtgtatctagtaactgaagtctactacaattttatgaagcctacacaggaaatgaatatcagcttagtctggtgcctacttgttttgtcttttgcaatcaaagttctattttcattaactacacactattttaaagtagaagatggtggtgaaagatctgtttgtgtcacctttggattttttttctttgtcaaagcaatggcagtgttgattgtaacagaaaattatctggaatttggacttgaaacagggtttacaaatttttcagacagtgcgatgcagtttcttgaaaagcaaggtttagaatctcagagtcctgtttcaaaacttactttcaaatttttcctggctattttctgttcattcattggggcttttttgacatttcctggattacgactggctcaaatgcatctggatgccctgaatttggcaacagaaaaaattacacagtaagcggaaaataactttacttcatatcaacttcttggcacctttatttatggttctgctctgggtaaaaccaatcaccaaagactacattatgaacccaccactgggcaaagaaagtatccctttaatgacagaagccacattcgatactctgcgactctggttaataatcctgctgtgtgctttgcggttggccatgatgcgtagtcacctgcaagcttatttaaatttagcccaaaaatgtgtggatcagatgaagaaagaagcggggcgaataagcacggttgagctacagaaaatggtggctcgagtcttttattatctttgtgtcattgcactgcagtatgtggcgcctctggtaatgctgcttcacacaactctgcttttgaaaacactaggtaatcattcctggggtatttatccagaatctatctctaccttaccagtggataatagtctactgtccaattctgtttactctgaattaccatcagctgaagggaaaatgaaggtaactgttacacaaataacagtggcactgagcagcttaaaaaatatttttactcctcttctttttcgaggacttctgtcttttctgacctggtggattgctgcttgcctcttttctacaagcctttttgggcttttctatcaccagtatctgactgtggcatgaatctcagttaacaaaaaagcatatccaaatcaccctttaaattaaaatatctgtgcccttaaagggctgatgaaaaccagaagaaagcaaatacaatgggaaaaaaaaaacatatcagaatgtcttgtattaaatgtttcctctgtattctcagggtgaattaatgtagtaatatttaaaattacaaaatagattgttaactgttacactgtggcattggaattttaactctttgtatttactggtatgagagggctatctacaagggtaatatttctgattaccctggtttacagaaacctccagcagtctttgaaacatctcacatgactctagttattgattgcttttaatggttttatggtactgttgatagtcatagtggctgcctatagaacaatcttcaaactgagccatgctttaggggagggaaaggggctaaagtctcttctgttggtaatttattagttactcttgaaacaataaaatccaacagaaaggaagagatagctactgtatattacagtaaagaaagctgcatagttattttaaatttaatggagatgaatatggttaaaatatataactactgctgcttgagaatagcaagagtattgttttaaaacatattccacccaacttgagagttcttttaaaatgattggccatatgaacatttgtaatcttgccattaggtttggacctgccatattttgttttattctgtgatcctaactagttccttttaataggctaaaatatttatcaatactgatcagactttaaagaaattactttgtaaacctgctgactacctgtatgtattgtatatatattatatattaaatatataatatattgagattataaaagatgaaaatattgaatccttataatattttaagttgcagaatgtatgttaaaaagtgacttgaatgagatgtatttgtatctagaaattttatttctttttggaatgagattaaaatacattttgaaagttcagcagagtaagcaatttatttgtgttgcctatgtgtgagtgtatttaaagttttatggacgcttaatggtttctcccaaattaaaattctttttctgtcatttccaaaaatcagaatctttccctctcaaatcaggtctacaggtatcatgtatgccttt

SEQ ID NO: 193691 - DNA, 7608 bp, Homo sapiens
  Payload ID: 18246
  Gene Name: transmembrane protein 161B
  Uniprot ID: Q8NDZ6
  ENST ID: ENST00000510089
  CDS Start-End: 403-825
ggcagagccggaagaccctctctttcgctgtttgagagtctctcggctcaaggaccgggaggtaagaggtttgggactgccccggcaactccagggtgtctggtccacgacctatcctaggcgccatgtttgaggtggtatcaacatcctacagaagaagaattaagaattcttgcagggaaacaacaaaaagggaaaaccaaaaaagataggaaatataatggtcacattgaaagtaagccattaaccattccaaaggatattgaccttcatctagaaacaaagtcagttacagaagtggatactttagcattgcattactttccagaataccagtggctggtggatttcacagtggctgctacagttgtgtatctagtaactgaagtctactacaattttatgaagcctacacaggaaatgaatatcagcttagtctggtgcctacttgttttgtcttttgcaatcaaagttctattttcattaactacacactattttaaagtagaagatggtggtgaaagatctgtttgtgtcacctttggattttttttctttgtcaaagcaatggcagtgttgattgtaacagaaaattatctggaatttggacttgaaacagggtttacaaatttttcagacagtgcgatgcagtttcttgaaaagcaaggtttagaatctcagagtcctgtttcaaaacttactttcaaatttttcctggctattttctgttcattcattggggcttttttgacatttcctggattacgactggctcaaatgcatctggatgccctgaatttggcaacagaaaaaattacacagtaagcggaaaatgtacataagcacatgcagataaatatatgttttccatcttaatgaagaactttacttcatatcaacttcttggcacctttatttatggttctgctctgggtaaaaccaatcaccaaagactacattatgaacccaccactgggcaaagaaagtatccctttgtaagtatgggcatttgagggctgatttttatcaccaaaactgctttactaaatgttatttactgtatttcgttttcagtgataaaatcaggacactgtatttttcagacattaataggaatgctaaaagatgtgttagaaaattgaaactacagaccatcatgtaacatttttgtgatctttattagttaatgttaatgattattaccttgcactaatattaccttacacactatttttttcctcctctttatgtccagtcgtcatcatttttctgttgtcattgtggctattgttcagataccttctggagttcttttgttttaattttgaaaattatggaggaaaaaagtataaatggaaactcatatactcaactcctatgtttgacagttgttaacattttccatatttgcttcatccattctttgttttgttttttgatgaaggatttttgaagtaaattagagacataacagttttatcccttagtactttctttagtttgcacctctaaaaaaaataaggatattttcctatataacaataacatcatcgtacctaacagttatctaatactaataccttaatattattatctaatactagtttatatttctacagttaggcaactgtattttagcagaagaagatggtgaggaaacaaacagtttattaataggcattaataactagacttgatctgttagccttgtagaactgttagagtaatagaaagtttcagacagaactggttcaaactccagctctcctcctcactaaaatcttcatttgaggcaggttatttaacttcactgagcctctgtttccccatctggaagatgaagataatagtatctaactcacaaggttatcattggaataaatgaaagaacacatgtaatgcaaccagctggaattaagtgcttaataaatgttcttttcactgctttgcctcatcagaattaaaatagaaatacttgactagtcattgactccgcagtgtaccttttgtattgtgtccttcttttagatcctggtaccagtttgtcttggaatatatataaaatcagtgatgaccatgataatttctctttttagagttaatcctattgaacccaggaaatagccactgaaaaagtaatgcttccccgccgccgacacacactaattaccttaatggtaatttaacttgacagattccctaagtattgaaaagtaattctaaggatctaaggttctagaaaagtctcagagaaactactaattcatatctttgatactgaaagcattcccaatccttccttgagattttggtcatggaaactggatttcatactcctgtaactatgttccctgatttttatatttgccttagttaaattgagaaaataaggaaactagcatttataaaacacttatataccagttattatgtgagatattcatactttacatattgtatcttcttatggtaattgtccatttgttgctgttgtcatcctattttatacatgaaataacaggctcagaggttaaataatttgactaaggttattcagccagatcgcgtgtacataaaacacttggtagttataccaacattcacttcccacttccagtctgattaaacttcatgtggatttattagtaatgaatactttatttaatagaaatgggaataaggaacttttcccttgtgtgtatattaaattataggaaaaatattgtttgtatataaagacctgaggttctctttctatagctttttcccccctttgtcccatccccatttctgacctgtttcataagcattccaagcaaaattatagttttacctctgctctcttttattcttctttaatttgaattcgtggttaagttattagaggcagtttttaatttttgttaaaaatctaaaatgcatgtgatagattgtgaaaaaatggctgcccatcaaagagggtaggatgaaggaaaaataaagtgacaggttcttcttctgtcacagacaaattggtttgtggaaaggtctttgtaatcagaagcaaaaatatggtataatgtagtttcaacccagaaatgtgtttgagtccatcatgtgttctgataaagcattgaaaaaaataaaatatggtaaacagagtccatgtgtgctcataatctcctaagaagaacacagcatatacaggaaagctcagaatggcatcaggaatttaaggtggtttcttctgcctgttctttccctatatactttaagctcctcctcatgctccttcttgagatactctatcagatcaacttcttcagatatttatgatggtatggaataatctaattagaaagtactatttaatgactattatcctaaatcctcaactcataaactgaacaaataattttctagttcactaccttattctgttcctttcattcacgttacctgttatcctcaaaggctgtgaaatagctgtcttcaggctgctcccagttagttgtccttgttgcacaactggagggagcacagtattgtttataggtccccaggaaagggtcaaggctgtgggtaggcttgtgtcttacgtactgttactctcacatgatggctcctaaatctcattgttcattgtagtggaaacatgttgataaaatgttatgcctttatctttcttagccaacattgcttttccattgaaattttatgtccatgtcccctcatgacttaataaaaagaaatgagagagtatatatagtaaagcctttgtcccatccccatttcttacctccatttcataaacagttcgagcaaaattttacacttcaaattttcctatattgtagttttagttatgagggttttttttttaatcttttctcatttgttctttatatgcatccattctaccgtcatgttcttaagaatttcagggagacccttctgagttccaggttttatctggcaaatgagtctgtgcattacaatagtcattttaagtgcctgataggtactagatataagactagatgccaagggtggtctagtcactacattcaaattacttgcaatgtagttcttcatcagagcagaaacccatggtcttttaaaaacattaaacaccaaaaggacatcagaagttatctcttctttctaaaaattctttaagcagccctcatcagtggtctggtttctgaaatggtgtccttccgttatgtattttcacctggaatcttaaccttaaccttgaggaattgctcagaaccgagccagcttcaacgcatagcaagttaaatgaattgttgtagaggaatctcaggcacctgatttcttcatgatatatcagaatttttgattttccagtggtcccaagtaaaagctcagcagattgaaagatcccatccaagtaggtatatgatcaggcaaagctgtaaccagtgatgctgggtgattgacttgattagtcccacaggcaatccctgcagttttctttctttccccaacttgtcttttcatgtcacagccagtttttatccatggaggagggtatatagagaaaaggatctcatgtattgctctacttttttcttctagatacctgttaacttcttacgctttcatgatacatttatctagttctgttattcaagttaaagtattatacagttaagtctatggcagagtcagattcttttatgtgtctaactgttgcgaagtatagacttcttatatcttatatggtgaccattaacatataacgagcatgctagcatattgttgtctttgagagcaccgtatcaactttttgatctgtagaatgacagaagccacattcgatactctgcgactctggttaataatcctgctgtgtgctttgcggttggccatgatgcgtagtcacctgcaagcttatttaaatttagcccaaaaatgtgtggatcagatgaagaaagaagcggggcgaataagcacggttgagctacagaaaatggtaagttttataccctagtcaaaatgaaaaatagcaaaaaccgcactgtaaaaaaaaaaaaaaattggtttcctttagtagatagtatttcaacccatcatattcttattataaataaacagaacaatcttaagttgacagatatcaaagagaccttgatctgattttggtgccaagtgaggtcttaattcctcttcctgccttaagtgcttggtgtcatacagtgggtggtacaaagctgttttatgcctaatattgctaaatgggacccttctaattgatttgaaagacattataacatattgtccagactttaagacttaaagagtaggaaatactacttttagtggctaaatttattcattttaatattactcaatttacttgaacatgaaatgtaagtatttaatttatttgaggcttccagagaataaaaggacaaggaatccatctgccactatagtggaccaataacctcattctttttttaagagaggtggtttttggctaccttgctttattattattattgttattttattttttgtagagacagggtctctctgtgtagcccaggcttgtcttgaactcctgggctcaagtaatcctcctgcatcacctcccaaagtattgggattacaggcgtgagtcaccacgcccaaccagcttcagtttttgattcacctccatagttaggggcatttattaagatttaaacaacttttttctgttttaccttttatatatttttatattttccatagtttgacttcaaatatgttcatgtagaatggggacttaatgtttttatttatgagggatttatgctcatatgtggctctgcctactattgttatttagttggatattttaggtagatgcccttacattgtgttttatctttgaaatataagtaaatatataccatttgaatcttagtcattattttctccaatatatatacatcatttaagaattatttttaaggaatctattttaatattctcacgttctaaaaacttgtcttcaaattgagcctttccaaagtcattttggggacatgtatcatgcagcacaacttactgacatttagcttccttcttgtgaaaggattatctcttaagtattttggtatggcaattatatgaaagtttaattcactcctaacatgtcagttgcattagacacttaagaatgttgttggttgcaggtggctcgagtcttttattatctttgtgtcattgcactgcagtatgtggcgcctctggtaatgctgcttcacacaactctgcttttgaaaacactaggtaatcattcctggggtatttatccagaatctatctctaccttaccagtggataatagtctactgtccaattctgtttactctgaattaccatcagctgaagggaaaatgaaggtaactgttacacaaataacagtggcactgagcagcttaaaaaatatttttactcctcttctttttcgaggacttctgtcttttctgacctggtggattgctgcttgcctcttttctacaagcctttttgggcttttctatcaccagtatctgactgtggcatgaatctcagttaacaaaaaagcatatccaaatcaccctttaaattaaaatatctgtgcccttaaagggctgatgaaaaccagaagaaagcaaatacaatgggaaaaaaaaaacatatcagaatgtcttgtattaaatgtttcctctgtattctcagggtgaattaatgtagtaatatttaaaattacaaaatagattgttaactgttacactgtggcattggaattttaactctttgtatttactggtatgagagggctatctacaagggtaatatttctgattaccctggtttacagaaacctccagcagtctttgaaacatctcacatgactctagttattgattgcttttaatggttttatggtactgttgatagtcatagtggctgcctatagaacaatcttcaaactgagccatgctttaggggagggaaaggggctaaagtctcttctgttggtaatttattagttactcttgaaacaataaaatccaacagaaaggaagagatagctactgtatattacagtaaagaaagctgcatagttattttaaatttaatggagatgaatatggttaaaatatataactactgctgcttgagaatagcaagagtattgttttaaaacatattccacccaacttgagagttcttttaaaatgattggccatatgaacatttgtaatcttgccattaggtttggacctgccatattttgttttattctgtgatcctaactagttccttttaataggctaaaatatttatcaatactgatcagactttaaagaaattactttgtaaacctgctgactacctgtatgtattgtatatatattatatattaaatatataatatattgagattataaaagatgaaaatattgaatccttataatattttaagttgcagaatgtatgttaaaaagtgacttgaatgagatgtatttgtatctagaaattttatttctttttggaatgagattaaaatacattttgaaagttcagcagagtaagcaatttatttgtgttgcctatgtgtga

SEQ ID NO: 193692 - DNA, 963 bp, Homo sapiens
  Payload ID: 18246
  Gene Name: transmembrane protein 161B
  ENST ID: ENST00000509387
  CDS Start-End: 412-948
acaacttccggcagagccggaagaccctctctttcgctgtttgagagtctctcggctcaaggaccgggaggtaagaggtttgggactgccccggcaactccagggtgtctggtccacgacctatcctaggcgccatgtttgaggtggtatcaacatcctacagaagaagaattaagaattcttgcagggaaacaacaaaaagggaaaaccaaaaaagataggaaatataatggtcacattgaaagtaagccattaaccattccaaaggatattgaccttcatctagaaacaaagtcagttacagaagtggatactttagcattgcattactttccagaataccagtggctggtggatttcacagtggctgctacagttgtgtatctagtaactgaagtctactacaattttatgaagcctacacaggaaatgaatatcagcttagtctggtgcctacttgttttgtcttttgcaatcaaagttctattttcattaactacacactattttaaagtagaagatggtggtgaaagatctgtttgtgtcacctttggattttttttctttgtcaaagcaatggcagtgttgattgtaacagaaaattatctggaatttggacttgaaacagggtttacaaatttttcagacagtgcgatgcagtttcttgaaaagcaaggtttagaatctcagagtcctgtttcaaaacttactttcaaatttttcctggctattttctgttcattcattggggcttttttgacatttcctggattacgactggctcaaatgcatctggatgccctgaatttggcaacagaaaaaattacacaaactttacttcatatcaacttcttggcacctttatttatggttctgctctgggtaaaaccaatcaccaaagactacattatgaacccaccactgggcaaagaaagtatccctttgtaagtatgggcatttgag

SEQ ID NO: 193693 - DNA, 1351 bp, Homo sapiens
  Payload ID: 18246
  Gene Name: transmembrane protein 161B
  ENST ID: ENST00000511218
  CDS Start-End: 132-968
ttttatgaagcctacacaggaaatgaatatcagcttagtctggtgcctacttgttttgtcttttgcaattagaagatggtggtgaaagatctgtttgtgtcacctttggattttttttctttgtcaaagcaatggcagtgttgattgtaacagaaaattatctggaatttggacttgaaacagggtttacaaatttttcagacagtgcgatgcagtttcttgaaaagcaaggtttagaatctcagagtcctgtttcaaaacttactttcaaatttttcctggctattttctgttcattcattggggcttttttgacatttcctggattacgactggctcaaatgcatctggatgccctgaatttggcaacagaaaaaattacacaaactttacttcatatcaacttcttggcacctttatttatggttctgctctgggtaaaaccaatcaccaaagactacattatgaacccaccactgggcaaagaaagtatcccttttcacctgcaagcttatttaaatttagcccaaaaatgtgtggatcagatgaagaaagaagcggggcgaataagcacggttgagctacagaaaatggtggctcgagtcttttattatctttgtgtcattgcactgcagtatgtggcgcctctggtaatgctgcttcacacaactctgcttttgaaaacactaggtaatcattcctggggtatttatccagaatctatctctaccttaccagtggataatagtctactgtccaattctgtttactctgaattaccatcagctgaagggaaaatgaaggtaactgttacacaaataacagtggcactgagcagcttaaaaaatatttttactcctcttctttttcgaggacttctgtcttttctgacctggtggattgctgcttgcctcttttctacaagcctttttgggcttttctatcaccagtatctgactgtggcatgaatctcagttaacaaaaaagcatatccaaatcaccctttaaattaaaatatctgtgcccttaaagggctgatgaaaaccagaagaaagcaaatacaatgggaaaaaaaaaacatatcagaatgtcttgtattaaatgtttcctctgtattctcagggtgaattaatgtagtaatatttaaaattacaaaatagattgttaactgttacactgtggcattggaattttaactctttgtatttactggtatgagagggctatctacaagggtaatatttctgattaccctggtttacagaaacctccagcagtctttgaaacatctcacatgactctagttattgattgcttttaatggttttatggtactgttgatagtcatagt

SEQ ID NO: 193694 - DNA, 2035 bp, Homo sapiens
  Payload ID: 18246
  Gene Name: transmembrane protein 161B
  ENST ID: ENST00000514135
  CDS Start-End: 108-1616
tctctttcgctgtttgagagtctctcggctcaaggaccgggaggtaagaggtttgggactgccccggcaactccagggtgtctggtccacgacctatcctaggcgccatgggtgtgataggtatacagctggttgttaccatggtgatggccagtgtcatgcagaagattatacctcactattctcttgctcgatggctactctgtaatggcagtttgaggtggtatcaacatcctacagaagaagaattaagaattcttgcagggaaacaacaaaaagggaaaaccaaaaaagataggaaatataatggtcacattgaaagtaagccattaaccattccaaaggatattgaccttcatctagaaacaaagtcagttacagaagtggatactttagcattgcattactttccagaataccagtggctggtggatttcacagtggctgctacagttgtgtatctagtaactgaagtctactacaattttatgaagcctacacaggaaatgaatatcagcttagtctggtgcctacttgttttgtcttttgcaatcaaagttctattttcattaactacacactattttaaagtagaagatggtggtgaaagatctgtttgtgtcacctttggattttttttctttgtcaaagcaatggcagtgttgattgtaacagaaaattatctggaatttggacttgaaacagggtttacaaatttttcagacagtgcgatgcagtttcttgaaaagcaaggtttagaatctcagagtcctgtttcaaaacttactttcaaatttttcctggctattttctgttcattcattggggcttttttgacatttcctggattacgactggctcaaatgcatctggatgccctgaatttggcaacagaaaaaattacacaaactttacttcatatcaacttcttggcacctttatttatggttctgctctgggtaaaaccaatcaccaaagactacattatgaacccaccactgggcaaagaaagtatccctttaatgacagaagccacattcgatactctgcgactctggttaataatcctgctgtgtgctttgcggttggccatgatgcgtagtcacctgcaagcttatttaaatttagcccaaaaatgtgtggatcagatgaagaaagaagcggggcgaataagcacggttgagctacagaaaatggtggctcgagtcttttattatctttgtgtcattgcactgcagtatgtggcgcctctggtaatgctgcttcacacaactctgcttttgaaaacactaggtaatcattcctggggtatttatccagaatctatctctaccttaccagtggataatagtctactgtccaattctgtttactctgaattaccatcagctgaagggaaaatgaagcataatgcaaggcaaggtccagccgttccacccggcatgcaagcttatggagcagccccctttgaagatctccagctagacttcacagagatgccaaagtgtggaggtaacaagtatttactagttcttgtgtgtaccttctctgggtgggtggaggcttatccaacacgaactgagaaagcttgtgaaataacccatgtgcttctttgagatcttattcctagatttggactgcccttacggatcggctcagataatgggctggcgtttgtggctgacttggtacagaagacggcaaaggtactggggatcacatggaaactgcatgctgcctactggcctcagagttccggaaaggtggagcggatgaatcagactatcaaaaatagtttagggaaagtatgtcaggaaaaaggattaaaatggatacaggctctccctatggtattatttaaaattagatgtaccccttctaaaagagcaggatattccccttataaaatactatatcataggccccctcccatattgtggggacttccaggcactccccaagagttaggtgaaattgagttacagcgacagctacaggctttaggaaaaattacacaatctcagcctgggtaaat

SEQ ID NO: 193695 - DNA, 1250 bp, Homo sapiens
  Payload ID: 18246
  Gene Name: transmembrane protein 161B
  ENST ID: ENST00000507872
  CDS Start-End: 97-558
gtttgagagtctctcggctcaaggaccgggaggtaagaggtttgggactgccccggcaactccagggtgtctggtccacgacctatcctaggcgccatgggtgtgataggtatacagctggttgttaccatggtgatggccagtgtcatgcagaagattatacctcactattctcttgctcgatggctactctgtaatggcagtttgaggtggtatcaacatcctacagaagaagaattaagaattcttgcagggaaacaacaaaaagggaaaaccaaaaaagataggaaatataatggtcacattgaaagtaagccattaaccattccaaaggatattgaccttcatctagaaacaaagtcagttacagaagtggatactttagcattgcattactttccagaataccagtggctggtggatttcacagtggctgctacagttgtgtatctagtaactgaagtctactacaattttatgaagcctacacaggaaatgaatatcagcttagtctggtgcctacttgttttgtcttttgcaattagaagatggtggtgaaagatctgtttgtgtcacctttggattttttttctttgtcaaagcaatggcagtgttgattgtaacagaaaattatctggaatttggacttgaaacagggtttacaaatttttcagacagtgcgatgcagtttcttgaaaagcaaggtttagaatctcagagtcctgtttcaaaacttactttcaaatttttcctggctattttctgttcattcattggggcttttttgacatttcctggattacgactggctcaaatgcatctggatgccctgaatttggcaacagaaaaaattacacaaactttacttcatatcaacttcttggcacctttatttatggttctgctctgggtaaaaccaatcaccaaagactacattatgaacccaccactgggcaaagaaagtatccctttgtaagtatgggcatttgagggctgatttttatcaccaaaactgctttactaaatgttatttactgtatttcgttttcagtgataaaatcaggacactgtatttttcagacattaataggaatgctaaaagatgtgttagaaaattgaaactacagaccatcatgtaacatttttgtgatctttattagttaatgttaatgattattaccttgcactaatattaccttacacactatttttttcctcctctttatgtccagtcgtcatcatttttctgt

SEQ ID NO: 193696 - DNA, 1892 bp, Homo sapiens
  Payload ID: 18247
  Gene Name: transmembrane protein 163
  Uniprot ID: Q8TC26
  ENST ID: ENST00000281924
  CDS Start-End: 66-935
gcacttctgactcgagtccccgccgcgcttgtcgtcgccgccgccgggatccgcagccccgcgccatggagccggccgcgggcatccagcgccgcagctcccaggggcccaccgtcccgccgccgccccggggccacgcgccaccggctgccgcccccggcccggccccgctgagctccccggtgcgcgagccgccccagctggaggaggagcggcaggtgcggatcagcgagagcggccagttcagcgacgggctggaggaccgaggcttactagaaagcagcacccgcctgaaacctcacgaagcccagaactacaggaagaaggcattgtgggtgtcctggttctccatcattgtcaccctggccctcgcggtggctgcctttactgtctccgttatgaggtacagcgcctctgcttttgggtttgcatttgatgccatcctggacgtcctgtcatcggcgattgtcctgtggcgttacagcaacgcggccgctgtgcactctgcccatagggagtacatagcctgtgtcatcttgggggtgatattccttctgtcatccatatgtatagtggtcaaagccatccatgacctctcaactaggctgctcccagaagtggacgatttcctgttcagtgtctccattttaagtgggattctttgcagcatcctggccgtgttgaagttcatgctggggaaggttctgaccagtagagcactcataacagatgggtttaactccctcgtgggtggcgtgatgggcttctccattcttctgagcgcggaagtgttcaagcatgactcggcggtctggtacctggacggcagcataggcgttctgatcggcctcaccatatttgcctatggggtcaaactcctcatcgacatggtgccgagggtgaggcagacacgtcactacgagatgtttgagtgaagggggccagcatccgcatgagaccatcgagatgaggagtttccacataggcaaagggtgccaatatttaactgaacatctggtttctttttggaagttttctttcacatggtttgtcattacaagacaaggtctgcccagccaggtggatctaccttgcccccatcacctgccgcccccatcaaacatgttgggacaatgcccataggaatggacctccttccccgtctccagctgggactggcgttttttagtctctggagtatgatggttctcatgggtaggatgagatctttggcagaaaggtcttcggtggtgctctgagcctgcgctgcataggactgagcagacccacctcctccagcttgggtggccctgccactcctggttccaagtctctcctttcctggcaggtcttaagggaagattgtacccctcaccctttacatacccagaatcatcagtatgtcacttcctaatttctatcagtgtatctcattatttcatactgttttactaatcctaagtctaaacagatttgctcaaaaggagaccattctattttttaaagtacttagtgatacacgtataagctttgcatggacgaattaaataagcacattgaccttttcttgtacattcagaacctgaacatccatgtgaaaactgggtccatttttgagagatgtgaaactacagtttatttgtaataaataaatataatctatccgtatatgcatatatctatatgctgtgttaagtggtaatgggtacattacagtctgtgagagatggatcgctccctctgtaaggaacaagacgttctcagctgatgtcacggtaggtttagattctgtagagtgttccccaacccgcaccgttctgtacctctcacaccactgcttgcccgggcagtagtggctgaccaataaagacctttacctgttttgtatggca

SEQ ID NO: 193697 - DNA, 5452 bp, Homo sapiens
  Payload ID: 18248
  Gene Name: transmembrane protein 164
  ENST ID: ENST00000288381
  CDS Start-End: 339-1115
aagttgctagctgggggcagagacggccacgcggttgcaggagtaagagatccctctgtggcgaattggccaacggctcctttcaaccctgcctcgttggtggccactggagaagcgcggggggctcccccagacagccgtggggacaagttagagccagcactttaccccgggccttgcgtgtagcttcccctcccctactctcggtgccctggtgtctggaggggggttgtgggggtgtgcccgccttacatggtccaccacccgggcaaccctctgggcttgtgttccatctcactcttgcttcctgtactgtggtcaaggggaaccactgcatcatgtcccggtatagctaccagagtctcctggactggctctatgggggcgtggaccccagttttgcaggcaatgggggccccgactgtgctgccttcctctcttggcagcagcggctgctggaaagtgtggtggtcctgaccctggctctgttggagatcctggtggccctgcggcacatcctgaggcagacgaaggaggacggtaggggtagccctggcagccagccagagcaggtgacccagcggccagaggaaggcaaggagagcctgagcaagaatctgctcttagtagccctgtgcctgaccttcggggtggaggtgggctttaagttcgccaccaagaccgtcatctacctgctcaacccctgtcacctggtcaccatgatgcatctcccctttgaattggagatttactacattcagcatgttatgctctacgtggtacccatctacctgctttggaaaggaggtgcttacactccagagcccctcagcagtttccggtgggctcttctctcaactggcctcatgttcttttatcacttcagcgtcttgcagatcctcggcctggtcaccgaagtgaatttgaacaacatgctgtgtccggccatctcagacccattctacggcccctggtatcgcatctgggcctcgggacaccagactctcatgaccatgacccacgggaagctggtcatcctgttctcatacatggctgggcccttgtgtaaatatctgctggatttgctccggcttccagccaagaaaatagactgaaggtgcttattttttttttttttcctccctgaggaagcaagtcgtgacttgacttggagaacacccagttcttgataaaatcatgggagagggcagtaggatgtttggtgtatttctttttcctcctttctgtccctttcttctaccactcttcctttcccagctcttccccctacgatgtctccttgagcctggggtgtagtgctgggcgctggattttcctccttccctttggctctctctctgctcctagtggccttacatggggagattgcagtgagcggctctttcactctgcttgtcggtgctttaacaacagctggttgaggagaaagggaacaacaagtagtagttcttttggcatcgaagcaatgagattgggttgtgtttcatttctccactgccagggacctccaggcttatgctggcgtcccatttagtctccagcacagcccttaccacgggggactgaggccttgtttctataccagcggcaagcccagagccgagggatttcacagctcgtggtcaagacagaaccagccagattctggtcactggtgtcccatgactcaaagtaaacagccaaccagccactccctccaggatgctgcctggggtgggaggtgagagcaccacccagcccaagggctagattccattgagagggttggagatctattgcaatgacaaatccaaagtgaagagggtcaagatatatacagtactaggccagaccctgtgtaagttctgcctgtgagagttgagaactgatgcatatcccaatcagaagtgagcacagaaaactgtgatttgaatcatacactctgttttaggaaaatgttgataatagataccattttaatcttgagtgccccttaaatgtgttccctctccctttccctctccccccacccctccccctcccccctccctccctctttccctctctcaggcagcttcagggaagaatgagctggaattggctggttggttggtttttgagtttggagaatcctcgcatcagggcccatttctggaagattctgtagatctgtttcttggttttacagggccagtgttgtttccctagggccagatttcttcagtgtatccacactcagtgctgaattgtttaatgtgggggacatcacgtcctcctcatcctgtctacccccaaatcccatgtctaggttgaaagggggctgccaaagaattaagtcctcatgggtggaggttcaggtgctccacaaggaggagcttttgttgaaggacttcagctcagttatgcacggacctcaagcaggcaggaagtggctgggcattgctgactccacattgactcccactaggaacagatttgcttaagaacagaaaagctcatttggtgattttgtctgatgagcctcccttcccctgtcccactctaggcaacacagttgacctagaccagttccagtatttccagtttgaccgtgtttgacctacactgagcttcggtgcctcagtggtcataattttagcaagtggacctataggaagcaaccctgggagggaccgtccttctgcagaggcctgcgggcattgaggctatcaatccccagggcttggggagcaggaggggagggcaccaagtgctcttactctcctgagctccttttgatgcgtaagctttgtttttggccctctttgaaggcagggccaaacttttcttagtgcctctcaccttagggtggccctccagggaaggtgctccttgaatggctggattggccctgcccaccgtcaaactgctacatgtaggaatagctgatgaggaaatacacaaggcctcagtgccccttggcctctttacaaaaggagaagttggaaggggattgtgggaggagcccctgggggcctggtctgtcctccaccagaacttggagttgctgccagcagaggatctgtgcctcagctgaagactagctccggaatgtcataggggtgtgactgtgtaggccttctcctcctcctcgtttctgtggcatggcacaggttgcctggttgctcgagccttccccatgttgacatcctccacaagcttgcctttgctctgtctacagcttagtaccccattctggagggcactttctggtgcttggaaggagagaagaaagcaaaagccacatgcctggcatggccaagccagagacagatccacctgtcagaggaaggaagaagtaaagggggcatgcagggcttttgggggccagattggctcagaaacatgtaggtcaaaagaatagagggggcccagtctataggcttcacaaggagccatggcctgtatttggggcattggggagcataaggcatctgaactggtccagatctcactcttatcttgggccaagccaacgtggagagaagcaacccaaccagactcttggcagcctgccttacagggtagcccaccttatagggtagccctcatatctgccctgtgccggccctctactgccccagctttggtacaggagtgagggagaagctggagcttgcacacccagtggccagtggggctgtcttcccagctcctcctcagggctttcctgtcagtgccaagccagttccccagccaggtttccgtgtgccatttgccagcgtgtgggagctctgcgcgtgtgtgagggtgtttgtagaagagggcagtttcctttcaaatggccttaggaagggaaaagagtactccctccagcccctaggtagccttggccagggatgtgggccaagaacagtctgtggagctggccaacttgtggcatccactccaaatagcagagacccagtcacgcctgcttctggtcctccctgccctcagtatttggttttgtacaccaaagatgatctggcccatcttcctcccagaggcacaacagtaacatgttcctctgtcagcctgtgaaggcatgcagggttctgaagccacagactcagtctccccaagtcagcaatctctttctctctctctcctcaaacttcatcgcattcatagaagctgcttgcagggtcgccgggctaaccagggtgatcggcgaactttaccgtacagtacctcagtctagctgtcagatcaccccttttgctgtagcctctgttgaggtttttatatttgtgatcattggtaattcagtgtcctatgaagtgggcacagctccccacagagagcaagttgtcagcaggtctctgtgcactggtattggggcagggcagtgccctgggggtaagctaggtggctcagggagtggcagaagggccatttttccctctgccaaaaagacttccttggatttgtagatgttgacccagagtcctctgtcccctcctgaagaggattttcttactggtttctactgaaggggaggtaggggaggaggaaaaaaggaccatgtgtgatgctgttagacaagacactgacgctgattatggagggtctcctgcaggcccttgtgggctccttggcaaggccccaggctgggaaggagctccccccactgcccatcctgcccgctttgtggcgggtagagtcagtgacagggaggcagccctccttttgtgtatatagagtgagctgatttgggctcaggaaaacctagtcgcttgttgctctcgtctgtgacatttttgtacactggtttgctactcatggcaagaaacagacaaagccccatgaaaaataaaacaaaacaaaagtcatttcaaacaaagctgttgttttgaaaactcttgctttcttttggtgtccattttgtgttctattttaaagaatctttcatttatattggtgttattgtagtgaagagaatgtgataggctgatctgtaatggtttctgtcaggagcttagcaaatgcctctgcccctcttcccctacccctgtccttcctcagttcccagctgggattgctatgcactgggcagacccgtcactgtctcccctgaacccccacacagtggcttcccttagaaccagtctttgtactctccctaaacagcagcaggcttaggatttttgtcaggctggttcttgcgtgctctgtgcccccaccagtttgctcacctcttggggcattttgtaatgtgttttctctgtcttgtaaaaccttttgattgtaccgaaatggtatctgcagtcgcctttggaaataaatggtcattaatttgtgtacttagcattctgaattttagtctcaggtgtttctgttgttgaagatccttgaatgaaaaggaaccctcaccatggggcttactgttataatgtttcttcatttactgttattaaaagatttatgagaa

SEQ ID NO: 193698 - DNA, 5566 bp, Homo sapiens
  Payload ID: 18248
  Gene Name: transmembrane protein 164
  Uniprot ID: Q5U3C3
  ENST ID: ENST00000372068
  CDS Start-End: 340-1233
gaagttgctagctgggggcagagacggccacgcggttgcaggagtaagagatccctctgtggcgaattggccaacggctcctttcaaccctgcctcgttggtggccactggagaagcgcggggggctcccccagacagccgtggggacaagttagagccagcactttaccccgggccttgcgtgtagcttcccctcccctactctcggtgccctggtgtctggaggggggttgtgggggtgtgcccgccttacatggtccaccacccgggcaaccctctgggcttgtgttccatctcactcttgcttcctgtactgtggtcaaggggaaccactgcatcatgtcccggtatagctaccagagtctcctggactggctctatgggggcgtggaccccagttttgcaggcaatgggggccccgactgtgctgccttcctctcttggcagcagcggctgctggaaagtgtggtggtcctgaccctggctctgttggagatcctggtggccctgcggcacatcctgaggcagacgaaggaggacggtaggggtagccctggcagccagccagagcaggtgacccagcggccagaggaaggcaaggagagcctgagcaagaatctgctcttagtagccctgtgcctgaccttcggggtggaggtgggctttaagttcgccaccaagaccgtcatctacctgctcaacccctgtcacctggtcaccatgatgcatatctttctcctggcctgccctccatgtcggggagctatcgtcgtcttcaagctacagatgcacatgttgaatggagctcttctggcattgctgtttcctgtggtaaacactcggctgctcccctttgaattggagatttactacattcagcatgttatgctctacgtggtacccatctacctgctttggaaaggaggtgcttacactccagagcccctcagcagtttccggtgggctcttctctcaactggcctcatgttcttttatcacttcagcgtcttgcagatcctcggcctggtcaccgaagtgaatttgaacaacatgctgtgtccggccatctcagacccattctacggcccctggtatcgcatctgggcctcgggacaccagactctcatgaccatgacccacgggaagctggtcatcctgttctcatacatggctgggcccttgtgtaaatatctgctggatttgctccggcttccagccaagaaaatagactgaaggtgcttattttttttttttttcctccctgaggaagcaagtcgtgacttgacttggagaacacccagttcttgataaaatcatgggagagggcagtaggatgtttggtgtatttctttttcctcctttctgtccctttcttctaccactcttcctttcccagctcttccccctacgatgtctccttgagcctggggtgtagtgctgggcgctggattttcctccttccctttggctctctctctgctcctagtggccttacatggggagattgcagtgagcggctctttcactctgcttgtcggtgctttaacaacagctggttgaggagaaagggaacaacaagtagtagttcttttggcatcgaagcaatgagattgggttgtgtttcatttctccactgccagggacctccaggcttatgctggcgtcccatttagtctccagcacagcccttaccacgggggactgaggccttgtttctataccagcggcaagcccagagccgagggatttcacagctcgtggtcaagacagaaccagccagattctggtcactggtgtcccatgactcaaagtaaacagccaaccagccactccctccaggatgctgcctggggtgggaggtgagagcaccacccagcccaagggctagattccattgagagggttggagatctattgcaatgacaaatccaaagtgaagagggtcaagatatatacagtactaggccagaccctgtgtaagttctgcctgtgagagttgagaactgatgcatatcccaatcagaagtgagcacagaaaactgtgatttgaatcatacactctgttttaggaaaatgttgataatagataccattttaatcttgagtgccccttaaatgtgttccctctccctttccctctccccccacccctccccctcccccctccctccctctttccctctctcaggcagcttcagggaagaatgagctggaattggctggttggttggtttttgagtttggagaatcctcgcatcagggcccatttctggaagattctgtagatctgtttcttggttttacagggccagtgttgtttccctagggccagatttcttcagtgtatccacactcagtgctgaattgtttaatgtgggggacatcacgtcctcctcatcctgtctacccccaaatcccatgtctaggttgaaagggggctgccaaagaattaagtcctcatgggtggaggttcaggtgctccacaaggaggagcttttgttgaaggacttcagctcagttatgcacggacctcaagcaggcaggaagtggctgggcattgctgactccacattgactcccactaggaacagatttgcttaagaacagaaaagctcatttggtgattttgtctgatgagcctcccttcccctgtcccactctaggcaacacagttgacctagaccagttccagtatttccagtttgaccgtgtttgacctacactgagcttcggtgcctcagtggtcataattttagcaagtggacctataggaagcaaccctgggagggaccgtccttctgcagaggcctgcgggcattgaggctatcaatccccagggcttggggagcaggaggggagggcaccaagtgctcttactctcctgagctccttttgatgcgtaagctttgtttttggccctctttgaaggcagggccaaacttttcttagtgcctctcaccttagggtggccctccagggaaggtgctccttgaatggctggattggccctgcccaccgtcaaactgctacatgtaggaatagctgatgaggaaatacacaaggcctcagtgccccttggcctctttacaaaaggagaagttggaaggggattgtgggaggagcccctgggggcctggtctgtcctccaccagaacttggagttgctgccagcagaggatctgtgcctcagctgaagactagctccggaatgtcataggggtgtgactgtgtaggccttctcctcctcctcgtttctgtggcatggcacaggttgcctggttgctcgagccttccccatgttgacatcctccacaagcttgcctttgctctgtctacagcttagtaccccattctggagggcactttctggtgcttggaaggagagaagaaagcaaaagccacatgcctggcatggccaagccagagacagatccacctgtcagaggaaggaagaagtaaagggggcatgcagggcttttgggggccagattggctcagaaacatgtaggtcaaaagaatagagggggcccagtctataggcttcacaaggagccatggcctgtatttggggcattggggagcataaggcatctgaactggtccagatctcactcttatcttgggccaagccaacgtggagagaagcaacccaaccagactcttggcagcctgccttacagggtagcccaccttatagggtagccctcatatctgccctgtgccggccctctactgccccagctttggtacaggagtgagggagaagctggagcttgcacacccagtggccagtggggctgtcttcccagctcctcctcagggctttcctgtcagtgccaagccagttccccagccaggtttccgtgtgccatttgccagcgtgtgggagctctgcgcgtgtgtgagggtgtttgtagaagagggcagtttcctttcaaatggccttaggaagggaaaagagtactccctccagcccctaggtagccttggccagggatgtgggccaagaacagtctgtggagctggccaacttgtggcatccactccaaatagcagagacccagtcacgcctgcttctggtcctccctgccctcagtatttggttttgtacaccaaagatgatctggcccatcttcctcccagaggcacaacagtaacatgttcctctgtcagcctgtgaaggcatgcagggttctgaagccacagactcagtctccccaagtcagcaatctctttctctctctctcctcaaacttcatcgcattcatagaagctgcttgcagggtcgccgggctaaccagggtgatcggcgaactttaccgtacagtacctcagtctagctgtcagatcaccccttttgctgtagcctctgttgaggtttttatatttgtgatcattggtaattcagtgtcctatgaagtgggcacagctccccacagagagcaagttgtcagcaggtctctgtgcactggtattggggcagggcagtgccctgggggtaagctaggtggctcagggagtggcagaagggccatttttccctctgccaaaaagacttccttggatttgtagatgttgacccagagtcctctgtcccctcctgaagaggattttcttactggtttctactgaaggggaggtaggggaggaggaaaaaaggaccatgtgtgatgctgttagacaagacactgacgctgattatggagggtctcctgcaggcccttgtgggctccttggcaaggccccaggctgggaaggagctccccccactgcccatcctgcccgctttgtggcgggtagagtcagtgacagggaggcagccctccttttgtgtatatagagtgagctgatttgggctcaggaaaacctagtcgcttgttgctctcgtctgtgacatttttgtacactggtttgctactcatggcaagaaacagacaaagccccatgaaaaataaaacaaaacaaaagtcatttcaaacaaagctgttgttttgaaaactcttgctttcttttggtgtccattttgtgttctattttaaagaatctttcatttatattggtgttattgtagtgaagagaatgtgataggctgatctgtaatggtttctgtcaggagcttagcaaatgcctctgcccctcttcccctacccctgtccttcctcagttcccagctgggattgctatgcactgggcagacccgtcactgtctcccctgaacccccacacagtggcttcccttagaaccagtctttgtactctccctaaacagcagcaggcttaggatttttgtcaggctggttcttgcgtgctctgtgcccccaccagtttgctcacctcttggggcattttgtaatgtgttttctctgtcttgtaaaaccttttgattgtaccgaaatggtatctgcagtcgcctttggaaataaatggtcattaatttgtgtacttagcattctgaattttagtctcaggtgtttctgttgttgaagatccttgaatgaaaaggaaccctcaccatggggcttactgttataatgtttcttcatttactgttattaaaagatttatg

SEQ ID NO: 193699 - DNA, 5567 bp, Homo sapiens
  Payload ID: 18248
  Gene Name: transmembrane protein 164
  Uniprot ID: Q5U3C3
  ENST ID: ENST00000372073
  CDS Start-End: 337-1230
ggaggggcccgtcggcggcgaagttgctagctgggggcagagacggccacgcggttgcaggaattggccaacggctcctttcaaccctgcctcgttggtggccactggagaagcgcggggggctcccccagacagccgtggggacaagttagagccagcactttaccccgggccttgcgtgtagcttcccctcccctactctcggtgccctggtgtctggaggggggttgtgggggtgtgcccgccttacatggtccaccacccgggcaaccctctgggcttgtgttccatctcactcttgcttcctgtactgtggtcaaggggaaccactgcatcatgtcccggtatagctaccagagtctcctggactggctctatgggggcgtggaccccagttttgcaggcaatgggggccccgactgtgctgccttcctctcttggcagcagcggctgctggaaagtgtggtggtcctgaccctggctctgttggagatcctggtggccctgcggcacatcctgaggcagacgaaggaggacggtaggggtagccctggcagccagccagagcaggtgacccagcggccagaggaaggcaaggagagcctgagcaagaatctgctcttagtagccctgtgcctgaccttcggggtggaggtgggctttaagttcgccaccaagaccgtcatctacctgctcaacccctgtcacctggtcaccatgatgcatatctttctcctggcctgccctccatgtcggggagctatcgtcgtcttcaagctacagatgcacatgttgaatggagctcttctggcattgctgtttcctgtggtaaacactcggctgctcccctttgaattggagatttactacattcagcatgttatgctctacgtggtacccatctacctgctttggaaaggaggtgcttacactccagagcccctcagcagtttccggtgggctcttctctcaactggcctcatgttcttttatcacttcagcgtcttgcagatcctcggcctggtcaccgaagtgaatttgaacaacatgctgtgtccggccatctcagacccattctacggcccctggtatcgcatctgggcctcgggacaccagactctcatgaccatgacccacgggaagctggtcatcctgttctcatacatggctgggcccttgtgtaaatatctgctggatttgctccggcttccagccaagaaaatagactgaaggtgcttattttttttttttttcctccctgaggaagcaagtcgtgacttgacttggagaacacccagttcttgataaaatcatgggagagggcagtaggatgtttggtgtatttctttttcctcctttctgtccctttcttctaccactcttcctttcccagctcttccccctacgatgtctccttgagcctggggtgtagtgctgggcgctggattttcctccttccctttggctctctctctgctcctagtggccttacatggggagattgcagtgagcggctctttcactctgcttgtcggtgctttaacaacagctggttgaggagaaagggaacaacaagtagtagttcttttggcatcgaagcaatgagattgggttgtgtttcatttctccactgccagggacctccaggcttatgctggcgtcccatttagtctccagcacagcccttaccacgggggactgaggccttgtttctataccagcggcaagcccagagccgagggatttcacagctcgtggtcaagacagaaccagccagattctggtcactggtgtcccatgactcaaagtaaacagccaaccagccactccctccaggatgctgcctggggtgggaggtgagagcaccacccagcccaagggctagattccattgagagggttggagatctattgcaatgacaaatccaaagtgaagagggtcaagatatatacagtactaggccagaccctgtgtaagttctgcctgtgagagttgagaactgatgcatatcccaatcagaagtgagcacagaaaactgtgatttgaatcatacactctgttttaggaaaatgttgataatagataccattttaatcttgagtgccccttaaatgtgttccctctccctttccctctccccccacccctccccctcccccctccctccctctttccctctctcaggcagcttcagggaagaatgagctggaattggctggttggttggtttttgagtttggagaatcctcgcatcagggcccatttctggaagattctgtagatctgtttcttggttttacagggccagtgttgtttccctagggccagatttcttcagtgtatccacactcagtgctgaattgtttaatgtgggggacatcacgtcctcctcatcctgtctacccccaaatcccatgtctaggttgaaagggggctgccaaagaattaagtcctcatgggtggaggttcaggtgctccacaaggaggagcttttgttgaaggacttcagctcagttatgcacggacctcaagcaggcaggaagtggctgggcattgctgactccacattgactcccactaggaacagatttgcttaagaacagaaaagctcatttggtgattttgtctgatgagcctcccttcccctgtcccactctaggcaacacagttgacctagaccagttccagtatttccagtttgaccgtgtttgacctacactgagcttcggtgcctcagtggtcataattttagcaagtggacctataggaagcaaccctgggagggaccgtccttctgcagaggcctgcgggcattgaggctatcaatccccagggcttggggagcaggaggggagggcaccaagtgctcttactctcctgagctccttttgatgcgtaagctttgtttttggccctctttgaaggcagggccaaacttttcttagtgcctctcaccttagggtggccctccagggaaggtgctccttgaatggctggattggccctgcccaccgtcaaactgctacatgtaggaatagctgatgaggaaatacacaaggcctcagtgccccttggcctctttacaaaaggagaagttggaaggggattgtgggaggagcccctgggggcctggtctgtcctccaccagaacttggagttgctgccagcagaggatctgtgcctcagctgaagactagctccggaatgtcataggggtgtgactgtgtaggccttctcctcctcctcgtttctgtggcatggcacaggttgcctggttgctcgagccttccccatgttgacatcctccacaagcttgcctttgctctgtctacagcttagtaccccattctggagggcactttctggtgcttggaaggagagaagaaagcaaaagccacatgcctggcatggccaagccagagacagatccacctgtcagaggaaggaagaagtaaagggggcatgcagggcttttgggggccagattggctcagaaacatgtaggtcaaaagaatagagggggcccagtctataggcttcacaaggagccatggcctgtatttggggcattggggagcataaggcatctgaactggtccagatctcactcttatcttgggccaagccaacgtggagagaagcaacccaaccagactcttggcagcctgccttacagggtagcccaccttatagggtagccctcatatctgccctgtgccggccctctactgccccagctttggtacaggagtgagggagaagctggagcttgcacacccagtggccagtggggctgtcttcccagctcctcctcagggctttcctgtcagtgccaagccagttccccagccaggtttccgtgtgccatttgccagcgtgtgggagctctgcgcgtgtgtgagggtgtttgtagaagagggcagtttcctttcaaatggccttaggaagggaaaagagtactccctccagcccctaggtagccttggccagggatgtgggccaagaacagtctgtggagctggccaacttgtggcatccactccaaatagcagagacccagtcacgcctgcttctggtcctccctgccctcagtatttggttttgtacaccaaagatgatctggcccatcttcctcccagaggcacaacagtaacatgttcctctgtcagcctgtgaaggcatgcagggttctgaagccacagactcagtctccccaagtcagcaatctctttctctctctctcctcaaacttcatcgcattcatagaagctgcttgcagggtcgccgggctaaccagggtgatcggcgaactttaccgtacagtacctcagtctagctgtcagatcaccccttttgctgtagcctctgttgaggtttttatatttgtgatcattggtaattcagtgtcctatgaagtgggcacagctccccacagagagcaagttgtcagcaggtctctgtgcactggtattggggcagggcagtgccctgggggtaagctaggtggctcagggagtggcagaagggccatttttccctctgccaaaaagacttccttggatttgtagatgttgacccagagtcctctgtcccctcctgaagaggattttcttactggtttctactgaaggggaggtaggggaggaggaaaaaaggaccatgtgtgatgctgttagacaagacactgacgctgattatggagggtctcctgcaggcccttgtgggctccttggcaaggccccaggctgggaaggagctccccccactgcccatcctgcccgctttgtggcgggtagagtcagtgacagggaggcagccctccttttgtgtatatagagtgagctgatttgggctcaggaaaacctagtcgcttgttgctctcgtctgtgacatttttgtacactggtttgctactcatggcaagaaacagacaaagccccatgaaaaataaaacaaaacaaaagtcatttcaaacaaagctgttgttttgaaaactcttgctttcttttggtgtccattttgtgttctattttaaagaatctttcatttatattggtgttattgtagtgaagagaatgtgataggctgatctgtaatggtttctgtcaggagcttagcaaatgcctctgcccctcttcccctacccctgtccttcctcagttcccagctgggattgctatgcactgggcagacccgtcactgtctcccctgaacccccacacagtggcttcccttagaaccagtctttgtactctccctaaacagcagcaggcttaggatttttgtcaggctggttcttgcgtgctctgtgcccccaccagtttgctcacctcttggggcattttgtaatgtgttttctctgtcttgtaaaaccttttgattgtaccgaaatggtatctgcagtcgcctttggaaataaatggtcattaatttgtgtacttagcattctgaattttagtctcaggtgtttctgttgttgaagatccttgaatgaaaaggaaccctcaccatggggcttactgttataatgtttcttcatttactgttattaaaagatttatgagaa

SEQ ID NO: 193700 - DNA, 4975 bp, Homo sapiens
  Payload ID: 18248
  Gene Name: transmembrane protein 164
  Uniprot ID: Q5U3C3
  ENST ID: ENST00000372072
  CDS Start-End: 196-642
gcggctgctgcagggggaggaagacggggaggaggagccgtgcgccgcggcggcggccgccaggggaaccgagcgcccggcgcggagagcgcgggagcggagcagtagcccgatccggggccgcgggccgagctgccgatctttctcctggcctgccctccatgtcggggagctatcgtcgtcttcaagctacagatgcacatgttgaatggagctcttctggcattgctgtttcctgtggtaaacactcggctgctcccctttgaattggagatttactacattcagcatgttatgctctacgtggtacccatctacctgctttggaaaggaggtgcttacactccagagcccctcagcagtttccggtgggctcttctctcaactggcctcatgttcttttatcacttcagcgtcttgcagatcctcggcctggtcaccgaagtgaatttgaacaacatgctgtgtccggccatctcagacccattctacggcccctggtatcgcatctgggcctcgggacaccagactctcatgaccatgacccacgggaagctggtcatcctgttctcatacatggctgggcccttgtgtaaatatctgctggatttgctccggcttccagccaagaaaatagactgaaggtgcttattttttttttttttcctccctgaggaagcaagtcgtgacttgacttggagaacacccagttcttgataaaatcatgggagagggcagtaggatgtttggtgtatttctttttcctcctttctgtccctttcttctaccactcttcctttcccagctcttccccctacgatgtctccttgagcctggggtgtagtgctgggcgctggattttcctccttccctttggctctctctctgctcctagtggccttacatggggagattgcagtgagcggctctttcactctgcttgtcggtgctttaacaacagctggttgaggagaaagggaacaacaagtagtagttcttttggcatcgaagcaatgagattgggttgtgtttcatttctccactgccagggacctccaggcttatgctggcgtcccatttagtctccagcacagcccttaccacgggggactgaggccttgtttctataccagcggcaagcccagagccgagggatttcacagctcgtggtcaagacagaaccagccagattctggtcactggtgtcccatgactcaaagtaaacagccaaccagccactccctccaggatgctgcctggggtgggaggtgagagcaccacccagcccaagggctagattccattgagagggttggagatctattgcaatgacaaatccaaagtgaagagggtcaagatatatacagtactaggccagaccctgtgtaagttctgcctgtgagagttgagaactgatgcatatcccaatcagaagtgagcacagaaaactgtgatttgaatcatacactctgttttaggaaaatgttgataatagataccattttaatcttgagtgccccttaaatgtgttccctctccctttccctctccccccacccctccccctcccccctccctccctctttccctctctcaggcagcttcagggaagaatgagctggaattggctggttggttggtttttgagtttggagaatcctcgcatcagggcccatttctggaagattctgtagatctgtttcttggttttacagggccagtgttgtttccctagggccagatttcttcagtgtatccacactcagtgctgaattgtttaatgtgggggacatcacgtcctcctcatcctgtctacccccaaatcccatgtctaggttgaaagggggctgccaaagaattaagtcctcatgggtggaggttcaggtgctccacaaggaggagcttttgttgaaggacttcagctcagttatgcacggacctcaagcaggcaggaagtggctgggcattgctgactccacattgactcccactaggaacagatttgcttaagaacagaaaagctcatttggtgattttgtctgatgagcctcccttcccctgtcccactctaggcaacacagttgacctagaccagttccagtatttccagtttgaccgtgtttgacctacactgagcttcggtgcctcagtggtcataattttagcaagtggacctataggaagcaaccctgggagggaccgtccttctgcagaggcctgcgggcattgaggctatcaatccccagggcttggggagcaggaggggagggcaccaagtgctcttactctcctgagctccttttgatgcgtaagctttgtttttggccctctttgaaggcagggccaaacttttcttagtgcctctcaccttagggtggccctccagggaaggtgctccttgaatggctggattggccctgcccaccgtcaaactgctacatgtaggaatagctgatgaggaaatacacaaggcctcagtgccccttggcctctttacaaaaggagaagttggaaggggattgtgggaggagcccctgggggcctggtctgtcctccaccagaacttggagttgctgccagcagaggatctgtgcctcagctgaagactagctccggaatgtcataggggtgtgactgtgtaggccttctcctcctcctcgtttctgtggcatggcacaggttgcctggttgctcgagccttccccatgttgacatcctccacaagcttgcctttgctctgtctacagcttagtaccccattctggagggcactttctggtgcttggaaggagagaagaaagcaaaagccacatgcctggcatggccaagccagagacagatccacctgtcagaggaaggaagaagtaaagggggcatgcagggcttttgggggccagattggctcagaaacatgtaggtcaaaagaatagagggggcccagtctataggcttcacaaggagccatggcctgtatttggggcattggggagcataaggcatctgaactggtccagatctcactcttatcttgggccaagccaacgtggagagaagcaacccaaccagactcttggcagcctgccttacagggtagcccaccttatagggtagccctcatatctgccctgtgccggccctctactgccccagctttggtacaggagtgagggagaagctggagcttgcacacccagtggccagtggggctgtcttcccagctcctcctcagggctttcctgtcagtgccaagccagttccccagccaggtttccgtgtgccatttgccagcgtgtgggagctctgcgcgtgtgtgagggtgtttgtagaagagggcagtttcctttcaaatggccttaggaagggaaaagagtactccctccagcccctaggtagccttggccagggatgtgggccaagaacagtctgtggagctggccaacttgtggcatccactccaaatagcagagacccagtcacgcctgcttctggtcctccctgccctcagtatttggttttgtacaccaaagatgatctggcccatcttcctcccagaggcacaacagtaacatgttcctctgtcagcctgtgaaggcatgcagggttctgaagccacagactcagtctccccaagtcagcaatctctttctctctctctcctcaaacttcatcgcattcatagaagctgcttgcagggtcgccgggctaaccagggtgatcggcgaactttaccgtacagtacctcagtctagctgtcagatcaccccttttgctgtagcctctgttgaggtttttatatttgtgatcattggtaattcagtgtcctatgaagtgggcacagctccccacagagagcaagttgtcagcaggtctctgtgcactggtattggggcagggcagtgccctgggggtaagctaggtggctcagggagtggcagaagggccatttttccctctgccaaaaagacttccttggatttgtagatgttgacccagagtcctctgtcccctcctgaagaggattttcttactggtttctactgaaggggaggtaggggaggaggaaaaaaggaccatgtgtgatgctgttagacaagacactgacgctgattatggagggtctcctgcaggcccttgtgggctccttggcaaggccccaggctgggaaggagctccccccactgcccatcctgcccgctttgtggcgggtagagtcagtgacagggaggcagccctccttttgtgtatatagagtgagctgatttgggctcaggaaaacctagtcgcttgttgctctcgtctgtgacatttttgtacactggtttgctactcatggcaagaaacagacaaagccccatgaaaaataaaacaaaacaaaagtcatttcaaacaaagctgttgttttgaaaactcttgctttcttttggtgtccattttgtgttctattttaaagaatctttcatttatattggtgttattgtagtgaagagaatgtgataggctgatctgtaatggtttctgtcaggagcttagcaaatgcctctgcccctcttcccctacccctgtccttcctcagttcccagctgggattgctatgcactgggcagacccgtcactgtctcccctgaacccccacacagtggcttcccttagaaccagtctttgtactctccctaaacagcagcaggcttaggatttttgtcaggctggttcttgcgtgctctgtgcccccaccagtttgctcacctcttggggcattttgtaatgtgttttctctgtcttgtaaaaccttttgattgtaccgaaatggtatctgcagtcgcctttggaaataaatggtcattaatttgtgtacttagcattctgaattttagtctcaggtgtttctgttgttgaagatccttgaatgaaaaggaaccctcaccatggggcttactgttataatgtttcttcatttactgttattaaaagatttatg

SEQ ID NO: 193701 - DNA, 1928 bp, Homo sapiens
  Payload ID: 18249
  Gene Name: transmembrane protein 165
  Uniprot ID: Q9HC07
  ENST ID: ENST00000381334
  CDS Start-End: 234-1208
gactccagtttagccgccgccggagaggacgggcgccgagccggggctgcggacttcggcctgcccctcacctcactcccgctgcttgcacctcccggatggtgctgactgctccctaagcggcggcggcggcgagtcgtgaggacgcgccgcggaggctgttcggggtcgaggcttcccgtcgccggcacttcctcttgcggcgcccgtgcgcggccggcccggcaggcgggatggcggccgcggctccagggaacggccgcgcatcggcgccccggctgcttctgctctttctggttccgctgctgtgggccccggctgcggtccgggccggcccagatgaagaccttagccaccggaacaaagaaccgccggcgccggcccagcagctgcagccgcagcctgtggctgtgcagggccccgagccggcccgggtcgagaaaatatttacaccagcagctccagttcataccaataaagaagatcctgctacccaaactaatttgggatttatccatgcatttgtcgctgccatatcagttattattgtatctgaattgggtgataagacattttttatagcagccatcatggcaatgcgctataaccgcctgaccgtgctggctggtgcaatgcttgccttgggactaatgacatgcttgtcagttttgtttggctatgccaccacagtcatccccagggtctatacatactatgtttcaactgtattatttgccatttttggcattagaatgcttcgggaaggcttaaagatgagccctgatgagggtcaagaggaactggaagaagttcaagctgaattaaagaagaaagatgaagaatttcaacgaaccaaacttttaaatggaccgggagatgttgaaacgggtacaagcataacagtacctcagaaaaagtggttgcattttatttcacccatttttgttcaagctcttacattaacattcttagcagaatggggtgatcgctctcaactaactacaattgtattggcagctagagaggacccctatggtgtagccgtgggtggaactgtggggcactgcctgtgcacgggattggcagtaattggaggaagaatgatagcacagaaaatctctgtcagaactgtgacaatcataggaggcatcgtttttttggcgtttgcattttctgcactatttataagccctgattctggtttttaacaagctgtttgttcatctatatttagtttaaaataggtagtattatctttctgtacatagtgtacattacaactaaaagtgatggaaaaatactgtattttgtagcactgattttgtgagtttgacccattattatgtctgagatataatcattgattctatttgtaacaaggagttttaaaagaaacctgacttctaagtgtgggtttttcttctctccaacataattatgttaatatggtcctcatttttcttttggtgcagaaccgttgtgcagtggggtctaccatgcaattttctttcagcactgacccctttttaaggaatacaaattttctccttcatcacttaggtgttttaagatgtttaccttaaagtttttcttggggaaagaatgaattaatttctatttcttaaaacatttccctgagccagtaaacagtagtttaatcattggtcttttcaaaactaggtgtttaaaaaaagagacatatatgatattgctgttatatcaataacatggcacaacaagaactgtctgccaggtcattcttcctcttttttttttaattgggtaggacacccaatataaaaacagtcaatatttgacaatgtggaattaccaaattaaaagagaatactatgaatgtattcatattttttctatattgaataaacaatgtaacatagataacaatataaataaaagtggtatgacca

SEQ ID NO: 193702 - DNA, 1657 bp, Homo sapiens
  Payload ID: 18249
  Gene Name: transmembrane protein 165
  ENST ID: ENST00000508404
  CDS Start-End: 228-458
agtttagccgccgccggagaggacgggcgccgagccggggctgcggacttcggcctgcccctcacctcactcccgctgcttgcacctcccggatggtgctgactgctccctaagcggcggcggcggcgagtcgtgaggacgcgccgcggaggctgttcggggtcgaggcttcccgtcgccggcacttcctcttgcggcgcccgtgcgcggccggcccggcaggcgggatggcggccgcggctccagggaacggccgcgcatcggcgccccggctgcttctgctctttctggttccgctgctgtgggccccggctgcggtccgggccggcccagatgaagaccttagccaccggaacaaagaaccgccggcgccggcccagcagctgcagccgcagcctgtggctgtgcagggccccgagccggcccgggtcgagggacatcagtttttttcttggtagcaagctgtagattttgtttcaaggaaagcatcttcatcttctctagtttcatcatgtatagatggagattccgatgcagaaaatatttacaccagcagctccagttcataccaataaagaagatcctgctacccaaactaatttgggatttatccatgcatttgtcgctgccatatcagttattattgtatctgaattgggtgataagacattttttatagcagccatcatggcaatgcgctataaccgcctgaccgtgctggctggtgcaatgcttgccttgggactaatgacatgcttgtcagttttgtttggctatgccaccacagtcatccccagggtctatacatactatgtttcaactgtattatttgccatttttggcattagaatgcttcgggaaggcttaaagatgagccctgatgagggtcaagaggaactggaagaagttcaagctgaattaaagaagaaagatgaagaatttcaacgaaccaaacttttaaatggaccgggagatgttgaaacgggtacaagcataacagtacctcagaaaaagtggttgcattttatttcacccatttttgttcaagctcttacattaacattcttagcagaatggggtgatcgctctcaactaactacaattgtattggcagctagagaggacccctatggtgtagccgtgggtggaactgtggggcactgcctgtgcacgggattggcagtaattggaggaagaatgatagcacagaaaatctctgtcagaactgtgacaatcataggaggcatcgtttttttggcgtttgcattttctgcactatttataagccctgattctggtttttaacaagctgtttgttcatctatatttagtttaaaataggtagtattatctttctgtacatagtgtacattacaactaaaagtgatggaaaaatactgtattttgtagcactgattttgtgagtttgacccattattatgtctgagatataatcattgattctatttgtaacaaggagttttaaaagaaacctgacttctaagtgtgggtttttcttctctccaacataattatgttaatatggtcctcatttttcttttggtgcagaaccgttgtgcagtggggtctaccatgcaattttctttcagcactgacccctttttaaggaatacaaattttctccttcatcacttag

SEQ ID NO: 193703 - DNA, 828 bp, Homo sapiens
  Payload ID: 18249
  Gene Name: transmembrane protein 165
  ENST ID: ENST00000506198
  CDS Start-End: 234-623
gactccagtttagccgccgccggagaggacgggcgccgagccggggctgcggacttcggcctgcccctcacctcactcccgctgcttgcacctcccggatggtgctgactgctccctaagcggcggcggcggcgagtcgtgaggacgcgccgcggaggctgttcggggtcgaggcttcccgtcgccggcacttcctcttgcggcgcccgtgcgcggccggcccggcaggcgggatggcggccgcggctccagggaacggccgcgcatcggcgccccggctgcttctgctctttctggttccgctgctgtgggccccggctgcggtccgggccggcccagatgaagaccttagccaccggaacaaagaaccgccggcgccggcccagcagctgcagccgcagcctgtggctgtgcagggccccgagccggcccgggtcgaggacccctatggtgtagccgtgggtggaactgtggggcactgcctgtgcacgggattggcagtaattggaggaagaatgatagcacagaaaatctctgtcagaactgtgacaatcataggaggcatcgtttttttggcgtttgcattttctgcactatttataagccctgattctggtttttaacaagctgtttgttcatctatatttagtttaaaataggtagtattatctttctgtacatagtgtacattacaactaaaagtgatggaaaaatactgtattttgtagcactgattttgtgagtttgacccattattatgtctgagatataatcattgattctatttgtaacaaggagttttaaaagaaacctgacttctaagtgtgg

SEQ ID NO: 193704 - DNA, 1567 bp, Homo sapiens
  Payload ID: 18249
  Gene Name: transmembrane protein 165
  ENST ID: ENST00000608091
  CDS Start-End: 1-476
ctgtattatttgccatttttggcattagaatgcttcgggaaggcttaaagatgagccctgatgagggtcaagaggaactggaagaagttcaagctgaattaaagaagaaagatgaagaatttcaacgaaccaaacttttaaatggaccgggagatgttgaaacgggtacaagcataacagtacctcagaaaaagtggttgcattttatttcacccatttttgttcaagctcttacattaacattcttagcagaatggggtgatcgctctcaactaactacaattgtattggcagctagagaggacccctatggtgtagccgtgggtggaactgtggggcactgcctgtgcacgggattggcagtaattggaggaagaatgatagcacagaaaatctctgtcagaactggtagtttctctccctggctcatcttgcatgcttgctctgatggaaaaggtcacctggaaaggaactgaggatagccttcagccagcaagaaaccaaggccctcagtccaactgcccatgaggaactgaagtgtgccagcaaccactaagtgaggtggaaacagatgccacctcagttgaactttgagatgactgtggctcccaccaacaccttgattacagcctcatgaaagaatctgaagtagagggtccagctaaactgtgcctggactcttgactcaccaaactaggagataacaagtgtgttgttttatatcactaaattttggagtaagttgttacacagctatagataactaatatactatacttctgacctgatataacaaaaaagaaaccagagttccaattctgactataatttcccagccagtgtctttagggaagatttttttttcccctcttgaaaccccaatttcagtattttcaaagtggggatattacctacccgataaaaatatctgatgtgtaaattatatttcataattcatataaataacctagccagagactagtacatcactgggaataaatggtagttttgagatcagacacatctctcatccaattttctttttagaggcaggtgagactctaaaatattaaattaaaaataagtagtaaagtataatcacatccccgttataagtgaggaaataaagtatttttgaaaaatagttttcctattaattattgagtttcatcttttattggggagaaattaaaaataattttttttaattataagaaacatactttgtcagcagctgtctcaggaagagactcttcaatgccaagttctcgtcgtctttcagccctaacttctgcataactacaaatggaaaaaataatcaaattttagtgtctggtcattcgtttaaaatactgcacagctgtaactattcagtgttgttacgtgtctcatctgttcatctagactatttgctatgtgctacacaaacctaaaatatacctataatgtcttaatttaacttgcatttttctaggtatcttaaagtttcatacactgctgtaaacgatccataaccacacaatacttaaattaagaaaaataaataaaggaagtgtatgcttatcta

SEQ ID NO: 193705 - DNA, 572 bp, Homo sapiens
  Payload ID: 18249
  Gene Name: transmembrane protein 165
  ENST ID: ENST00000506103
  CDS Start-End: 1-82
attaacattcttagcagaatggggtgatcgctctcaactaactacaattgtattggcagctagagaggtgagtgatatttgagaggagactgtttaaaatgaaacgtaattattattactttgttccagaaaacactggacacactgaagtgggccacagcattccttcatatgcaagactgttttacatctgataattcagctgctctctaaaattggccttctcccagttcctgctacctgcaggacccctatggtgtagccgtgggtggaactgtggggcactgcctgtgcacgggattggcagtaattggaggaagaatgatagcacagaaaatctctgtcagaactggtagtttctctccctggctcatcttgcatgcttgctctgatggaaaaggtcacctggaaaggaactgaggatagccttcagccagcaagaaaccaaggccctcagtccaactgcccatgaggaactgaagtgtgccagcaaccactaagtgaggtggaaacagatgccacctcagttgaactttgagatgactgtggctcccaccaacaccttgattaca

SEQ ID NO: 193706 - DNA, 4630 bp, Homo sapiens
  Payload ID: 18250
  Gene Name: transmembrane protein 167A
  Uniprot ID: Q8TBQ9
  ENST ID: ENST00000502346
  CDS Start-End: 174-392
cttttccggtggagaggagcctatcctagtgtcttaaccgcccgtcttggtaggcggtgccgtgacaagcccaaccggacggctggagagggcgagaagggcagacgggacatgcagcctcttccgcctgagccccggaagggtgatgtggctgcggcatcgccggcctcgctatgtctgccattttcaattttcagagtctattgactgtaatcttgctgcttatatgtacctgtgcttatattcgatccttggcacccagcctcctggacagaaataaaactggattgttgggtatattttggaagtgtgccagaattggtgaacggaagagtccttatgttgcagtatgctgtatagtaatggccttcagcatcctcttcatacagtagctggggaaaatgccagaatgtagttgccatcagatttgattgtgaacaaggactgactgcagaaaataatggaaaggatgtttaactcttttatctccgaacattgaatgagataaatttccagatgctgttctctattttaatgttattggaccaatgttctgtataaacaattaagatgtaaccatttaatagtctgtaacaatcaacctcagtactgtcactacaatattacattctgcaaatgttattctgttgtatcagatacaaaattttagtgaggtatctctaaggcacatagtagaaaacaaaattggttaattactcaagttcctttcactgtgatttggaaatgatttaatctttatagaatgagaaccttttttggactagcttttttattaaaatggctcaatttgtgttgataaggattgcattaatatttaatagtgcttgcttttcctctgggcacaccattttgatcattaaccagagtacctctactcttagcaaactctagtttatgacaagtatttaaaatatttaaaacaagcttatgcagttcttaaggacgaaggtaaatgagatgtaacttaaaaatagtattgggaaaatgttgatagttaacattagtggatttagactagccaaatgacatagtaggctctgaaacatcttgtcaagtatatgtattttgtgcatgaatttttgctggaaagctgtctttctctgaaaaacacaacgttcttagaatgaaaagaacaattataaaataattatcctatatgtgtttttcattctttttagtgtcatggcttcaaaaatgaaacatttattttaattgccgtaaaggaactgtatttttgttttgttttttaacacagcactttaaatccagtttgtgttttgtcaacttgaactggaatctcttttgttactttggaggtgataaatagttttcaaatctgctgatttgtatactgtggcacaagtatctttgaactttgatagtgaaaggagaccttcaacaatttttagtctaggcgagaggaatattaggaatgtgacttctaaattttacaatagagcagttattttaaggtcatggttaacatttcttaaggttcaactaaaattcagttaaaatttcagagctacgaggaacttaaatcttagctaaaaattacctgttgtagatagtattaattagattgtttgcagctattaattcatcataaagataaaatgaagaaactctccctttttttaaacaaaaaaaattatttctagattaataggctagtagttatttctgcagaaacaacgtatggaactgaaagccacctatttttattttagactaatttaaaccacttggaatggattctaggaaacatcttaagcttgtgtgttgcctgtggtggttttttgtttgggggtgttttttggttttggtttgattttctgtattttgttatctggggattttttgtttgtttgttttggtttggttttggttttatatttttggcatgtctatggcagttaaaagtggtatattttgctttagatagggaatcaggttataatcattgttcttcctctaaactgcctcttgggctttacatcaggtcaaggatttttagggtttctcaaaaataggattcttgtcagtgtatgcatgctgagtaagtcacctttctggctctaatttctgggtggccatctgttgtccagctctgctgccaactggactttccgaaagccatgtcaactaattttttatatgctaagacaaatcgaatatgaaaagaggaagaatattctagatattctaagacatttcttaatttggcatctcagaggaggtaggtggaaagtaaaggaagagataattttgggggaaaatttgtggaaacatacaaaacgttttgctttgtatagatgctaaacagagtgggaggcagcatatttgtaacaacaaccattctgaccttttgaaacacaagcttttggagaagtcagggagagacacagtatgaataaaagcaattaacattttctttaatgtatatttttcaaagaggaccacggaatcctgttctctaacccaaggggcagtgtaggtggttttaagcccacagaatattgagatatttctcttgtggttttggtggggtggtgggatgcagaaggttattaaagatcaatttaagcatcagatagactatcccttttatttttttaacttttaggttcaggggtacatgtgcaggttgttatataggtaaactcatgtcaagtggttttgttgtacagattattttgtcacccaggtgctaagcctagtacccagtagttattttccctgctcttctccctcctcccaccctccaccctcaagtaggccccagtgtctgttgttcctttctttgtgtccttgagttctcatcatttagctcctacttctaaatgagaacatgtatttggttttctgttctgtgttagtttgctaaggataatggcctccagctcagatggaatatctctatcatatagacctgttgttacagggcaggatcggatgatggacactgaagtcctcagcttgctaagttcagttgctctccctagcctccttttggcttcagagtcttttgattccatctatcctggtattttttgtgtgctgatgtttagttctggattggcttcagctgtgctaataggaagggcgttgtcttttcaagcaatcttaaaaggtggtcaatcaaaaggccagagtctgaatcccttctgtggcttaaataatttgaggatcaagtccagtgtcttgttaatccctgttctactgtgccagacactatcttgaatgcttttatatgttcaggttcaaaatcgctctttcataccaggggatgatagtaacgtgtaacttgcaatagattccttcatcttagtaataagatgatcagtctagttaggacaaaatagagattgaataaattaacttttccaagtttacagagtaaaaatgagcagatctctgcctggttttgtgaaaaagagttagcactggtaaatagaatatttctactcctacaccattctttcagtatatcatcactgaagacaggaagataggcacacagattcttcctcgtagtaattcatagtgcactaggtgaaagagatgaagtatgtattaaaagtacaatgtgatggcatttattattcagataatcccaggattctagaagaaaataaagaagagtgacagttcagttagggtgtgaacttccagaggagcactgcttaagctgaacttgagagcattgtgcaaaagcacagtagtctgttaagaactagaaataacctagcttgtgccacttcgggagtattaagacataagcctagaaaggtaggcaaaggttagatcttagactgtcttgtatttttctcattcctgttgattacctacctcaaaattgaatatgtttttcctcctgcctaacacaaaactactcaagggcagaaatttaaattcttccttggtgtatgtgcaaagaaggttgaatatattcatgcctaccttattttggactaggaatacagtagtatactttccgaagacttgcctgaatagtatataaggtggaggcaactgactagttaggtcagtatttttagaaactcttaatagctcatactcttgataccaaaagcagccctgattgttaaagcacacacctgcacaagaagcagtgatggttgcatttacatttcctgggtgcacaaaaaaaaattctcaaaaagcaaggacttacgctttttgcaaagcctttgagaagttactggatcataggaagcttataacaagaatggaagattcttaaataactcactttctttggtatccagtaacagtagatgttcaaaatatgtagctgattaataccagcattgtgaacgctgtacaaccttgtggttattactaagcaagttactactagcttctgaaaagtagcttcataattaatgttatttatacactgccttccatgacttttactttgccctaagctaatctccaaaatctgaaatgctactccaatatcagaaaaaaagggggaggtggaattatatttcctgtgattttaagagtacagagaatcatgcacatctctgattagttcatatatgtctagtgtgtaataaaagtcaagatgaactctcaa

SEQ ID NO: 193707 - DNA, 3730 bp, Homo sapiens
  Payload ID: 18251
  Gene Name: transmembrane protein 167B
  Uniprot ID: Q9NRX6
  ENST ID: ENST00000338272
  CDS Start-End: 1071-1295
cgacgacgtggtgctttaggatctgaaagatgcgacttggtttttgttgttgttgttgttgttgttgttgtttttgagacggagtttccgctcttgttgcccaggctggagtgcaatggcgcgatctcggctcaccgcaacctccgcctcccaggttcaagcgattctcctgcctcggcctcccgagtagctgggattacattacaggcatgagccaccatgcccggctaattttgtatttgtagtagagacggggtttctccatgttggtcaggctggtctcgaactacgatctcaggtgatccgcctgcctcggcctcctaaagtgcttagattacaggcatgagccaccgcgcccggctaattttgtatgtttagtagagacggggtttctccttgttggtcaggctggtctcgaactccgacctcaggtgatccgcctggctcggcctcccaaagtgctgggattacaggcgtgaaccaccgcgcccggccgcgacttgtttttgttacaaggttcctcatttcatttgcaacgttcagacgcagtctgactagatttccatccggagtaaggaagagcagctcaagggcagtcacggaggccgcaggtgcggcttcttcacccgcggtgctggagttctctcaagtggaagcccaggacgatgaaaacctcataggtaggctgctgcttacacacagcagccgccacggcgcaaaataaactacaaaactacaagcctttaccttttcaaacacactgacgcgggccagccccagccctacgcccgcaggggcacgcagaaaagacttagttaccacggccaagtacgaagccttcgagatagcgttcttcttaccctacgtaaacacgcagtttcccgagctcgacaatcggctagccactcctgatagcgttcggcgctcgcctctcggcccttgctcctgcgtactacggcttcttccagtcacctcggcccggatcgggaagtgtcaagcgggcgctcccccatctccgccgctattaccactgaacccggaccccctacccaggtccagggccagccgccatgacgaacgtgtactccttggatgggattctggtgtttggtttgctctttgtttgcacctgtgcctacttcaagaaagtacctcgtctcaaaacctggctgctatcagagaagaagggtgtttggggtgtgttttacaaagccgctgtgattggaaccaggctgcatgctgctgtggcaattgcttgtgttgtaatggccttttacgtcctgtttataaaatgaattccaaagcacccaagtcatcaactgccaaccaaggggacggggatgaagaacctgttggagacctgaacccagtgtaggagagttcagctgaaatcatcggtccccaggatgacaccacagcatctgcccctgctatatgtggggaaaactcatggtcacgaacattatttatgcttcaggggactacagaaagccagcttcctttgatctatgtgtaaatcagtccttggcagagtgcatataatgtccggataaattacacccctcggtgataagattacatacctccttcataaaaacctgtcatcctgttttgttcttcagctcctcatcaggatcttttcaaactgaggctcattagggaaggaactaggctgtgttcagacttcttttgaagagagagaattttcaagacttcttttcactctttgatttggatctggcaaattggggaggggatgctgggtgggaaacagttatgaaatgccaagaaattctttggctttagaaatttatctttcatgtacccatccgggaacataaaagagaggcatagtgctcattgcaaaaagagaacagatgaagtagctgtgttatgtgctggtatcttgagagttttgccaagaaaatctgggcctacataaaatttgagaattatctgtgtgatgagaccagaaagcagtggcttagacaagaaaaaatctttctgttcaccagtatcctcaaatggagacttcacttgatcagatggtatatgaaaaatgaatcaactattgctatttcgtaaaacctttttatattttctaaatttacttagtgctaaatactgttactcagttttaaatgccacgactaggggaaaaagaaactattgaagaaataattgtttagtatatttgcagttggggtagaagaaagaaatctagtatattgattcatatactagtaaattcatctagtataagaacttgtgatgttagattgaagttttgtcatcttataaaagacaacaaacttattttctgtttaagtctgagtgttatggcaatttttagttgattacttatttttcttagccaaattttaattttcttcatattgcattgctctttagttgtctctggaaattctatttactttaaggacatgagaaattcaaatgagagaagttgctgatattcatcagtgtgtttggacagttcatagggtccacaaatcaaatgaggttgtttcctgaagtagaagaaaacagaactttgcaattgatactgaagtactttgccatggagttagtaactcctgagcagaccattttagatggctcagcatttggcaggaagacttctccattccctgcttatatctatggaaggatcagctgttggatgtctagaacttctctatttaaaaaaaaagagtaggtctaaaattaaattattataagcaagcatagacatgggtcttccagttgaattgtccattaccgtaaaacttaatggtggacaagttagctgtggttgattcctgtgtggcagtaaattgtcttctgtctgcttactccaaataataaaagctgctaggaagtttagattttgaaataggcagtttaatgctttgagggtttctagaaatacagaaagtcatcaagtaaacactgcatgtctaatcatctcagagttgtggctgttatctcttcaggaattggtccacagggtaaatttcaacaattcatacgttttccattgtcatttctgaggacctttgagatgagagaaaggaaatctagtggaacaggaaagagagttacaccttgtgggtgtgagtttgggacctgttggcagaagggaatgtcactccctggaaacaggttcagcatgtttgcacttgttattttgtagctttaatgatttttgttttctaatagggcaaatgtctctaagcttggtgtttagagctgcttcatattttaaactagttccattccacagttctagttcaaaccagtttttacagcctcctgggtgggtcgtcttgacccaaactcttgtgttgttacattttgagaggttttcataccagaatgtaccaaaaagtgcacaaggtaaaggtaatttacagccagaaacaaatatacatttgtttcatttcttgactttccctaagcagataagcagaaacttgtttaactcattactttgtttgatgtgtcttacatatttttgactaaaagttatagaatgttattcctctgggggaatcttttacaggtggaggaatggggatagcagtattgcctcagattcaaactggcatcaccataaaccctgtaggccagggtggaatgaagtcagctcctttttatagttgaaatacaattttttattcaccattgtctgcacaaatccttgaaaataaacctttttttccctaca

SEQ ID NO: 193708 - DNA, 7470 bp, Homo sapiens
  Payload ID: 18252
  Gene Name: transmembrane protein 168
  Uniprot ID: Q9H0V1
  ENST ID: ENST00000312814
  CDS Start-End: 562-2655
gttctcagctgctgattccaggtcccaggagtcgactttggcttgaggaaggcaggcgccttaggtggggcagttgacactcgcgcagcgccttgctcacctgagtgtgtggcggcgcgcgggtttgggcggggagggggccgggcctcgggaaggaggcgcgccgcgcagtttgaccccggcggcgttccgtaccgtcgcggatttcggcggcggaaacatggcggtcgcggccgggccggtaacggagaaagtttacgccgacactggcctgtattagcgcgtatggcctcgggccctcgttccccaaggcgtgccgcctccctgttctcagtcgcaggctgaagccttgtctgctctcctcctttttggtttggttttggaactgactccgagggttgggagagcgcgttggtggcgacggccgagtcagatcactataaacaaaatttccacaagagaaaatgttgaaataggagttgcggatacattggatatactggatgaaatacaagcggttaatttttgtaacgtgagggaaaagcccacattgctggttacatgtgtaaatcactgcgttattgctttagtcattgtctctatttagcaatgacaagactggaagaagtaaatagagaagtgaacatgcattcttcagtgcggtatcttggctatttagccagaatcaatttattggttgctatatgcttaggtctatacgtaagatgggaaaaaacagcaaattccttaattttggtaatttttattcttggtctttttgttcttggaatcgccagcatactctattactatttttcaatggaagcagcaagtttaagtctctccaatctttggtttggattcttgcttggcctcctatgttttcttgataattcatcctttaaaaatgatgtaaaagaagaatcaaccaaatatttgcttctaacatccatagtgttaaggatattgtgctctctggtggagagaatttctggttatgtccgtcatcggcccactttactaaccacagttgaatttctggagcttgttggatttgccattgccagcacaactatgttggtggagaagtctctgagtgtcattttgcttgttgtagctctggctatgctgattattgatctgagaatgaaatctttcttagctattccaaacttagttatttttgcagttttgttatttttttcctcattggaaactcccaaaaatccgattgcttttgcgtgtttttttatttgcctgataactgatcctttccttgacatttattttagtggactttcagtaactgaaagatggaaaccctttttgtaccgtggaagaatttgcagaagactttcagtcgtttttgctggaatgattgagcttacattttttattctttccgcattcaaacttagagacactcacctctggtattttgtaatacctggcttttccatttttggaattttctggatgatttgtcatattatttttcttttaactctttggggattccataccaaattaaatgactgccataaagtatattttactcacaggacagattacaatagccttgatagaatcatggcatccaaagggatgcgccatttttgcttgatttcagagcagttggtgttctttagtcttcttgcaacagcgattttgggagcagtttcctggcagccaacaaatggaattttcttgagcatgtttctaatcgttttgccattggaatccatggctcatgggctcttccatgaattgggtaactgtttaggaggaacatctgttggatatgctattgtgattcccaccaacttctgcagtcctgatggtcagccaacactgcttcccccagaacatgtacaggagttaaatttgaggtctactggcatgctcaatgctatccaaagattttttgcatatcatatgattgagacctatggatgtgactattccacaagtggactgtcatttgatactctgcattccaaactaaaagctttcctcgaacttcggacagtggatggacccagacatgatacgtatattttgtattacagtgggcacacccatggtacaggagagtgggctctagcaggtggagatacactacgccttgacacacttatagaatggtggagagaaaagaatggttccttttgttcccggcttattatcgtattagacagcgaaaattcaaccccttgggtgaaagaagtgaggaaaattaatgaccagtatattgcagtgcaaggagcagagttgataaaaacagtagatattgaagaagctgacccgccacagctaggtgactttacaaaagactgggtagaatataactgcaactccagtaataacatctgctggactgaaaagggacgcacagtgaaagcagtatatggtgtgtcaaaacggtggagtgactacactctgcatttgccaacgggaagcgatgtggccaagcactggatgttacactttcctcgtattacatatcccctagtgcatttggcaaattggttatgcggtctgaaccttttttggatctgcaaaacttgttttaggtgcttgaaaagattaaaaatgagttggtttcttcctactgtgctggacacaggacaaggcttcaaacttgtcaaatcttaatttggaccccaaagcgggatattaataagcactcatactaccaattatcactaacttgccattttttgtatgctgtatttttatttgtggaaaataccttgctacttctgtagctgctctcactttgtcttttcttaagtaattatggtatatataaggcgttgggaaaaaacattttataatgaaagtatgtagggagtcaaatgcttactgtaaatgcataagagacgttaaaaataacactgcactttcaggaatgtttgcttatggtcctgattagaaagaaacagttgtctatgctctgcaatggtcaatgatgaattactaatgccttattttctaggcatataataatagtttagagaatgtagaccagataaatttgtttactgttttaagaaaactaccagtttacttacagaagattcttttttccaaacagtaggtttcatccaagaccatttgaagaactgcaaactctttctcttagaaaagaaagagggcagcctaaaataaacgcaaaatttgcttatactccatcacattcagatgtcttggttgtgacttattaccagtgtggcagagaacccaagttacattttagatcaaaatattctttatgtaggtattgttaaaaggctagagcctacaagttgctcttccatgcgttggtcagggggccctgaaaacactggtaatattaagagtctttctcagggtaacttaatgttttcttaatgaacagtgtttccagctacaaattcttccaataaattgtcttcctttttgaaaagtactctcatagaagaaatttagcaatttctcgttgactgactcagtctattttaagtattcagaaaagattttgatccccattgagttaatgctctgccttgaaaattatttttctgatccttgttagtgataacattttttttctactgaaggtcagaggataggaaacaagtatttctcttctggtatacatgtaatgtattctgtaaaaaagtattcatattggcaattttagttaggcataatattgtggttgtaatttttaaaacttagtgttttgtctgattaaagcaggcactgatcagggtatctcctaagaggtaattcacttcttattcctttccaataattattacattctaaattttcatctatgagaaataacaaacaagaagggaatagaattaaattggggtataatctaatcttcattgtttaaatggtttgccttctcaccattgaagccatttttttatagcctcagaaagaggaaataatgcctccaccattttctacctggtgacttgaaaattgaacttttaagttaggaagaagttagagtcagggaacttgtataccactatctatgcagcattgttatagtctgattatttctgtgttttgaatatgattttcctaatgctctaaataaaattttgttaaaaattaattttttatttaatgatgtgcaaatattgaatattttagtatatttattaaaagtggtagtcattaaaaatgcccatgttttagagttcatgtttggaagtttccattataggttaaggatttatattagtattgtccaaataaaatagtatagttttttttattgctctgttcagcagtagggtagtagaaaagccaaatgttaaaattatgagcttttagcttaaaaaaagttaatgttaagtaaaatctccttttaaatttctcagctatttgtgagcaggttagctttaaagcattatctcttcactttaagaaagccaaatacaaaagtatattctgcattctttataaggtagtattaaggtggtactaaaaattacattttaaaaacagctgacagtttgacagccacaaacctaactttttcatatgtatttcctgtgaaagtaaaaccaaaaatggtctttgggccaagaatgtgacttgagccaatttgttaaccaaaaatttatagaatgtccactttgatgaattctcctacccaaacaaacaaaaaacaataaatgactttttgggatggtatcacaaagctaacattttaaaaacaataactaggccgggtgcagtggctcacgcctgtaatcccagcactttgggaggcctaggtgggtggatcacttgaggccaggagtttgagaccagcctggccaacatggggaaacctcatcgctactaaaaatacaaaaaaaattattagccgggcatggtggcaggtgcctgtaatcccagctacttgggaggctaaggcacaagaatcgcttgaacccgggaggcagaggttgcagtgagctgagattgtgccactgcactccagcctgggcgacagagcaggactctttctttgtctcaaaaaaaaaaaaaagtacatgtttagccaggcatggtggctcatgcctgtaatcccagcactttgggaggccgaggcaggtggatcaaaaggtcaagagatggagaccatctggccaacatggtgaaaccccatctctactaaaaataaaaaaatcagctgggcgtggtggtgcacgcctgtagtcccatctacttgggagactgaggcaggagaatctcttgaaccggggaggcagaggttgcagtgagccgagattgcgccactgcactccagcctggcaacagagagagactccatctcaaaaaaaaaaagaaacaaacaaaaaaaataataagggtgtagaaaagaaatattacaagaagaataaagtgattggttactttcacctaaagattgaaaaatagatctgacaatgagactaatttgtctatggctgtcatgtttaagaaagagttgcttggagtgaaaggaattattttagggcaaaactttaccattctactaaaaagaggtaacatggagattttttcaacataactttgtttagtatttgtttcctcatgtgataccttgctaaaaccacaaaaccactagctctaaaaacatcatcttttttttcaatagaataaaaaaaacagtatgaatttattttctttttttaaccattatttatttattttaattttattattattatactttaagttttagggtacatgtgcaaatagcatacacactgttgcaaaataaataaggagccaagttctttctctccccatgacttttcagttatgccatcattttattcaaaaatttttagtttgctctgatctaaactcttccctgggaaacttggggttatatttccatagaattctgtcttgctcttaataaattcaaaattctttggaaaagatgcatttcagaggattattcttatgaccagttatgctttaaaaaaattaaagtcttaattaaaatgcacttatatttaatgcattagtgggtagatttttgttttgagtaaaatctttattagaatctatttgtaactggatattttgtaattttgggctcaaacatatttactcttgggtactgcttttttatatgtattcaaatttatagcttagtctcttttaaagtaatattctacattactttcccacaagtgatgatagttaatataatgtatgccagaagaaaatgatttaattttaagaatgtgattagatatatttgacagtaagtgctcaaaggagttagatctgtcagtactttcgaatgtctcctgtattggaaactattagactgtcacctctttttaggcagaggcttacacatgttggtatttctggtacacagttaccgagaagagtgccttgtccgtaatgagaagcatttaataaatattttggactgagtgaataaatctagaatcctaaggagaaattggaataacttgattgtaaattactacattttctttagttttacttaaatggatattatttcaagatcttcattaagcaagtaatttagtaaaaaacttacagaatccataaaaagaaagcaaatctcaaatttgtagttaagagtaataagtgttaagattagggaaggaaaaactgtttcagaactggtttgaatgaaaacatagctgatgttgccaaaaaatggctttttgtgagttgagtccatttccatcatgactctaatatcattaagattgaatcattcatttcctcactattatatctagacagattggaaatttaccagaaatggaaattattaaaagtctgactgatgaacaaagaaggaatttgactatgcatatcagtgacaactaaattggaaggtcagtaaaataggcctataagcataagcaggttaaggacaagctagggaaactataagtatctccttttttatattgtcttacctattcactaattataacacatagaaacaatataaaacgatgaagtttaagcagtaattgttttgagaaaccattctgttgataatttacatttatgtttattaggaaatattgttattattacttagaccaaagttgactgaaaattgaaaactgtgggctacccgtaaggttttttgctttgaaatattcaatacctaaaagccattttgattttaaaaatgaagttgaccagtcatcttgtatgatgacctcataatattttataagtttgaacttaaaatagttagaagtagacagttttagtaagcttttgtttttatttggtctagcctaaaagacattgatttatctcaaagatttttagcagtgtgcaagggacaaatgagtatgacatagcttcctagacaagcagtgttcactcaatgccaagtaaacttttctaagttcaaaaatatttttatattaaaacacataccaatgtattgatgaa

SEQ ID NO: 193709 - DNA, 2659 bp, Homo sapiens
  Payload ID: 18252
  Gene Name: transmembrane protein 168
  Uniprot ID: Q9H0V1
  ENST ID: ENST00000454074
  CDS Start-End: 454-2547
gcggatttcggcggcggaaacatggcggtcgcggccgggccggtaacggagaaagtttacgccgacactggcctgtattagcgcgtatggcctcgggccctcgttccccaaggcgtgccgcctccctgttctcagtcgcaggctgaagccttgtctgctctcctcctttttggtttggttttggaactgactccgagggttgggagagcgcgttggtggcgacggccgagtcaggctgtcttttgaagaagatcagaatggggaagagttttgtaaattagccatttaaaaacaatctgccatgttgattttggtccataggaagatcactataaacaaaatttccacaagagaaaatgttgaaataggagttgcggatacattggatatactggatgaaatacaagcggttaatttttgtaacgtgagggaaaagcccacattgctggttacatgtgtaaatcactgcgttattgctttagtcattgtctctatttagcaatgacaagactggaagaagtaaatagagaagtgaacatgcattcttcagtgcggtatcttggctatttagccagaatcaatttattggttgctatatgcttaggtctatacgtaagatgggaaaaaacagcaaattccttaattttggtaatttttattcttggtctttttgttcttggaatcgccagcatactctattactatttttcaatggaagcagcaagtttaagtctctccaatctttggtttggattcttgcttggcctcctatgttttcttgataattcatcctttaaaaatgatgtaaaagaagaatcaaccaaatatttgcttctaacatccatagtgttaaggatattgtgctctctggtggagagaatttctggttatgtccgtcatcggcccactttactaaccacagttgaatttctggagcttgttggatttgccattgccagcacaactatgttggtggagaagtctctgagtgtcattttgcttgttgtagctctggctatgctgattattgatctgagaatgaaatctttcttagctattccaaacttagttatttttgcagttttgttatttttttcctcattggaaactcccaaaaatccgattgcttttgcgtgtttttttatttgcctgataactgatcctttccttgacatttattttagtggactttcagtaactgaaagatggaaaccctttttgtaccgtggaagaatttgcagaagactttcagtcgtttttgctggaatgattgagcttacattttttattctttccgcattcaaacttagagacactcacctctggtattttgtaatacctggcttttccatttttggaattttctggatgatttgtcatattatttttcttttaactctttggggattccataccaaattaaatgactgccataaagtatattttactcacaggacagattacaatagccttgatagaatcatggcatccaaagggatgcgccatttttgcttgatttcagagcagttggtgttctttagtcttcttgcaacagcgattttgggagcagtttcctggcagccaacaaatggaattttcttgagcatgtttctaatcgttttgccattggaatccatggctcatgggctcttccatgaattgggtaactgtttaggaggaacatctgttggatatgctattgtgattcccaccaacttctgcagtcctgatggtcagccaacactgcttcccccagaacatgtacaggagttaaatttgaggtctactggcatgctcaatgctatccaaagattttttgcatatcatatgattgagacctatggatgtgactattccacaagtggactgtcatttgatactctgcattccaaactaaaagctttcctcgaacttcggacagtggatggacccagacatgatacgtatattttgtattacagtgggcacacccatggtacaggagagtgggctctagcaggtggagatacactacgccttgacacacttatagaatggtggagagaaaagaatggttccttttgttcccggcttattatcgtattagacagcgaaaattcaaccccttgggtgaaagaagtgaggaaaattaatgaccagtatattgcagtgcaaggagcagagttgataaaaacagtagatattgaagaagctgacccgccacagctaggtgactttacaaaagactgggtagaatataactgcaactccagtaataacatctgctggactgaaaagggacgcacagtgaaagcagtatatggtgtgtcaaaacggtggagtgactacactctgcatttgccaacgggaagcgatgtggccaagcactggatgttacactttcctcgtattacatatcccctagtgcatttggcaaattggttatgcggtctgaaccttttttggatctgcaaaacttgttttaggtgcttgaaaagattaaaaatgagttggtttcttcctactgtgctggacacaggacaaggcttcaaacttgtcaaatcttaatttggaccccaaagcgggatattaataagcactcatactaccaattatcactaacttgccattttttgtatgctgtatttttatttgtggaaaataccttgctacttctgta

SEQ ID NO: 193710 - DNA, 799 bp, Homo sapiens
  Payload ID: 18252
  Gene Name: transmembrane protein 168
  ENST ID: ENST00000418785
  CDS Start-End: 1-777
ttctttagtcttcttgcaacagcgattttgggagcagtttcctggcagccaacaaatggaattttcttgagcatgtttctaatcgttttgccattggaatccatggctcatgggctcttccatgaattgggtaactgtttaggaggaacatctgttggatatgctattgtgattcccaccaacttctgcagtgggcacacccatggtacaggagagtgggctctagcaggtggagatacactacgccttgacacacttatagaatggtggagagaaaagaatggttccttttgttcccggcttattatcgtattagacagcgaaaattcaaccccttgggtgaaagaagtgaggaaaattaatgaccagtatattgcagtgcaaggagcagagttgataaaaacagtagatattgaagaagctgacccgccacagctaggtgactttacaaaagactgggtagaatataactgcaactccagtaataacatctgctggactgaaaagggacgcacagtgaaagcagtatatggtgtgtcaaaacggtggagtgactacactctgcatttgccaacgggaagcgatgtggccaagcactggatgttacactttcctcgtattacatatcccctagtgcatttggcaaattggttatgcggtctgaaccttttttggatctgcaaaacttgttttaggtgcttgaaaagattaaaaatgagttggtttcttcctactgtgctggacacaggacaaggcttcaaacttgtcaaatcttaatttggaccccaaagcgggatat

SEQ ID NO: 193711 - DNA, 775 bp, Homo sapiens
  Payload ID: 18252
  Gene Name: transmembrane protein 168
  ENST ID: ENST00000449743
  CDS Start-End: 403-775
cggaaacatggcggtcgcggccgggccggtaacggagaaagtttacgccgacactggcctgtattagcgcgtatggcctcgggccctcgttccccaaggcgtgccgcctccctgttctcagtcgcaggctgaagccttgtctgctctcctcctttttggtttggttttggaactgactccgagggttgggagagcgcgttggtggcgacggccgagtcagatcactataaacaaaatttccacaagagaaaatgttgaaataggagttgcggatacattggatatactggatgaaatacaagcggttaatttttgtaacagcagttggtgttctttagtcttcttgcaacagcgattttgggagcagtttcctggcagccaacaaatggaattttcttgagcatgtttctaatcgttttgccattggaatccatggctcatgggctcttccatgaattgggtaactgtttaggaggaacatctgttggatatgctattgtgattcccaccaacttctgcagtcctgatggtcagccaacactgcttcccccagaacatgtacaggagttaaatttgaggtctactggcatgctcaatgctatccaaagattttttgcatatcatatgattgagacctatggatgtgactattccacaagtggactgtcatttgatactctgcattccaaactaaaagctttcctcgaacttcggacagtggatggacccagacatgatacgtatattttgtattacagtgggcacacccatggta

SEQ ID NO: 193712 - DNA, 1291 bp, Homo sapiens
  Payload ID: 18252
  Gene Name: transmembrane protein 168
  Uniprot ID: Q9H0V1
  ENST ID: ENST00000447395
  CDS Start-End: 289-1230
agtttgaccccggcggcgttccgtaccgtcgcggatttcggcggcggaaacatggcggtcgcggccgggccggtaacggagaaagtttacgccgacactggcctgtattagcgcgtatggcctcgggccctcgttccccaaggcgtgccgcctccctgttctcagtcgcaggctgaagccttgtctgctctcctcctttttggtttggttttggaactgactccgagggttgggagagcgcgttggtggcgacggccgagtcagccaacaaatggaattttcttgagcatgtttctaatcgttttgccattggaatccatggctcatgggctcttccatgaattgggtaactgtttaggaggaacatctgttggatatgctattgtgattcccaccaacttctgcagtcctgatggtcagccaacactgcttcccccagaacatgtacaggagttaaatttgaggtctactggcatgctcaatgctatccaaagattttttgcatatcatatgattgagacctatggatgtgactattccacaagtggactgtcatttgatactctgcattccaaactaaaagctttcctcgaacttcggacagtggatggacccagacatgatacgtatattttgtattacagtgggcacacccatggtacaggagagtgggctctagcaggtggagatacactacgccttgacacacttatagaatggtggagagaaaagaatggttccttttgttcccggcttattatcgtattagacagcgaaaattcaaccccttgggtgaaagaagtgaggaaaattaatgaccagtatattgcagtgcaaggagcagagttgataaaaacagtagatattgaagaagctgacccgccacagctaggtgactttacaaaagactgggtagaatataactgcaactccagtaataacatctgctggactgaaaagggacgcacagtgaaagcagtatatggtgtgtcaaaacggtggagtgactacactctgcatttgccaacgggaagcgatgtggccaagcactggatgttacactttcctcgtattacatatcccctagtgcatttggcaaattggttatgcggtctgaaccttttttggatctgcaaaacttgttttaggtgcttgaaaagattaaaaatgagttggtttcttcctactgtgctggacacaggacaaggcttcaaacttgtcaaatcttaatttggaccccaaagcgggatattaataagcactcatactaccaattatcactaacttgcca

SEQ ID NO: 193713 - DNA, 570 bp, Homo sapiens
  Payload ID: 18252
  Gene Name: transmembrane protein 168
  ENST ID: ENST00000441474
  CDS Start-End: 234-570
gatttcggcggcggaaacatggcggtcgcggccgggccggtaacggagaaagtttacgccgacactggcctgtattagcgcgtatggcctcgggccctcgttccccaaggcgtgccgcctccctgttctcagtcgcaggctgaagccttgtctgctctcctcctttttggtttggttttggaactgactccgagggttgggagagcgcgttggtggcgacggccgagtcagggatgcgccatttttgcttgatttcagagcagttggtgttctttagtcttcttgcaacagcgattttgggagcagtttcctggcagccaacaaatggaattttcttgagcatgtttctaatcgttttgccattggaatccatggctcatgggctcttccatgaattgggtaactgtttaggaggaacatctgttggatatgctattgtgattcccaccaacttctgcagtcctgatggtcagccaacactgcttcccccagaacatgtacaggagttaaatttgaggtctactggcatgctcaatgctatccaaagattttttgcatatcatatgattg

SEQ ID NO: 193714 - DNA, 3342 bp, Homo sapiens
  Payload ID: 18253
  Gene Name: transmembrane protein 169
  Uniprot ID: Q96HH4
  ENST ID: ENST00000295658
  CDS Start-End: 208-1101
ggcaaagccgcatcctcccggagcagaaccgctccccgccggctgtccgcaacctccgccagcgtcggtccctgggcaggtgtggaatgcatccttgggacatctttgcatagccccatctaggaagaagttctgtgatgtgtgaactgtgagtttactcaaacaagtccaactctttataagacataggtagacgtcaggtctggaatggaagagccaacagcagtagaaggccaggtccagcttccaagcccccaccagggctctctcaggaaggctgtggctgctgccctggcgctggatggggaatccacaatggggcacaggaaaaagaagaggaaagagtcacgcccagaatccatcatcatctaccgctcagacaatgagaaaacagatgaggagcccggagaatcagaaggtggagatcagcctaaagaggaggagggagatgatttcctagactatcctgtggatgatgatatgtggaacctgcctctggacagccgctacgtcaccttaactgggaccatcacacgagggaagaaaaagggtcagatggtggacatccatgtcacattgacagagaaagagctgcaggaactgaccaaacctaaagagtcatcaagggaaacgacgcctgaaggaagaatggcctgccagatgggagctgaccgtgggccccatgtggtcctctggacgctgatctgcctgcctgtggttttcatcctttcttttgttgtctctttctactacggcactatcacctggtacaacatcttcctcgtgtataatgaggaaaggaccttctggcacaagatctcgtattgcccttgcctcgttctcttctatccagtgctcatcatggccatggcttcttccctcggcctctacgctgctgtggtccagctctcgtggtcctgggaagcatggtggcaagctgcccgggacatggagaaaggcttctgtggctggctctgcagcaagctgggtctggaggactgttctccctacagcattgtggagttgcttgaatccgacaatatctcaagcactctctccaacaaggaccccatccaagaagtagaaacctccacggtctaaactcccaacaacttactccctcctctggccccagtagcctatatatcatcttaaaattccagcagattatttctttaaattaccccctactctccgcagttcttctgggaaatcagagtccatactgatcagttttaccatcttgagggttccaggagggcatggagcagacaagcaattgtgccaaagcagttcacccaatggacaaactctttttgattccctgccctaaaatcaccatttatttaggacaatggaactctgctgtgtgtcgttttgggagcctggaagtgttactggtgcctggaactgaggggagtatgtgactaaatgtgtcagggagaataaagaacctcggggtaaccaaatccaccaagataatagacagggatggagtgagacatttaggaagctggactaccacagtgtagcagaaggtaaagatttgtgtgtatcatttagatttagatttagctgcatagaattaaaaccctaaaatatcagtggcttaaacaagatagaagtgtatttctttcttgtgcagaagaagtctggaggcagaccatcctgggaccctgtgaagtaatccaggtcccaggcttcttctatttctctaccattagtaggatgtgacccttctcacccttatccccaacatcccagtgctgattacatcttcagccatcacatccatgtttctgataaaatagaggaaagggcagagaagcacacacccttcctgttcaaggagacttcccagaagtcccactcgattcttcttatatctcattggcaagacctcagtcacatgatgtcatgagcaaaagaggctggaaatgtagttgtttggctgggtagctatattctcagctaaatactgggttcacgctaattggcaagaaaaaggaagaatggttatttgggttttgttttgttttgttttgtttcgctttagagacggagtctcactctgttgccgaggctggagtgcagtggcactatctcggctcactgcaaccttcgcctcctgggttcaagcaattcttgtgccttggcctccccagtagctgggattacaggtgcgtgccaccatacccggctaatttttgtattttttttttagtagagatggggtttcaccatgtgcccaggctggtcttgaactcctgacctcaggtgatccgcctgcctcggcctcccaaaatgctgggattgtaggcaagaatggttatcttggtaggcaagtcagaatctttgcctcacaatgatcatttaaatacattcagaacccccaaactgctaatatggttttatttatttatttattcattcatttgtttattcatttatttatttaggcctgaatcttacacagagaatttatatatagatattagctacatatactttgaatatgctatacatcgatattagcacctcacgtactttgcaattaagcttctgtaatgtcatgtgatttgtttttggaaaggaatagtggacaggagagtacaatttataatagtagcataactctttgtcctggtggtggaggtgggacgaggtggtgatatttaacctagattaaagaccaggaagggaggaattgcatctgccaaagtttcctccaacagcgatcagtagccctaagtacaaagaagccagatttagccttctgttgtttggcaaaacctcactcagagctttactccctcagacctttctgagtttaaccacagacatgatctttgctgtgctgagaaacttgtgtctacctggcctgtagggagtgtaaactagattaatacagattaacagactctgaacttaaaaaaaaaaatcactcctaagggtgtccttctaatttcaaaatatcaactcctaagaggtcagcagaatttggagatttgggtccttataagaatagctggtgctcttttcttgttcatgtctcaaaacaaagctgttgagagaactgctgcgatgaatcaaaccagaggagtttgtcatgctccccacagagagcccaggacatttgcctgatgtatggtgctgagctccaccttcagaggaactctctcttttttttttttttaaataactattattagcttgacaagaaaaaaaaagtgcccaacagttttagtgttaatcttggtgctctatggtgcattagcagagatatgaacaattaaatgaagacaaagaaaataaaaataaagtctgattaacttttgctca

SEQ ID NO: 193715 - DNA, 3174 bp, Homo sapiens
  Payload ID: 18253
  Gene Name: transmembrane protein 169
  Uniprot ID: Q96HH4
  ENST ID: ENST00000406027
  CDS Start-End: 441-1334
agaaccgctccccgccggctgtccgcaacctccgccagcgtcggtccctgggcaggtgtgggtgagactgctcgttcgtttctttaaatttcgatgccattggggagggtggaagggaaatgcaaaaaaaaaaaaagaagaagaaagaaacaagcagggtgtgctctatttcaaaaattcaatcctcagggctgaagctctcacgattaattaaaattaaatctccagtgcagctggaaaaagaaaggctgctgctcggcgccctcgctgcgcccgcctgccggggtcggacgtcggcgatgctgtggctccaggtggaatgcatccttgggacatctttgcatagccccatctaggaagaagttctgtgatgtgtgaactgtgagtttactcaaacaagtccaactctttataagacataggtagacgtcaggtctggaatggaagagccaacagcagtagaaggccaggtccagcttccaagcccccaccagggctctctcaggaaggctgtggctgctgccctggcgctggatggggaatccacaatggggcacaggaaaaagaagaggaaagagtcacgcccagaatccatcatcatctaccgctcagacaatgagaaaacagatgaggagcccggagaatcagaaggtggagatcagcctaaagaggaggagggagatgatttcctagactatcctgtggatgatgatatgtggaacctgcctctggacagccgctacgtcaccttaactgggaccatcacacgagggaagaaaaagggtcagatggtggacatccatgtcacattgacagagaaagagctgcaggaactgaccaaacctaaagagtcatcaagggaaacgacgcctgaaggaagaatggcctgccagatgggagctgaccgtgggccccatgtggtcctctggacgctgatctgcctgcctgtggttttcatcctttcttttgttgtctctttctactacggcactatcacctggtacaacatcttcctcgtgtataatgaggaaaggaccttctggcacaagatctcgtattgcccttgcctcgttctcttctatccagtgctcatcatggccatggcttcttccctcggcctctacgctgctgtggtccagctctcgtggtcctgggaagcatggtggcaagctgcccgggacatggagaaaggcttctgtggctggctctgcagcaagctgggtctggaggactgttctccctacagcattgtggagttgcttgaatccgacaatatctcaagcactctctccaacaaggaccccatccaagaagtagaaacctccacggtctaaactcccaacaacttactccctcctctggccccagtagcctatatatcatcttaaaattccagcagattatttctttaaattaccccctactctccgcagttcttctgggaaatcagagtccatactgatcagttttaccatcttgagggttccaggagggcatggagcagacaagcaattgtgccaaagcagttcacccaatggacaaactctttttgattccctgccctaaaatcaccatttatttaggacaatggaactctgctgtgtgtcgttttgggagcctggaagtgttactggtgcctggaactgaggggagtatgtgactaaatgtgtcagggagaataaagaacctcggggtaaccaaatccaccaagataatagacagggatggagtgagacatttaggaagctggactaccacagtgtagcagaaggtaaagatttgtgtgtatcatttagatttagatttagctgcatagaattaaaaccctaaaatatcagtggcttaaacaagatagaagtgtatttctttcttgtgcagaagaagtctggaggcagaccatcctgggaccctgtgaagtaatccaggtcccaggcttcttctatttctctaccattagtaggatgtgacccttctcacccttatccccaacatcccagtgctgattacatcttcagccatcacatccatgtttctgataaaatagaggaaagggcagagaagcacacacccttcctgttcaaggagacttcccagaagtcccactcgattcttcttatatctcattggcaagacctcagtcacatgatgtcatgagcaaaagaggctggaaatgtagttgtttggctgggtagctatattctcagctaaatactgggttcacgctaattggcaagaaaaaggaagaatggttatttgggttttgttttgttttgttttgtttcgctttagagacggagtctcactctgttgccgaggctggagtgcagtggcactatctcggctcactgcaaccttcgcctcctgggttcaagcaattcttgtgccttggcctccccagtagctgggattacaggtgcgtgccaccatacccggctaatttttgtattttttttttagtagagatggggtttcaccatgtgcccaggctggtcttgaactcctgacctcaggtgatccgcctgcctcggcctcccaaaatgctgggattgtaggcaagaatggttatcttggtaggcaagtcagaatctttgcctcacaatgatcatttaaatacattcagaacccccaaactgctaatatggttttatttatttatttattcattcatttgtttattcatttatttatttaggcctgaatcttacacagagaatttatatatagatattagctacatatactttgaatatgctatacatcgatattagcacctcacgtactttgcaattaagcttctgtaatgtcatgtgatttgtttttggaaaggaatagtggacaggagagtacaatttataatagtagcataactctttgtcctggtggtggaggtgggacgaggtggtgatatttaacctagattaaagaccaggaagggaggaattgcatctgccaaagtttcctccaacagcgatcagtagccctaagtacaaagaagccagatttagccttctgttgtttggcaaaacctcactcagagctttactccctcagacctttctgagtttaaccacagacatgatctttgctgtgctgagaaacttgtgtctacctggcctgtagggagtgtaaactagattaatacagattaacagactctgaacttaaaaaaaaaaa

SEQ ID NO: 193716 - DNA, 584 bp, Homo sapiens
  Payload ID: 18253
  Gene Name: transmembrane protein 169
  ENST ID: ENST00000433112
  CDS Start-End: 235-584
ggcccggccccgccccgcccgccggccgcggcaaagccgcatcctcccggagcagaaccgctccccgccggctgtccgcaacctccgccagcgtcggtccctgggcaggtggaatgcatccttgggacatctttgcatagccccatctaggaagaagttctgtgatgtgtgaactgtgagtttactcaaacaagtccaactctttataagacataggtagacgtcaggtctggaatggaagagccaacagcagtagaaggccaggtccagcttccaagcccccaccagggctctctcaggaaggctgtggctgctgccctggcgctggatggggaatccacaatggggcacaggaaaaagaagaggaaagagtcacgcccagaatccatcatcatctaccgctcagacaatgagaaaacagatgaggagcccggagaatcagaaggtggagatcagcctaaagaggaggagggagatgatttcctagactatcctgtggatgatgatatgtggaacctgcctctggacagccgctacgtcaccttaactgggaccatcacacgagggaagaaaaagggtcagat

SEQ ID NO: 193717 - DNA, 1634 bp, Homo sapiens
  Payload ID: 18253
  Gene Name: transmembrane protein 169
  Uniprot ID: Q96HH4
  ENST ID: ENST00000437356
  CDS Start-End: 218-1111
ggccgcggcaaagccgcatcctcccggagcagaaccgctccccgccggctgtccgcaacctccgccagcgtcggtccctgggcaggtgtgggtggaatgcatccttgggacatctttgcatagccccatctaggaagaagttctgtgatgtgtgaactgtgagtttactcaaacaagtccaactctttataagacataggtagacgtcaggtctggaatggaagagccaacagcagtagaaggccaggtccagcttccaagcccccaccagggctctctcaggaaggctgtggctgctgccctggcgctggatggggaatccacaatggggcacaggaaaaagaagaggaaagagtcacgcccagaatccatcatcatctaccgctcagacaatgagaaaacagatgaggagcccggagaatcagaaggtggagatcagcctaaagaggaggagggagatgatttcctagactatcctgtggatgatgatatgtggaacctgcctctggacagccgctacgtcaccttaactgggaccatcacacgagggaagaaaaagggtcagatggtggacatccatgtcacattgacagagaaagagctgcaggaactgaccaaacctaaagagtcatcaagggaaacgacgcctgaaggaagaatggcctgccagatgggagctgaccgtgggccccatgtggtcctctggacgctgatctgcctgcctgtggttttcatcctttcttttgttgtctctttctactacggcactatcacctggtacaacatcttcctcgtgtataatgaggaaaggaccttctggcacaagatctcgtattgcccttgcctcgttctcttctatccagtgctcatcatggccatggcttcttccctcggcctctacgctgctgtggtccagctctcgtggtcctgggaagcatggtggcaagctgcccgggacatggagaaaggcttctgtggctggctctgcagcaagctgggtctggaggactgttctccctacagcattgtggagttgcttgaatccgacaatatctcaagcactctctccaacaaggaccccatccaagaagtagaaacctccacggtctaaactcccaacaacttactccctcctctggccccagtagcctatatatcatcttaaaattccagcagattatttctttaaattaccccctactctccgcagttcttctgggaaatcagagtccatactgatcagttttaccatcttgagggttccaggagggcatggagcagacaagcaattgtgccaaagcagttcacccaatggacaaactctttttgattccctgccctaaaatcaccatttatttaggacaatggaactctgctgtgtgtcgttttgggagcctggaagtgttactggtgcctggaactgaggggagtatgtgactaaatgtgtcagggagaataaagaacctcggggtaaccaaatccaccaagataatagacagggatggagtgagacatttaggaagctggactaccacagtgtagcagaaggtaaagatttgtgtgtatcatttagatttagatttagctgcatagaattaaaaccctaaaatatcagtggcttaaacaagatagaa

SEQ ID NO: 193718 - DNA, 3460 bp, Homo sapiens
  Payload ID: 18253
  Gene Name: transmembrane protein 169
  Uniprot ID: Q96HH4
  ENST ID: ENST00000454545
  CDS Start-End: 327-1220
ggcccggccccgccccgcccgccggccgcggcaaagccgcatcctcccggagcagaaccgctccccgccggctgtccgcaacctccgccagcgtcggtccctgggcaggtgtggtgcagctggaaaaagaaaggctgctgctcggcgccctcgctgcgcccgcctgccggggtcggacgtcggcgatgctgtggctccaggtggaatgcatccttgggacatctttgcatagccccatctaggaagaagttctgtgatgtgtgaactgtgagtttactcaaacaagtccaactctttataagacataggtagacgtcaggtctggaatggaagagccaacagcagtagaaggccaggtccagcttccaagcccccaccagggctctctcaggaaggctgtggctgctgccctggcgctggatggggaatccacaatggggcacaggaaaaagaagaggaaagagtcacgcccagaatccatcatcatctaccgctcagacaatgagaaaacagatgaggagcccggagaatcagaaggtggagatcagcctaaagaggaggagggagatgatttcctagactatcctgtggatgatgatatgtggaacctgcctctggacagccgctacgtcaccttaactgggaccatcacacgagggaagaaaaagggtcagatggtggacatccatgtcacattgacagagaaagagctgcaggaactgaccaaacctaaagagtcatcaagggaaacgacgcctgaaggaagaatggcctgccagatgggagctgaccgtgggccccatgtggtcctctggacgctgatctgcctgcctgtggttttcatcctttcttttgttgtctctttctactacggcactatcacctggtacaacatcttcctcgtgtataatgaggaaaggaccttctggcacaagatctcgtattgcccttgcctcgttctcttctatccagtgctcatcatggccatggcttcttccctcggcctctacgctgctgtggtccagctctcgtggtcctgggaagcatggtggcaagctgcccgggacatggagaaaggcttctgtggctggctctgcagcaagctgggtctggaggactgttctccctacagcattgtggagttgcttgaatccgacaatatctcaagcactctctccaacaaggaccccatccaagaagtagaaacctccacggtctaaactcccaacaacttactccctcctctggccccagtagcctatatatcatcttaaaattccagcagattatttctttaaattaccccctactctccgcagttcttctgggaaatcagagtccatactgatcagttttaccatcttgagggttccaggagggcatggagcagacaagcaattgtgccaaagcagttcacccaatggacaaactctttttgattccctgccctaaaatcaccatttatttaggacaatggaactctgctgtgtgtcgttttgggagcctggaagtgttactggtgcctggaactgaggggagtatgtgactaaatgtgtcagggagaataaagaacctcggggtaaccaaatccaccaagataatagacagggatggagtgagacatttaggaagctggactaccacagtgtagcagaaggtaaagatttgtgtgtatcatttagatttagatttagctgcatagaattaaaaccctaaaatatcagtggcttaaacaagatagaagtgtatttctttcttgtgcagaagaagtctggaggcagaccatcctgggaccctgtgaagtaatccaggtcccaggcttcttctatttctctaccattagtaggatgtgacccttctcacccttatccccaacatcccagtgctgattacatcttcagccatcacatccatgtttctgataaaatagaggaaagggcagagaagcacacacccttcctgttcaaggagacttcccagaagtcccactcgattcttcttatatctcattggcaagacctcagtcacatgatgtcatgagcaaaagaggctggaaatgtagttgtttggctgggtagctatattctcagctaaatactgggttcacgctaattggcaagaaaaaggaagaatggttatttgggttttgttttgttttgttttgtttcgctttagagacggagtctcactctgttgccgaggctggagtgcagtggcactatctcggctcactgcaaccttcgcctcctgggttcaagcaattcttgtgccttggcctccccagtagctgggattacaggtgcgtgccaccatacccggctaatttttgtattttttttttagtagagatggggtttcaccatgtgcccaggctggtcttgaactcctgacctcaggtgatccgcctgcctcggcctcccaaaatgctgggattgtaggcaagaatggttatcttggtaggcaagtcagaatctttgcctcacaatgatcatttaaatacattcagaacccccaaactgctaatatggttttatttatttatttattcattcatttgtttattcatttatttatttaggcctgaatcttacacagagaatttatatatagatattagctacatatactttgaatatgctatacatcgatattagcacctcacgtactttgcaattaagcttctgtaatgtcatgtgatttgtttttggaaaggaatagtggacaggagagtacaatttataatagtagcataactctttgtcctggtggtggaggtgggacgaggtggtgatatttaacctagattaaagaccaggaagggaggaattgcatctgccaaagtttcctccaacagcgatcagtagccctaagtacaaagaagccagatttagccttctgttgtttggcaaaacctcactcagagctttactccctcagacctttctgagtttaaccacagacatgatctttgctgtgctgagaaacttgtgtctacctggcctgtagggagtgtaaactagattaatacagattaacagactctgaacttaaaaaaaaaaatcactcctaagggtgtccttctaatttcaaaatatcaactcctaagaggtcagcagaatttggagatttgggtccttataagaatagctggtgctcttttcttgttcatgtctcaaaacaaagctgttgagagaactgctgcgatgaatcaaaccagaggagtttgtcatgctccccacagagagcccaggacatttgcctgatgtatggtgctgagctccaccttcagaggaactctctcttttttttttttttaaataactattattagcttgacaagaaaaaaaaagtgcccaacagttttagtgttaatcttggtgctctatggtgcattagcagagatatgaacaattaaatgaagacaaagaaaataaaaataaagtctgattaacttttgctc

SEQ ID NO: 193719 - DNA, 578 bp, Homo sapiens
  Payload ID: 18253
  Gene Name: transmembrane protein 169
  ENST ID: ENST00000455479
  CDS Start-End: 274-578
agaaccgctccccgccggctgtccgcaacctccgccagcgtcggtccctgggcaggtgtggtgcagctggaaaaagaaaggctgctgctcggcgccctcgctgcgcccgcctgccggggtcggacgtcggcgatgctgtggctccaggtggaatgcatccttgggacatctttgcatagccccatctaggaagaagttctgtgatgtgtgaactgtgagtttactcaaacaagtccaactctttataagacataggtagacgtcaggtctggaatggaagagccaacagcagtagaaggccaggtccagcttccaagcccccaccagggctctctcaggaaggctgtggctgctgccctggcgctggatggggaatccacaatggggcacaggaaaaagaagaggaaagagtcacgcccagaatccatcatcatctaccgctcagacaatgagaaaacagatgaggagcccggagaatcagaaggtggagatcagcctaaagaggaggagggagatgatttcctagactatcctgtggatgatgatatgtggaacctgcctctggacagccgctacgt

SEQ ID NO: 193720 - DNA, 1797 bp, Homo sapiens
  Payload ID: 18254
  Gene Name: transmembrane protein 17
  Uniprot ID: Q86X19
  ENST ID: ENST00000335390
  CDS Start-End: 213-809
gcgcggctccctgggcctggaacgcgctctgagcgcgccggtcccttccaggttgcgcgggctccggacgagacccagcccagccgggcagccccgcgcgctcccgggtcccgccggcctcgcgccgcccggttgccgtgggaaccacggagcctcggagcgcccgcagactagcccgtgtctgagggggtgagggatactgaggcccaggcatggagctgccggatccggtgcgccagcggctgggaaacttcagccgggccgtgttcagtgattccaatcggaccggtccagagtccaatgagggtccggaaaatgaaatggtctccagtttggcactgcagatgtcactttattttaatacctactatttcccactgtggtgggtgagcagcattatgatgcttcacatgaagtattcaatcttacctgactactacaaattcattgtgatcactgttatcatcctaataaccttaattgaagccatccggttgtatctgggctacgtgggtaacctacaggagaaggttcctgagttggctggcttttggcttttgagccttctattgcagttacctttaattcttttcttgctctttaatgaaggcctaacaaatctgcccttggaaaaagcgatacatatcatcttcactctcttccttgctttccaagttgttgcagcatttcttaccttaaggaaaatggttaatcagttggcagttcgtttccacctccaagactttgaccggctctctgcaaacagaggagacatgagaaggatgaggtcatgtatagaagagatctgatccagtgttgttgagtgaaaatctgacagatcattctagagactgtaagagttaggaaaatatcagagctctgagaaaagggacaaagcaagtgttttgaattgtatatgctctcactctgaaattccaaggttgggggcaatgatgaaactttgtacagtatatgaaacagtatattaaccctaaaacctagatgttgtccacctgatgccaaatttcttaattttttttgatgttgttgtctttttcaggagtgtagaaatctatgtattggtggttgtcatttgccagctctctcgtagcatttctggttagaatctttaactagagatgtatacatttctttaaaacttgttggttatccatgtcttgtctgtacatatgaccatgtttcttgacatggaaataccagtcagtgttcctatgtatttgtctatatttgtaaaccaagagaccggctgggtgtggtggctcacgcctgtaatcccagcactttgggaggccgaggtgggcagatcatgaggtcagaagatcgagaccatcctggctaacacggtgaaacccagcctctactaaaaatacaaaaaaaaaaaaaattagctaggcgtggttgcaggcacctgtagtcccagctacttgggaggctgaggcaggagaatggtgtgaacccaggaggcagagcttgcagtgagccgagatcaagccactgtactccatcctgggtgacagagcaagactccatctcaaaaaaataaataaataaaaaataaaacaagagaccaaattttcatgtctgctagggttaaattctaaccctaatattagctgttatactgagatgaagaagaaaacaggtggattgccttggtatttaggaaatatttttgttataaaattacaactttcataaaaccatattcagtatttgtaatggtggtatacaaaatgcttttacaataaattattaaatatttaaggtatcagcagc

SEQ ID NO: 193721 - DNA, 4959 bp, Homo sapiens
  Payload ID: 18255
  Gene Name: transmembrane protein 170A
  Uniprot ID: Q8WVE7
  ENST ID: ENST00000357613
  CDS Start-End: 90-455
gacgctgaggcggcgagggtgagtcggcgccggccgctaccgcacttcgggcgctcgtccctcatttctctgtggtgaatggcgacgggatggagcgcgaggggagcggcggcagcggcgggtcggccgggctcctgcagcagatcctgagcctgaaggttgtgccgcgggtgggcaacgggaccctgtgccccaactctacttccctctgctccttcccagagatgtggtatggtgtattcctgtgggcactggtgtcttctctcttctttcatgtccctgctggattactggccctcttcaccctcagacatcacaaatatggtgcagctattgctggagtttaccgagcagcagggaaggaaatgataccatttgaagccctcacactgggcactggacagacattttgcgtcttggtggtctcctttttacggattttagctactctatagcatacatccttatgctgagatgttgaacttaaactttatggaatcctccaaaagaatacattatggagtgtagtgttttcttagttcttcaaagggaagcaacttggatgaacaggaacatgaaggacaacacatctcagccttttcttcattttgaagctcctagaattgaagacttatgtggactcctattgttctcaaccaaaacaagtcttttggctttcttttttgtagatatttgatttaagcagttttcatgtgtacctttacccaagccaagtcaacagtgtctctggggtggcatcctttgcactgaaatttacagtattctgtgagatgtcgcatattttgaagaaaccgtggaagatactggtttatttcaaatgagcagagtatgttgtattaaaatcttatctaatcttgattaaaatttggcaaactcttttctttgctacatcttagtgacaataaatgccaaataggttttggttgagtatagttttgaaaacaaatttggtgaaataaagcaggaaaaaaaatttaagtataactcaagtagtggctttggttccactgtttataaataaaaagtagataacaatgaataatgtgacattttctggacaactgtcttgacttctgattaagatattttaagagatgtgaatttgttattttgtatgttttatcaaaataagctagctaatttagactttttagattttctgtaccacctttccctatcacttttaattctcttaattttatttcatttaattggaaacatacataccctattaaatggcttgagttggaaattttaagccagatttgtttggacattgaggcacacataagatactttaggcattctgtcatagtttttcttagtgactttggtatactaatgacccttgagaaactatagaagtgcatctgaaactagagttagtggttattgattttttagcttaatgtgtttacctagtggtaactcttcagcccacttttacagtattgggtatcaactcccagaaagtgcctaaagtttaatgttcagatatgtacccactctcccctttacatttttattcaaaagaatttatatctttaaagagatttaaatatcaagagtttttttaaaacttaattttagctatttaaatttttattctactgcctaactttctttttcattaaaaggcctgaaaactgtgactctttgagagggaaagaatcgcagaaattaagtatttaatgtgatcctttccacctaaactgttttgtatggaatacaatcagtgtggtggtagtggtggtggttatctgcaaaatagtttctggtgattaaatctgacttttttttttttttttcttttaaatgagacggagcctcactgtgttgcccaggctggagtgcagtggtgcaatctcagctcactccaacctctgccacccgggttcaagcgattctcctgcctcagtttcctgagtagctgggattacaggcacctgccaccgtgcccggctaatttttgtatttttagtagagataggtttcaccatcttgcccaggctggtcttgaactcctgaccttgtgatccacccgcctcggcctcccaaagtgctgggattacaggcgtgagccaccgcgcctggccataaatctgacatctttaaaggaaagttttcattgtgagattaaggcttaacagcccatgaggtcatatacacatgaacgtatctattccatttaaagcaatacacactctggcttctgattaaaaatagccaggaggagagtctctgaatctactgtgattctggagtctgcccaatttggaaaaaaaaaaaaaagaaaaaagtcaggaggaccaatttgccagggaaactcatagaaaagaattacaaagagatcacaaaaactggacatattcttttgactaattagaccacttatggctgggcgcagtggctcacacctataatcccagcactttgggaggtcgatgtgggaggattgcttgagcccaagagttcaagactggcctgggcaacatagtgagaccttgtctctactacaaaataaaaaaaaattagctgggcgtggcctcagctacccaagaggctaaagtgggaggatcacttgtgcctgggaggttcaggctgctgtgagccgagaccacgccactgaactccagcttaggccacagggcaagaccctgtcttaaaataatattactaattttggtaattaacttatcaaaactatagtgacatatacacgggcagaaacttataagtagagttgtaatgcagccaaatattcttacaaattccctaacaagaagctcaaatctttctcacaggcaaattgtaaaaattctagttttttgtttaaagagctgtgattttcaaaagtatcccttcagtttaagaaatctggggaattggtaacttttcttatgggaaatgattgccatcatctctactgaaggatgcctcttactgaaaaatgtcttttgaaggagttcttgcctaaagcattctttggatgtaatttcatacactaaacatatagaccagtagttagtgggcccctcctcttaaacagtaacttttgaagtactgatacatgattaaaatgttagatatttttcactggagctaagacttaaaattagggcattttgaaaggtgtatttgtttctgtttcttgtttgatatattttggttatctactcttttaaaaaactaaacgtataaaaggtatcttcaaattactgagtgtttcatccatcccagtaggtgaagtattctccagtgaataaatctatatatatatatagattttaaatagcttgagcggtgtagcttgaaatgttttcagggaaagactatttgaatcataaggaatagctttgattttcttttttatgtctcaaatatagaattatttgggggtggtcactcagatggaagaatattggcaattgtgttgaacattttaccttatatagttttgagaatttttgccaaaaactgatttcttagaaatatcctcccccagctgtgctttggttttttggtttttttgttttgagacggagtcttgctctgtcgcccaggctggagtgcagtggcatgatctcggctcactgcaagctctgcctcccgggttcacgccattctcctgcctcagcctcccgagtagctgggactacggacgtccaccaccatgcccagctaattttttgtatttttagtagagacggggtttcaccgtgttagccaggatggtctcaatctcctgacccgcctccacctcccaaagtgctgggattacaggcatgagccaccacacccggcctctgctttgttttttaaaaaaaaagaaatgcaagagagggagggaggcagcctcctgaccataaaagctgatttcttgatttttttttcttttttttttgaaatggagtcttgctctgtctccaaggctggagtgcagtggcatggtctcagctcactgcagcctccgtttcctgggttcaagtgattgtcctgccttggccgctgagtagctaggattactggcacccgccacaaggcccagctaatttttgtatttttagtagagacagggtttgattatgttggacaggctggtctcaaactcctgacttcaagtgatccacccgcctcggcctcccaacgtgatgggactatagacatgagccatcatgcttggccttcttgattcttgaatacggggttttgaggtgaaagcatttcatgaaaacttaagttcatacacaagagcatcatgaatattctaaaagaggtatctgtgctttttttgtgaccacaaaatattacttcttatgaaatgtttacactaggtgaggaaaagttcattaattacctttaaaccgttccttattttttttaagattttaaattgtattttggcttttgcctccagtatcctttctggttgctctggtttgaattaagttcctattatgctgcagcacatatcaaccttccctaagtaaccatttcctggaatgtgaagcatcggtgccattagcagaccatatgcagaaatgtcgtgtacttgcatttcttttttgtgcactctataaggctggttgtgactcagatcagcttaactttttatattatgttatttcactaactgctacagtcaaaatgatcaaatctttgtacaatagaaaattatttaaattttatttttctactgacatttctaattctagtgtaaatgtttatcaataaaaaattactttcaattctgagttggaattatatttctttttggtggctaatgagtttaatcttttgtaataaaattgacttcagttttcattttttaaataacttaatatctagcatgtgtaactttttttatgttctacttcttactaatttatgataaaattcttgttcaaagttgtgattaaaccgtacttaacatgtgaa

SEQ ID NO: 193722 - DNA, 1072 bp, Homo sapiens
  Payload ID: 18255
  Gene Name: transmembrane protein 170A
  Uniprot ID: Q8WVE7
  ENST ID: ENST00000561878
  CDS Start-End: 99-533
gctggaggtgacgctgaggcggcgagggtgagtcggcgccggccgctaccgcacttcgggcgctcgtccctcatttctctgtggtgaatggcgacgggatggagcgcgaggggagcggcggcagcggcgggtcggccgggctcctgcagcagatcctgagcctgaaggttgtgccgcgggtgggcaacgggaccctgtgccccaactctacttccctctgctccttcccagagatgtggtatggtgtattcctgtgggcactggtgtcttctctcttctttcatgtccctgctggattactggccctcttcaccctcagacatcacaaatatggtaggttcatgtctgtaagcatcctgttgatgggcatcgtgggaccaattactgctggaatcttgacaagtgcagctattgctggagtttaccgagcagcagggaaggaaatgataccatttgaagccctcacactgggcactggacagacattttgcgtcttggtggtctcctttttacggattttagctactctatagcatacatccttatgctgagatgttgaacttaaactttatggaatcctccaaaagaatacattatggagtgtagtgttttcttagttcttcaaagggaagcaacttggatgaacaggaacatgaaggacaacacatctcagccttttcttcattttgaagctcctagaattgaagacttatgtggactcctattgttctcaaccaaaacaagtcttttggctttcttttttgtagatatttgatttaagcagttttcatgtgtacctttacccaagccaagtcaacagtgtctctggggtggcatcctttgcactgaaatttacagtattctgtgagatgtcgcatattttgaagaaaccgtggaagatactggtttatttcaaatgagcagagtatgttgtattaaaatcttatctaatcttgattaaaatttggcaaactcttttctttgctacatcttagtgacaataaatgccaaataggttttggttgagtatagttttgaaaacaaatttggtgaaataaagcaggaaaaaaaa

SEQ ID NO: 193723 - DNA, 4345 bp, Homo sapiens
  Payload ID: 18255
  Gene Name: transmembrane protein 170A
  Uniprot ID: Q8WVE7
  ENST ID: ENST00000568559
  CDS Start-End: 90-455
gacgctgaggcggcgagggtgagtcggcgccggccgctaccgcacttcgggcgctcgtccctcatttctctgtggtgaatggcgacgggatggagcgcgaggggagcggcggcagcggcgggtcggccgggctcctgcagcagatcctgagcctgaaggttgtgccgcgggtgggcaacgggaccctgtgccccaactctacttccctctgctccttcccagagatgtggtatggtgtattcctgtgggcactggtgtcttctctcttctttcatgtccctgctggattactggccctcttcaccctcagacatcacaaatatggtgcagctattgctggagtttaccgagcagcagggaaggaaatgataccatttgaagccctcacactgggcactggacagacattttgcgtcttggtggtctcctttttacggattttagctactctatagcatacatccttatgctgagatgttgaacttaaactttatggaatcctccaaaagaatacattatggagtgtagtgttttcttagttcttcaaagggaagcaacttggatgaacaggaacatgaaggacaacacatctcagccttttcttcattttgaagctcctagaattgaagacttatgtggactcctattgttctcaaccaaaacaagtcttttggctttcttttttgtagatatttgatttaagcagttttcatgtgtacctttacccaagccaagtcaacagtgtctctggggtggcatcctttgcactgaaatttacagtattctgtgagatgtcgcatattttgaagaaaccgtggaagatactggtttatttcaaatgagcagagtatgttgtattaaaatcttatctaatcttgattaaaatttggcaaactcttttctttgctacatcttagtgacaataaatgccaaataggttttggttgagtatagttttgaaaacaaatttggtgaaataaagcaggaaaaaaaatttaagtataactcaagtagtggctttggttccactgtttataaataaaaagtagataacaatgaataatgtgacattttctggacaactgtcttgacttctgattaagatattttaagagatgtgaatttgttattttgtatgttttatcaaaataagctagctaatttagactttttagattttctgtaccacctttccctatcacttttaattctcttaattttatttcatttaattggaaacatacataccctattaaatggcttgagttggaaattttaagccagatttgtttggacattgaggcacacataagatactttaggcattctgtcatagtttttcttagtgactttggtatactaatgacccttgagaaactatagaagtgcatctgaaactagagttagtggttattgattttttagcttaatgtgtttacctagtggtaactcttcagcccacttttacagtattgggtatcaactcccagaaagtgcctaaagtttaatgttcagatatgtacccactctcccctttacatttttattcaaaagaatttatatctttaaagagatttaaatatcaagagtttttttaaaacttaattttagctatttaaatttttattctactgcctaactttctttttcattaaaaggcctgaaaactgtgactctttgagagggaaagaatcgcagaaattaagtatttaatgtgatcctttccacctaaactgttttgtatggaatacaatcagtgtggtggtagtggtggtggttatctgcaaaatagtttctggtgattaaatctgacttttttttttttttttcttttaaatgagacggagcctcactgtgttgcccaggctggagtgcagtggtgcaatctcagctcactccaacctctgccacccgggttcaagcgattctcctgcctcagtttcctgagtagctgggattacaggcacctgccaccgtgcccggctaatttttgtatttttagtagagataggtttcaccatcttgcccagcactttgggaggtcgatgtgggaggattgcttgagcccaagagttcaagactggcctgggcaacatagtgagaccttgtctctactacaaaataaaaaaaaattagctgggcgtggcctcagctacccaagaggctaaagtgggaggatcacttgtgcctgggaggttcaggctgctgtgagccgagaccacgccactgaactccagcttaggccacagggcaagaccctgtcttaaaataatattactaattttggtaattaacttatcaaaactatagtgacatatacacgggcagaaacttataagtagagttgtaatgcagccaaatattcttacaaattccctaacaagaagctcaaatctttctcacaggcaaattgtaaaaattctagttttttgtttaaagagctgtgattttcaaaagtatcccttcagtttaagaaatctggggaattggtaacttttcttatgggaaatgattgccatcatctctactgaaggatgcctcttactgaaaaatgtcttttgaaggagttcttgcctaaagcattctttggatgtaatttcatacactaaacatatagaccagtagttagtgggcccctcctcttaaacagtaacttttgaagtactgatacatgattaaaatgttagatatttttcactggagctaagacttaaaattagggcattttgaaaggtgtatttgtttctgtttcttgtttgatatattttggttatctactcttttaaaaaactaaacgtataaaaggtatcttcaaattactgagtgtttcatccatcccagtaggtgaagtattctccagtgaataaatctatatatatatatagattttaaatagcttgagcggtgtagcttgaaatgttttcagggaaagactatttgaatcataaggaatagctttgattttcttttttatgtctcaaatatagaattatttgggggtggtcactcagatggaagaatattggcaattgtgttgaacattttaccttatatagttttgagaatttttgccaaaaactgatttcttagaaatatcctcccccagctgtgctttggttttttggtttttttgttttgagacggagtcttgctctgtcgcccaggctggagtgcagtggcatgatctcggctcactgcaagctctgcctcccgggttcacgccattctcctgcctcagcctcccgagtagctgggactacggacgtccaccaccatgcccagctaattttttgtatttttagtagagacggggtttcaccgtgttagccaggatggtctcaatctcctgacccgcctccacctcccaaagtgctgggattacaggcatgagccaccacacccggcctctgctttgttttttaaaaaaaaagaaatgcaagagagggagggaggcagcctcctgaccataaaagctgatttcttgatttttttttcttttttttttgaaatggagtcttgctctgtctccaaggctggagtgcagtggcatggtctcagctcactgcagcctccgtttcctgggttcaagtgattgtcctgccttggccgctgagtagctaggattactggcacccgccacaaggcccagctaatttttgtatttttagtagagacagggtttgattatgttggacaggctggtctcaaactcctgacttcaagtgatccacccgcctcggcctcccaacgtgatgggactatagacatgagccatcatgcttggccttcttgattcttgaatacggggttttgaggtgaaagcatttcatgaaaacttaagttcatacacaagagcatcatgaatattctaaaagaggtatctgtgctttttttgtgaccacaaaatattacttcttatgaaatgtttacactaggtgaggaaaagttcattaattacctttaaaccgttccttattttttttaagattttaaattgtattttggcttttgcctccagtatcctttctggttgctctggtttgaattaagttcctattatgctgcagcacatatcaaccttccctaagtaaccatttcctggaatgtgaagcatcggtgccattagcagaccatatgcagaaatgtcgtgtacttgcatttcttttttgtgcactctataaggctggttgtgactcagatcagcttaactttttatattatgttatttcactaactgctacagtcaaaatgatcaaatctttgtacaatagaaaattatttaaattttatttttctactgacatttctaattctagtgtaaatgtttatcaataaaaaattactt

SEQ ID NO: 193724 - DNA, 2331 bp, Homo sapiens
  Payload ID: 18255
  Gene Name: transmembrane protein 170A
  ENST ID: ENST00000569540
  CDS Start-End: 167-487
gtgctgtgggcgccccgagtctgggcggggtcccgggtgcgcagcctgctggcggcgtgggcgctgtcctccgggaggggggccgtgctgctcgcccggagcccctttccccatcacttcttcggcggtccctgaggcggagccccggagtcccgctgggcgtgagatgcagagagcggccgcagagatgtggtatggtgtattcctgtgggcactggtgtcttctctcttctttcatgtccctgctggattactggccctcttcaccctcagacatcacaaatatggtaggttcatgtctgtaagcatcctgttgatgggcatcgtgggaccaattactgctggaatcttgacaagtgcagctattgctggagtttaccgagcagcagggaaggaaatgataccatttgaagccctcacactgggcactggacagacattttgcgtcttggtggtctcctttttacggattttagctactctatagcatacatccttatgctgagatgttgaacttaaactttatggaatcctccaaaagaatacattatggagtgtagtgttttcttagttcttcaaagggaagcaacttggatgaacaggaacatgaaggacaacacatctcagccttttcttcattttgaagctcctagaattgaagacttatgtggactcctattgttctcaaccaaaacaagtcttttggctttcttttttgtagatatttgatttaagcagttttcatgtgtacctttacccaagccaagtcaacagtgtctctggggtggcatcctttgcactgaaatttacagtattctgtgagatgtcgcatattttgaagaaaccgtggaagatactggtttatttcaaatgagcagagtatgttgtattaaaatcttatctaatcttgattaaaatttggcaaactcttttctttgctacatcttagtgacaataaatgccaaataggttttggttgagtatagttttgaaaacaaatttggtgaaataaagcaggaaaaaaaatttaagtataactcaagtagtggctttggttccactgtttataaataaaaagtagataacaatgaataatgtgacattttctggacaactgtcttgacttctgattaagatattttaagagatgtgaatttgttattttgtatgttttatcaaaataagctagctaatttagactttttagattttctgtaccacctttccctatcacttttaattctcttaattttatttcatttaattggaaacatacataccctattaaatggcttgagttggaaattttaagccagatttgtttggacattgaggcacacataagatactttaggcattctgtcatagtttttcttagtgactttggtatactaatgacccttgagaaactatagaagtgcatctgaaactagagttagtggttattgattttttagcttaatgtgtttacctagtggtaactcttcagcccacttttacagtattgggtatcaactcccagaaagtgcctaaagtttaatgttcagatatgtacccactctcccctttacatttttattcaaaagaatttatatctttaaagagatttaaatatcaagagtttttttaaaacttaattttagctatttaaatttttattctactgcctaactttctttttcattaaaaggcctgaaaactgtgactctttgagagggaaagaatcgcagaaattaagtatttaatgtgatcctttccacctaaactgttttgtatggaatacaatcagtgtggtggtagtggtggtggttatctgcaaaatagtttctggtgattaaatctgacttttttttttttttttcttttaaatgagacggagcctcactgtgttgcccaggctggagtgcagtggtgcaatctcagctcactccaacctctgccacccgggttcaagcgattctcctgcctcagtttcctgagtagctgggattacaggcacctgccaccgtgcccggctaatttttgtatttttagtagagataggtttcaccatcttgcccaggctggtcttgaactcctgaccttgtgatccacccgcctcggcctcccaaagtgctgggattacaggcgtgagccaccgcgcctggccataaatctgacatctttaaaggaaagttttcattgtgagattaaggcttaacagcccatgaggtcatatacacatgaacgtatctattccatttaaagcaatacacactctggcttctgattaaaaatagccaggaggagagtctctgaatctactgtgattctggagtctgcccaatttgg

SEQ ID NO: 193725 - DNA, 609 bp, Homo sapiens
  Payload ID: 18255
  Gene Name: transmembrane protein 170A
  ENST ID: ENST00000569276
  CDS Start-End: 73-414
ggtgagtcggcgccggccgctaccgcacttcgggcgctcgtccctcatttctctgtggtgaatggcgacgggatggagcgcgaggggagcggcggcagcggcgggtcggccgggctcctgcagcagatcctgagcctgaaggttgtgccgcgggtgggcaacgggaccctgtgccccaactctacttccctctgctccttcccagagatgtggtatggtgtattcctgtgggcactggtgtcttctctcttctttcatgtccctgctggattactggccctcttcaccctcagacatcacaaatatggtaggttcatgtctgtaagcatcctgttgatgggcatcgtgggaccaattactgctggaatcttgacaagtatgttagacattaaaataccagtcaaaaatgtttaatatgactagtcaatttcaggacctattctagaaaacatatctgagtaggatgaaggaaagagtgccttttaactgcaagtccagacagggtctccctatgtcaccaaggccggagtgcagtggttgcaatattggctcactgcagcctccacctcttgggctcaagtaatcctcctccatcagcctcccaagaag

SEQ ID NO: 193726 - DNA, 547 bp, Homo sapiens
  Payload ID: 18255
  Gene Name: transmembrane protein 170A
  ENST ID: ENST00000566980
  CDS Start-End: 69-299
acttggcagcgccgttgggattgggggaagaggaccccggctggaggtgacgctgaggcggcgaggagatgtggtatggtgtattcctgtgggcactggtgtcttctctcttctttcatgtccctgctggattactggccctcttcaccctcagacatcacaaatatggtgcagctattgctggagtttaccgagcagcagggaaggaaatgataccatttgaagccctcacactgggcactggacagacattttgcgtcttggtggtctcctttttacggattttagctactctatagcatacatccttatgctgagatgttgaacttaaactttatggaatcctccaaaagaatacattatggagtgtagtgttttcttagttcttcaaagggaagcaacttggatgaacaggaacatgaaggacaacacatctcagccttttcttcattttgaagctcctagaattgaagacttatgtggactcctattgttctcaaccaaaacaagtcttttggctttcttttttgtagatatttgatttaag

SEQ ID NO: 193727 - DNA, 734 bp, Homo sapiens
  Payload ID: 18255
  Gene Name: transmembrane protein 170A
  ENST ID: ENST00000567796
  CDS Start-End: 79-378
acaggctttctgaagggaggaggccaagttgggcggattgtttgagccgaggcattcaagaccagcctgggcaacacgatgtggtatggtgtattcctgtgggcactggtgtcttctctcttctttcatgtccctgctggattactggccctcttcaccctcagacatcacaaatatggtaggttcatgtctgtaagcatcctgttgatgggcatcgtgggaccaattactgctggaatcttgacaagtgcagctattgctggagtttaccgagcagcagggaaggaaatgataccatttgaagccctcacactgggcactggacagacattttgcgtcttggtggtctcctttttacggattttagctactctatagcatacatccttatgctgagatgttgaacttaaactttatggaatcctccaaaagaatacattatggagtgtagtgttttcttagttcttcaaagggaagcaacttggatgaacaggaacatgaaggacaacacatctcagccttttcttcattttgaagctcctagaattgaagacttatgtggactcctattgttctcaaccaaaacaagtcttttggctttcttttttgtagatatttgatttaagcagttttcatgtgtacctttacccaagccaagtcaacagtgtctctggggtggcatcctttgcactgaaatttacagtattctgtgagatgtcgcatattttgaagaa

SEQ ID NO: 193728 - DNA, 8362 bp, Homo sapiens
  Payload ID: 18256
  Gene Name: transmembrane protein 170B
  Uniprot ID: Q5T4T1
  ENST ID: ENST00000379426
  CDS Start-End: 1-399
atgaaggcggaggggggcgaccactccatgatcaacctgtcggtgcagcaggtcctgagcctctgggcccacgggacggtgctgaggaacctcacggagatgtggtactggatcttcctctgggctctcttctcttctctgtttgtccatggtgctgcaggagtgttgatgtttgtgatgctgcagaggcataggcagggaagagtcatctctgtcattgcagtcagcattggatttctggcttctgtaactggagcgatgattaccagtgcagcagtagcgggcatttacagagtagctgggaagaacatggcccctttggaagcgctggtatggggcgttggacagactgtactgacattaatcatctccttttcaaggatcctcgctacactttgaggtttctgtgggaatgtcttacttcacataaggaaacagatgtacagattccctgaaaacggcattgttaacaagtggaaatgaaattgtgcaagaatgtggactgagcaggtcaaagcataaggaagaccttgagctgtgtggaaggattgccctctggtgttcaagtgattgcactaccgcactgcaccttatgtgcctctgtctcaggcaaggtgcattaagacactatgtaaagttacaagaaaaagcaccttgtttagctgcctatcaggttaacattggtgttgaaatcatcgttcctaacagtgttatgttaagttacagggacgttttgaggtattgatatatgtgccaaactcttttctttttgttaacattgatcatgtgacaatttgcaagtgtagatgtagctgagtgctgtgaacatatttgacatgaattcaggtaatgtactaagatttttgttcggtaacactaaatcccgtatgagtgctaaatactgaattgtttaatatgagagaaattatttggtttttaatgttgcgcgtttctgggatttagggcttcaatatgtttaggtattattgttatttaattgatgtggaagataagtcttcttaactgaagactagctcaactgttttaagaactcagagtagctctatagggtgcatacttttcaccaacttaagtaacacccttttaatagcttctctcatgcatccatattctgtttatacaaattcagaaacttgaagggtcatacacattgattgtagtttgtgcgtcataaaaatgtaatttgaagattttcttaaaaatttttgtaagaaaaaagtctgaaatgcatgttgcattctttgacccttctaaagaaagtttttgccttgtatctcatggacaaaacatctttataactagtatctcagtgggattgtattacgtgttgcatatatcttgatttttgacaaaacataaacagtctttcattctggagtattaactgtttttagagactggcctaaattaggctctggaaataaagacctcatttgtagaaataagtaacaagtaagttatataggaagagtaatgaactattttactttggacatgtggcaacatcataattttgctaagtaaaaattggggaatatagtagataattttaaaatttggcaattagtctcagcatatcaatgcagtactgagcgtgtattagagtaattcagttgttcagttcttgatttatgatatgaagttatgatttaagtttagtagaagaatctgtgagggcatatagcaaaagtggaaatgtcctttatataaaacattttaagaggttctggcaatacgtaattgtaagagtataggaagtagggttgaactggtctcctaatgagattttttttggcaccagatacaattataatgtgctaactcaaaggagacattgcagagaatatgaagttaaggataatccaaaaataacctggtagccttgctgtttaatccaatttgctataaaagtaggcctttgttatattacattcaaatttaagaactttgttacccataccactttttctctatccagaagcagagtatatccacaacttaccaatgagaagttggagaggcagtacttttctcagtatggaagccaatttgggagatttactaacactggcttggaaatttgttttaaaaaaataataagcaactatgcatggatctttgaagtaaatcttaaaattgattatttttattatgtacaggcctgaaattgttttcatgtgttctttatattcctgatgtttttacaaattaaatttaggcataacttttccaagtcaatctgattttttcttttctgccagacttgaattgtgttcttcttttactttggctattctgtcaataatttaaagcattcgtattcttccagaggaattaccaatagcatgtggaaattgtttcagatctccagaatgaatacttattttaacatatgtttattttatgatttaagaaagttatggtaaagtaatatggagcatgattcataatccaaaattaacaagaaaataacttggatacattaaatgtactaatgtgtggaccaaagagatttaaactattgtttttactctagaatgaaagtataattgaacggttaataattagtttgtagagtgtcctgcagttattatcaagttgctttacattatcaattgtgtgtgtatgtgtatacttttaattttaggggttatttttggtttctttgctgttttcagttatttccattgagattttgtgcaactgtctctcttttgatgttttgagatgcagttgaatagtttgagtttgtgaattgtcttaatagctatttatatgctgaaatttttaaaaagttagtagctttcctatagacacaagaaatgtttaatgatatatatacacacacgtatatatcattatataggtatatagagagctgctatatatgaatacagtctacttggaaagctttttttcagtgaacactttcatgttctagtggaaaatttgttcagtgtaatgatcttttaaataggtttgaggatgtttgaaaattttgaattttgggaaaattttcttcacttaatagagctggagacccttgtttgggacatgacaaaagtccttattgatgtatttgggttatatactttgttaaaattcgtatgtgatttagcagtacattttcttcgtgacaaatgcaagaagggagggaggatcctctatagtggacactcctttatttaaaaaatgtttaataaaatattgtttatagtgaaatcagctccccaaagaaggaactcctacatgcccaaactaattacagttgaacatactgattaaaaatgccatagatcacagctagtcaggaggcctcaaataaactgcaaataatgcttaaaactttaaaagaaggagaaccagcagtcttccgaaccatgggacagttccaaggtaatagcctaccttgcctaggataagtgaagtcctaaatgatggctatcttcagggcctggagcagaattattctttagatcttaatgtttaccaaacagtgttacagtttgttacccaatatactttcttagtatttgcagcatacatttcactgctcaaaaaagtataagggttttgtttgtactttaaatgagagaaataaagaaatgagttggcctgtatatcttgtatttgtgatatgagcaacgggataatttgaaatcacagaatgttgtgggaaaggtctttaaagaacctctaatgaagaaaatgtggctgccacattgatgtacctaggctgccactcatacagcaaataattctattttgtaaacacttcgtgtggatccactatgtaaagtgctctaccaagtattttctctagtaagaagtacaagaattaccaagatggaattctttaccttgagtacaccaagagctagcaagatgatttttaaatcctaaaaagtttgggacaacattttgcttcctgattttagttgagagttagcctgttatccctccaaattctcattttcctggttcatccactaaatagaatttccataactgagatatcatggctgtgacatagtgaagagaatacgagactccaagccagcaacacagattgaattaagactctgtcacttgtcaactttttgaccttgagcaaatcacttaacttctctgagcctcagttcatactccgtaaaatgtgactaatacctcatgtagttattgtgaggattacgtgagattgtttatgaatggcaaagcagtatgtatttcacagtaaatgatcaactgatagtctctagaatttttttaaattacattttgcaattgcattaccaattgaatatgttgttttgtaaaattcatcaattttgtttcatttctatattttccttacatatgctttaggaaagaaactaaaaacgttttcttataatcttgcttcatctccttttcactttttctttttaaaatcagcagatctttaagaaccttttgtgaattggtggtggtggaaatggccagtgcaagcaggattaaattaggagttctgttgaccactggttaaaataggaaaagggtagagaggtagtcagccttgactcccttatctattcccacttacttcccttggattcattcagccatgttgatttattgactttctgctatttgctaattattcttcttgaaaagtaagagcgatatataacccttcagtcttctatatgtctgtttcttctgccggccctgggcccttggctctacagtgtagtgccaattctgtagaaaaatagaacgatattcagtgtctaccaagttctttcttccacaggccaagggtgcttaagccctagctgttattttgtttcttttatttatttattttttgagacggagtttcgctcttgttgcccaggctgcagtgcaatggcatgatctcagctcaccgcaacctctgcctcccaggttcaagcgattctccttcctcagcctcccgagtagctgggattacaggcgtgcaccaccatgcctggccagttttgtatttttagtagagacagatttctctatgttggtcaggctggtctcaaactcccgacctcaagggatccacccaccttggcctcccaaagtgctgggattacaggtgtaagctgccgtgcccagcctatttttttttaacttcaaatactattattttaaatttatgttcattatgtaattcagggagtaacgatgcctggagcaatttctgaaatattctcaaaccacttcactcttgacactacagatttttctctcagtctcaatcagaatctctgcagtcattatttgtttttaagatgtgagggacgaggaaaattactgaagaaattctagcagatttcgattgcagagaaatttggtaacactttttgggtaactgggtaaattactatttcttttaataatcgggtgaaactctgaattgttaaaacggaccaataatcaaatggttttataatctttcttaacttcccgtccttgttataacatcttggaagaagactcttcaggataaaaaggatattatttgattaaaaattatagcatttggagaggtaacacacaaaaacaaaaacatatttgacaaagcgccctacatcctgtgttttgttaggactagaaactatactggatgagtatgtatactgcatgtttacacatgctgtgtttctttatatgtgaggcttcactgaccaccgtgcattttgaaattgtattgcattttgtgtgtgtgtgtggtgacaggtttgctcttctcacttaaggagctctggtctgtgtaggcagtacagtgttgttagggaggttgctgaattatctaaaaatgtatccatgaatttgggggaaataatgcttaatatctgaagtattttcagtaaatgtggagatatatcagataatacttttaaattagtggaaacacatttctgagtgaactgagctatgaactataatcatctcttcccctgagtttagggaagttgttttcacattctttacatttattgcacatatactgaacttacataataactcttccctgattttgagaacgaatttagcaatttcctaaaaatcttcctcctctttccatacagatgtcgtatgttatagtttaaacatatgtacaatttgttgatagaatccaaggagctggtttaggaaagaatactcttaacccctacagttatgcagctctaatcttactgaaaagtaaatactttaggcaagtcaggagagcatgaacctcatacatacatttttacgattatgtactgcacccacatgtatctactcttggtagtaacatgactccaccctttttgggaatgtatttaggtggataactgaaacggaaaagcagtttgacacaaatacacagaaagaggaattgcggtgcataatcaatcgtctgagtcccataactgtaacactttttctcttataaattggtagttcctaaaaatcaccactttaaaaattttattctgtcttgctgaattaagcagaaatcactttttttagagccttgtttaaaggaacgttaactcgagagtactactgatgatgacgcttctcttgtttttaaagtatttacacatcattgttaagtatttttggaatggaacattttaaagttttctccatagaaagcaacatagtggcacttgttgagtaaatgatcataaaaatgacttgcttttaatagcagatgagttgatagtttaactgttgacactttcttaatgtttttgatgttggatgcatttacaatggaagaatttttttgaaagatttggccctctcaccaatacacacattcagacttgagctgcacgcatttagatgaacaaataggaaattcacggtattttttgttttagccatccaaaattcataggattctaccaaaaatattagcccctgactctagttattctgagatgagggaatcaactttatcttgaaagttaactagctaaaatgtctttatttaaatagcaaaaatatagtttacctgacaagtattaaaagtctcactttcaaattgtgttaactctcagaccactgatgaatcttttggtaaatcacaggcagattttaaaagctaaatgaagccttagtgccttgaaagttaagatacttgtgcaaaatggatttagcaagattcaggattggcaccagtgagttggctagatacacatcaccagtgactgggaattcaaagtttagaaagcctaacgaatagtagctactaacttcatatggttcaatgtaaatcagttacttagtcattgactgtgacagatgacagctactttcactatattttcatgatgtggtatttttctctattttttctttttccaagtatgaaatggaaaaaaatgtagttaagaaaattaagtgtgagactttaaaatttagttttgttgtaaactagagattctagtgaacagtgttagttttatactgtagtacagggcacacactttaacctttagaaatatgtttaccatcagggatttatttttactatagaaatactaaatgtactgtgaagcttaaagacaggagaataaatgttggaggggtaatacacaaaaacaaaggcatatttgatgaagtaccctgtgttatgtgaacacaatttccccttctgttaagactataaactatatgagtatgtgtactgcatgtttacataaaacagtttaattttgaaggattattttaaaaactatgtttatatataatacctaacaagctgtaaatattgtatattattgatttttaattttatataagcaattttttatttcccaattcatgtacaaatctcattatgtatatagcataatttcctggagaacacaaattttgcagtgaattttaagtaattttaattgcagtaagcatcagtttagcctagagatgttgatctttattttaaattatttttcaccattctcattttcttcaaagggcagcaataaacatatgcaagttatttttaattatagaaagtaggtctacaaagataagatctaggttccaattcattgctttaaggaaaagatgcacaattactatcattcagtgtctaatcacaggaccatttctgaggtccacatgtggctctcctctttgtaatatacagggtgaactctttactgatacacacaagacaactgttaaaaagtgaatccagcacttaaatgtcattacacagaatttattggattaaaaatttgtaatatacagtattttaataaagtttctgtattcaatttcatgcacttatatataaataaacctgtctttgaaagcttta

SEQ ID NO: 193729 - DNA, 1247 bp, Homo sapiens
  Payload ID: 18257
  Gene Name: transmembrane protein 171
  Uniprot ID: Q8WVE6
  ENST ID: ENST00000287773
  CDS Start-End: 197-1168
cgcaccaggacgcgcggtgggtagggtgcagggcggccggcgcagccgaggccgcgtgcggaggcggacgccgcgcccagccagtgcccacagcagcgcggtcagccaggcgccggacccagcttcagagctgctgaaatcttggagggaagaaaacacatcccaccctgcctccgggaaggggcctctcctggacatgtctcctgcagctgctgctgagccagatggggaccagcaggacagacacgtcagcaaactcatcttctgcttctttgtcttcggcgccgtcttgttgtgtgtgggagtcctgctctccatctttgggttccaggcatgccaatataagcccctcccagactgccccatggtgctcaaggtggcggggcctgcatgtgccgtggttgggcttggggctgtgatcctggcccgctcccgggcgcaacttcagctccgtgcagggctgcagagaggtcagcagatggaccccgaccgagccttcatctgtggagagagccgccagtttgcccagtgccttatctttgggtttctgttcttgacaagcggcatgctcatcagcgtcctgggcatttgggtccctggatgtggctccaactgggcgcaggaaccgctaaacgagacagacactggcgactcagagccccggatgtgtgggttcctttctctgcagatcatggggcccttgattgtgcttgtgggattgtgtttcttcgtggttgcccatgttaagaagagaaacacgctgaatgctggccaggatgcctctgagagagaagagggacagatccagattatggagcctgtccaggtcactgtaggtgactcggtaataatatttccaccccctccaccaccttactttcctgaatcttcagcttctgcggtcgctgagagtcctggaactaacagtctgcttccgaatgaaaaccccccttcatattacagtattttcaactatgggaccccaacttcagagggtgcagcctctgaaagagactgtgaatctatatataccatttctgggacgaattcatcttctgaggcctcacacactccacatcttccatctgaattgcctcctagatatgaagaaaaagaaaatgctgcagctacattcttgcctctatcttctgagccttccccaccgtaaactatggactctagttcagttttatatgcaatggatcactattttatttaattttttttaaataaaaaatacaatagca

SEQ ID NO: 193730 - DNA, 1535 bp, Homo sapiens
  Payload ID: 18257
  Gene Name: transmembrane protein 171
  Uniprot ID: Q8WVE6
  ENST ID: ENST00000454765
  CDS Start-End: 474-1448
gccggccccgccaggtgtgcgggccaggcagccgtggaaggtgcccatttctcccagattcctcgcgcgcacggccacgagcgcggaggctgccaaacccgccagccctgggttccgaagccgcccctggctctccattccctcgcgggcgcgccccgggcccccagtggcggccagctcccaccggtcgctcctgcactgccctgccctgccctccccgggccgccgcgcccgcgcagcaccgcctccttctctaaatactgccgggtccgccctccgcaccaggacgcgcggtgggtagggtgcagggcggccggcgcagccgaggccgcgtgcggaggcggacgccgcgcccagccagtgcccacagcagcgcggtcagccaggcgccggacccagcttcagagctgctgaaatcttggagggaagaaaacacatcccaccctgcctccgggaaggggcctctcctggacatgtctcctgcagctgctgctgagccagatggggaccagcaggacagacacgtcagcaaactcatcttctgcttctttgtcttcggcgccgtcttgttgtgtgtgggagtcctgctctccatctttgggttccaggcatgccaatataagcccctcccagactgccccatggtgctcaaggtggcggggcctgcatgtgccgtggttgggcttggggctgtgatcctggcccgctcccgggcgcaacttcagctccgtgcagggctgcagagaggtcagcagatggaccccgaccgagccttcatctgtggagagagccgccagtttgcccagtgccttatctttgggtttctgttcttgacaagcggcatgctcatcagcgtcctgggcatttgggtccctggatgtggctccaactgggcgcaggaaccgctaaacgagacagacactggcgactcagagccccggatgtgtgggttcctttctctgcagatcatggggcccttgattgtgcttgtgggattgtgtttcttcgtggttgcccatgttaagaagagaaacacgctgaatgctggccaggatgcctctgagagagaagagggacagatccagattatggagcctgtccaggtcactgtaggtgactcggtaataatatttccaccccctccaccaccttactttcctgaatcttcagcttctgcggtcgctgagagtcctggaactaacagtctgcttccgaatgaaaaccccccttcatattacagtattttcaactatggcaggaccccaacttcagagggtgcagcctctgaaagagactgtgaatctatatataccatttctgggacgaattcatcttctgaggcctcacacactccacatcttccatctgaattgcctcctagatatgaagaaaaagaaaatgctgcagctacattcttgcctctatcttctgagccttccccaccgtaaactatggactctagttcagttttatatgcaatggatcactattttatttaattttttttaaataaaaaatacaatagcattggctat

SEQ ID NO: 193731 - DNA, 1771 bp, Homo sapiens
  Payload ID: 18258
  Gene Name: transmembrane protein 173
  Uniprot ID: Q86WV6
  ENST ID: ENST00000330794
  CDS Start-End: 335-1474
tataaaaatagctcttgttaccggaaataactgttcatttttcactcctccctcctaggtcacacttttcagaaaaagaatctgcatcctggaaaccagaagaaaaatatgagacggggaatcatcgtgtgatgtgtgtgctgcctttggctgagtgtgtggagtcctgctcaggtgttaggtacagtgtgtttgatcgtggtggcttgaggggaacccgctgttcagagctgtgactgcggctgcactcagagaagctgcccttggctgctcgtagcgccgggccttctctcctcgtcatcatccagagcagccagtgtccgggaggcagaagatgccccactccagcctgcatccatccatcccgtgtcccaggggtcacggggcccagaaggcagccttggttctgctgagtgcctgcctggtgaccctttgggggctaggagagccaccagagcacactctccggtacctggtgctccacctagcctccctgcagctgggactgctgttaaacggggtctgcagcctggctgaggagctgcgccacatccactccaggtaccggggcagctactggaggactgtgcgggcctgcctgggctgccccctccgccgtggggccctgttgctgctgtccatctatttctactactccctcccaaatgcggtcggcccgcccttcacttggatgcttgccctcctgggcctctcgcaggcactgaacatcctcctgggcctcaagggcctggccccagctgagatctctgcagtgtgtgaaaaagggaatttcaacgtggcccatgggctggcatggtcatattacatcggatatctgcggctgatcctgccagagctccaggcccggattcgaacttacaatcagcattacaacaacctgctacggggtgcagtgagccagcggctgtatattctcctcccattggactgtggggtgcctgataacctgagtatggctgaccccaacattcgcttcctggataaactgccccagcagaccggtgaccatgctggcatcaaggatcgggtttacagcaacagcatctatgagcttctggagaacgggcagcgggcgggcacctgtgtcctggagtacgccacccccttgcagactttgtttgccatgtcacaatacagtcaagctggctttagccgggaggataggcttgagcaggccaaactcttctgccggacacttgaggacatcctggcagatgcccctgagtctcagaacaactgccgcctcattgcctaccaggaacctgcagatgacagcagcttctcgctgtcccaggaggttctccggcacctgcggcaggaggaaaaggaagaggttactgtgggcagcttgaagacctcagcggtgcccagtacctccacgatgtcccaagagcctgagctcctcatcagtggaatggaaaagcccctccctctccgcacggatttctcttgagacccagggtcaccaggccagagcctccagtggtctccaagcctctggactgggggctctcttcagtggctgaatgtccagcagagctatttccttccacagggggccttgcagggaagggtccaggacttgacatcttaagatgcgtcttgtccccttgggccagtcatttcccctctctgagcctcggtgtcttcaacctgtgaaatgggatcataatcactgccttacctccctcacggttgttgtgaggactgagtgtgtggaagtttttcataaactttggatgctagtgta

SEQ ID NO: 193732 - DNA, 901 bp, Homo sapiens
  Payload ID: 18258
  Gene Name: transmembrane protein 173
  ENST ID: ENST00000510817
  CDS Start-End: 143-901
ggctagagtgttgtggagaaaccaatcgttgttaacatctcattttcaggctgcactcagagaagctgcccttggctgctcgtagcgccgggccttctctcctcgtcatcatccagagcagccagtgtccgggaggcagaagatgccccactccagcctgcatccatccatcccgtgtcccaggggtcacggggcccagaaggcagccttggttctgctgagtgcctgcctggtgaccctttgggggctaggagagccaccagagcacactctccggtacctggtgctccacctagcctccctgcagctgggactgctgttaaacggggtctgcagcctggctgaggagctgcgccacatccactccaggtaccggggcagctactggaggactgtgcgggcctgcctgggctgccccctccgccgtggggccctgttgctgctgtccatctatttctactactccctcccaaatgcggtcggcccgcccttcacttggatgcttgccctcctgggcctctcgcaggcactgaacatcctcctgggcctcaagggcctggccccagctgagatctctgcagtgtgtgaaaaagggaatttcaacgtggcccatgggctggcatggtcatattacatcggatatctgcggctgatcctgccagagctccaggcccggattcgaacttacaatcagcattacaacaacctgctacggggtgcagtgagccagcggctgtatattctcctcccattggactgtggggtgcctgataacctgagtatggctgaccccaacattcgcttcctggataaactgccccagcagaccggtgaccatgctggcatcaaggatcgggtttacagcaacagcatctatgagcttctggagaacgggcagcgg

SEQ ID NO: 193733 - DNA, 1759 bp, Homo sapiens
  Payload ID: 18259
  Gene Name: transmembrane protein 174
  Uniprot ID: Q8WUU8
  ENST ID: ENST00000296776
  CDS Start-End: 50-781
tctcacaatcctctccactctaagaagcagggtgagcccacaaggagcaatggagcagggcagcggccgcttggaggacttccctgtcaatgtgttctccgtcactccttacacacccagcaccgctgacatccaggtgtccgatgatgacaaggcgggggccaccttgctcttctcaggcatctttctgggactggtggggatcacattcactgtcatgggctggatcaaataccaaggtgtctcccactttgaatggacccagctccttgggcccgtcctgctgtcagttggggtgacattcatcctgattgctgtgtgcaagttcaaaatgctctcctgccagttgtgcaaagaaagtgaggaaagggtcccggactcggaacagacaccaggaggaccatcatttgttttcactggcatcaaccaacccatcaccttccatggggccactgtggtgcagtacatccctcctccttatggttctccagagcctatggggataaataccagctacctgcagtctgtggtgagcccctgcggcctcataacctctggaggggcagcagccgccatgtcaagtcctcctcaatactacaccatctaccctcaagataactctgcatttgtggttgatgagggctgcctttctttcacggacggtggaaatcacaggcccaatcctgatgttgaccagctagaagagacacagctggaagaggaggcctgtgcctgcttctctcctcccccttatgaagaaatatactctctccctcgctagaggctattctgatataataacacaatgctcagctcagggagcaagtgtttccgtcattgttacctgacaaccgtggtgttctatgttgtaaccttcagaagttacagcagcgcccaggcagcctgacagagatcattcaaggggggaaaggggaagtgggaggtgcaatttctcagattggtaaaaattaggctgggctggggaaattctcctccggaacagtttcaaattccctcgggtaagaaatctcctgtataaggttcaggagcaggaatttcactttttcatccaccaccctcccccttctctgtaggaaggcattggtggctcaattttaaccccagcagccaatggaaaaatcacgacttctgagactttgggagtttccacagaggtgagagtcgggtgggaaggaagcagggaagagaaagcaggcccagctggagatttcctggtggctgtccttggccccaaagcagactcactaatcccaaacaactcagctgccatctggcctctctgaggactctgggtaccttaaagactataaaacaaaacaaaacaaaaacatcaaaccaatgaaataaaataaatcatgtctcctgctagaatagtattggatacctgactaaattacacaaaatagaccataataggatagcgctgtgaatacatccttcccgatcactgagtcacagtgacccttggctgctgctgttctcttctgcaaggttgaagcttgacgtgtgatgaacatgggtgggctcttggtccaccccaggctggggcctgcgccaagcatgaactagctgggaccagtggctgacagaacacaggacttccctaagtacccgtaggtctgtggagcaagacagagcagagttgccatgtcaacacatggggaatgatatgatagaaacaatctttatgactaaaagaaactcatcttcttcattaaaaaaactttggtgtccttaa

SEQ ID NO: 193734 - DNA, 1860 bp, Homo sapiens
  Payload ID: 18260
  Gene Name: transmembrane protein 175
  Uniprot ID: Q9BSA9
  ENST ID: ENST00000264771
  CDS Start-End: 186-1700
acttcctggctgcgcgcgcaggcgcggaggtctgacggagacagcgcgtgcgcggcgtcgccgggcttgcgatgaacttccggctgtcaagctcccggccgggctgactcaagcggaggcgcgcggaacagtcgccgaggcgattcccgcccaggctcctgtaaccgccaggcagcggccccgccatgtcccagccccggaccccagagcaggcactggatacaccgggggactgccccccaggcaggagagacgaggacgctggggaggggatccagtgctcccaacgcatgctcagcttcagtgacgccctgctgtccatcatcgccaccgtcatgatcctgcctgtgacccacacggagatctccccagaacagcagttcgacagaagtgtacagaggcttctggcaacacggattgccgtctacctgatgacctttctcatcgtgacagtggcctgggcagcacacacaaggttgttccaagttgttgggaaaacagacgacacacttgccctgctcaacctggcctgcatgatgaccatcaccttcctgccttacacgttttcgttaatggtgaccttccctgatgtgcctctgggcatcttcttgttctgtgtgtgtgtgatcgccattggggtcgtgcaggcactgattgtggggtacgcattccacttcccgcacctgctgagcccgcagatccagcgctctgcccacagggctctgtaccgacgacacgtcctgggcatcgtcctccaaggcccggccctgtgctttgcagcggccatcttctctctcttctttgtccccttgtcttacctgctgatggtgactgtcatcctcctcccctatgtcagcaaggtcaccggctggtgcagagacaggctcctgggccacagggagccctcggctcacccagtggaagtcttctcgtttgacctccacgagccactcagcaaggagcgcgtggaagccttcagcgacggagtctacgccatcgtggccacgcttctcatcctggacatctgcgaagacaacgtcccggaccccaaggatgtgaaggagaggttcagcggcagcctcgtggccgccctgagtgcgaccgggccgcgcttcctggcgtacttcggctccttcgccacagtgggactgctgtggttcgcccaccactcactcttcctgcatgtgcgcaaggccacgcgggccatggggctgctgaacacgctctcgctggccttcgtgggtggcctcccactagcctaccagcagacctcggccttcgcccggcagccccgcgatgagctggagcgcgtgcgtgtcagctgcaccatcatcttcctggccagcatcttccagctggccatgtggaccacggcgctgctgcaccaggcggagacgctgcagccctcggtgtggtttggcggccgggagcatgtgctcatgttcgccaagctggcgctgtacccctgtgccagcctgctggccttcgcctccacctgcctgctgagcaggttcagtgtgggcatcttccacctcatgcagatcgccgtgccctgcgccttcctgttgctgcgcctgctcgtgggcctggccctggccaccctgcgggtcctgcggggcctcgcccggcccgaacaccccccgccagcccccacgggccaggacgacccacagtcccagctcctccctgccccctgctagcagccacagagcccactcccagccgtcctcaccagagatggaccagggaggacaggatgctgggcaggggaagccaagtcacgggcaggccgcagtggttcttgcgtggcctggttttattttcattgtgaaatatcatgctcttatttcagtcctcaaa

SEQ ID NO: 193735 - DNA, 621 bp, Homo sapiens
  Payload ID: 18260
  Gene Name: transmembrane protein 175
  ENST ID: ENST00000509508
  CDS Start-End: 136-621
gaacttccggctgtcaagctcccggccgggctgactcaagcggaggcgcgcggaacagtcgccgaggcgattcccgcccagcagttcgacagaagtgtacagaggcttctggcaacacggattgccgtctacctgatgacctttctcatcgtgacagtggcctgggcagcacacacaaggttgttccaagttgttgggaaaacagacgacacacttgccctgctcaacctgttttcgttaatggtgaccttccctgatgtgcctctgggcatcttcttgttctgtgtgtgtgtgatcgccattggggtcgtgcaggcactgattgtggggtacgcattccacttcccgcacctgctgagcccgcagatccagcgctctgcccacagggctctgtaccgacgacacgtcctgggcatcgtcctccaaggcccggccctgtgctttgcagcggccatcttctctctcttctttgtccccttgtcttacctgctgatggtgactgtcatcctcctcccctatgtcagcaaggtcaccggctggtgcagagacaggctcctgggccacagggagccctcggctcacccagtggaagtcttctcgtttgacctccacgagccactc

SEQ ID NO: 193736 - DNA, 1399 bp, Homo sapiens
  Payload ID: 18260
  Gene Name: transmembrane protein 175
  ENST ID: ENST00000508204
  CDS Start-End: 118-1386
ctcccggccgggctgactcaagcggaggcgcgcggaacagtcgccgaggcgattcccgcccagcagttcgacagaagtgtacagaggcttctggcaacacggattgccgtctacctgatgacctttctcatcgtgacagtggcctgggcagcacacacaaggttgttccaagttgttgggaaaacagacgacacacttgccctgctcaacctggcctgcatgatgaccatcaccttcctgccttacacgttttcgttaatggtgaccttccctgatgtgcctctgggcatcttcttgttctgtgtgtgtgtgatcgccattggggtcgtgcaggcactgattgtggggtacgcattccacttcccgcacctgctgagcccgcagatccagcgctctgcccacagggctctgtaccgacgacacgtcctgggcatcgtcctccaaggcccggccctgtgctttgcagcggccatcttctctctcttctttgtccccttgtcttacctgctgatggtgactgtcatcctcctcccctatgtcagcaaggtcaccggctggtgcagagacaggctcctgggccacagggagccctcggctcacccagtggaagtcttctcgtttgacctccacgagccactcagcaaggagcgcgtggaagccttcagcgacggagtctacgccatcgtggccacgcttctcatcctggacatctgcgaagacaacgtcccggaccccaaggatgtgaaggagaggttcagcggcagcctcgtggccgccctgagtgcgaccgggccgcgcttcctggcgtacttcggctccttcgccacagtgggactgctgtggttcgcccaccactcactcttcctgcatgtgcgcaaggccacgcgggccatggggctgctgaacacgctctcgctggccttcgtgggtggcctcccactagcctaccagcagacctcggccttcgcccggcagccccgcgatgagctggagcgcgtgcgtgtcagctgcaccatcatcttcctggccagcatcttccagctggccatgtggaccacggcgctgctgcaccaggcggagacgctgcagccctcggtgtggtttggcggccgggagcatgtgctcatgttcgccaagctggcgctgtacccctgtgccagcctgctggccttcgcctccacctgcctgctgagcaggttcagtgtgggcatcttccacctcatgcagatcgccgtgccctgcgccttcctgttgctgcgcctgctcgtgggcctggccctggccaccctgcgggtcctgcggggcctcgcccggcccgaacaccccccgccagcccccacgggccaggacgacccacagtcccagctcctccctgccccctgctagcagccacagagcc

SEQ ID NO: 193737 - DNA, 776 bp, Homo sapiens
  Payload ID: 18260
  Gene Name: transmembrane protein 175
  ENST ID: ENST00000504744
  CDS Start-End: 127-345
gccgggcttgcgatgaacttccggctgtcaagctcccggccgggctgactcaagcggaggcgcgcggaacagtcgccgaggcgattcccgcccaggctcctgtaaccgccaggcagcggccccgccatgtcccagccccggaccccagagcaggcactggatacaccgggggactgccccccaggcaggagagacgaggacgctggggaggggatccagtgctcccaacgcatgctcagcttcagtgacgccctgctgtccatcatcgccaccgtcatgatcctgcctgtgacccacacggagatctccccagaacagtggacaaaggcagcaccctggaagtgagccagaggacaggttggaagaggaaggttccgggcctgccccaaggacagaagtttcctctgcgggagggcagctgccccagcaggcaggccccttacgtagctgctctgagtaaacgcggccagcgccccgtctcagcggggacactcccaccccggctgctcctgcaggcctggagttcgacagaagtgtacagaggcttctggcaacacggattgccgtctacctgatgacctttctcatcgtgacagtggcctgggcagcacacacaaggttgttccaagttgttgggaaaacagacgacacacttgccctgctcaacctggcctgcatgatgaccatcaccttcctgccttacacgttttcgttaatggtgaccttccctgatgtgcctctgggcatcttcttgttctgtgtgtgtgtgatcgcca

SEQ ID NO: 193738 - DNA, 1006 bp, Homo sapiens
  Payload ID: 18260
  Gene Name: transmembrane protein 175
  ENST ID: ENST00000510493
  CDS Start-End: 155-1006
cccggccgggctgactcaagcggaggcgcgcggaacagtcgccgaggcgattcccgcccagatcctgcctgtgacccacacggagatctccccagaacagcagttcgacagaagtgtacagaggcttctggcaacacggattgccgtctacctgatgacctttctcatcgtgacagtggcctgggcagcacacacaaggttgttccaagttgttgggaaaacagacgacacacttgccctgctcaacctggcctgcatgatgaccatcaccttcctgccttacacgttttcgttaatggtgaccttccctgatgtgcctctgggcatcttcttgttctgtgtgtgtgtgatcgccattggggtcgtgcaggcactgattgtggggtacgcattccacttcccgcacctgctgagcccgcagatccagcgctctgcccacagggctctgtaccgacgacacgtcctgggcatcgtcctccaaggcccggccctgtgctttgcagcggccatcttctctctcttctttgtccccttgtcttacctgctgatggtgactgtcatcctcctcccctatgtcagcaaggtcaccggctggtgcagagacaggctcctgggccacagggagccctcggctcacccagtggaagtcttctcgtttgacctccacgagccactcagcaaggagcgcgtggaagccttcagcgacggagtctacgccatcgtggccacgcttctcatcctggacatctgcgaagacaacgtcccggaccccaaggatgtgaaggagaggttcagcggcagcctcgtggccgccctgagtgcgaccgggccgcgcttcctggcgtacttcggctccttcgccacagtgggactgctgtggttcgcccaccactcactcttcctgcatgtgcgcaaggccacgcgggccatggggctgctgaacacgctctcgctggccttcgtgggtggcctcccactagcctaccagcagacctcggccttcgcc

SEQ ID NO: 193739 - DNA, 525 bp, Homo sapiens
  Payload ID: 18260
  Gene Name: transmembrane protein 175
  ENST ID: ENST00000507319
  CDS Start-End: 186-525
acttcctggctgcgcgcgcaggcgcggaggtctgacggagacagcgcgtgcgcggcgtcgccgggcttgcgatgaacttccggctgtcaagctcccggccgggctgactcaagcggaggcgcgcggaacagtcgccgaggcgattcccgcccaggctcctgtaaccgccaggcagcggccccgccatgtcccagccccggaccccagagcaggcactggatacaccgggggactgccccccaggcaggagagacgaggacgctggggaggggatccagtgctcccaacgcatgctcagcttcagtgacgccctgctgtccatcatcgccaccgtcatgatcctgcctgtgacccacacggagatctccccagaacagttcgacagaagtgtacagaggcttctggcaacacggattgccgtctacctgatgacctttctcatcgtgacagtggcctgggcagcacacacaaggttgttccaagttgttgggaaaacagacgacacacttgccctgctcaacctgg

SEQ ID NO: 193740 - DNA, 683 bp, Homo sapiens
  Payload ID: 18260
  Gene Name: transmembrane protein 175
  ENST ID: ENST00000514453
  CDS Start-End: 147-683
gacagcgcgtgcgcggcgtcgccgggcttgcgatgaacttccggctgtcaagctcccggccgggctgactcaagcggaggcgcgcggaacagtcgccgaggcgattcccgcccaggctcctgtaaccgccaggcagcggccccgccatgtcccagccccggaccccagagcaggcactggatacaccgggggactgccccccaggcaggagagacgaggacgctggggaggggatccagtgctcccaacgcatgctcagcttcagtgacgccctgctgtccatcatcgccaccgtcatgcagttcgacagaagtgtacagaggcttctggcaacacggattgccgtctacctgatgacctttctcatcgtgacagtggcctgggcagcacacacaaggttgttccaagttgttgggaaaacagacgacacacttgccctgctcaacctggcctgcatgatgaccatcaccttcctgccttacacgttttcgttaatggtgaccttccctgatgtgcctctgggcatcttcttgttctgtgtgtgtgtgatcgccattggggtcgtgcaggcactgattgtggggtacgcattccacttcccgcacctgctgagcccgcagatccagcgctctgcccacagggctctgtaccgacgacacgtcctgggcatcgtcctccaaggc

SEQ ID NO: 193741 - DNA, 619 bp, Homo sapiens
  Payload ID: 18260
  Gene Name: transmembrane protein 175
  ENST ID: ENST00000514546
  CDS Start-End: 219-619
cggccgggctgactcaagcggaggcgcgcggaacagtcgccgaggcgattcccgcccagctcccctgccctgagacagcctccggtgcttctgctgtgtcccaggaaacaagcctgaagcaagcactcaccatccctcaagaatgtgccctgacctaccttcctcaccacggtggcatcagggccaggctcctgtaaccgccaggcagcggccccgccatgtcccagccccggaccccagagcaggcactggatacaccgggggactgccccccaggcaggagagacgaggacgctggggaggggatccagtgctcccaacgcatgctcagcttcagtgacgccctgctgtccatcatcgccaccgtcatgatcctgcctgtgacccacacggagatctccccagaacagcagttcgacagaagtgtacagaggcttctggcaacacggattgccgtctacctgatgacctttctcatcgtgacagtggcctgggcagcacacacaaggttgttccaagttgttgggaaaacagacgacacacttgccctgctcaacctggcctgcatgatgaccatcaccttcctgccttacacgttttcgttaatggtgaccttccc

SEQ ID NO: 193742 - DNA, 784 bp, Homo sapiens
  Payload ID: 18260
  Gene Name: transmembrane protein 175
  ENST ID: ENST00000515492
  CDS Start-End: 149-784
tcgccgggcttgcgatgaacttccggctgtcaagctcccggccgggctgactcaagcggaggcgcgcggaacagtcgccgaggcgattcccgcccagttcgacagaagtgtacagaggcttctggcaacacggattgccgtctacctgatgacctttctcatcgtgacagtggcctgggcagcacacacaaggttgttccaagttgttgggaaaacagacgacacacttgccctgctcaacctggcctgcatgatgaccatcaccttcctgccttacacgttttcgttaatggtgaccttccctgatgtgcctctgggcatcttcttgttctgtgtgtgtgtgatcgccattggggtcgtgcaggcactgattgtggggtacgcattccacttcccgcacctgctgagcccgcagatccagcgctctgcccacagggctctgtaccgacgacacgtcctgggcatcgtcctccaaggcccggccctgtgctttgcagcggccatcttctctctcttctttgtccccttgtcttacctgctgatggtgactgtcatcctcctcccctatgtcagcaaggtcaccggctggtgcagagacaggctcctgggccacagggagccctcggctcacccagtggaagtcttctcgtttgacctccacgagccactcagcaaggagcgcgtggaagccttcagcgacggagtctacgccatcgtggccacgcttctcatcctggacatctgcgaagacaacgtcccggaccccaaggatgtgaaggagagg

SEQ ID NO: 193743 - DNA, 1514 bp, Homo sapiens
  Payload ID: 18260
  Gene Name: transmembrane protein 175
  Uniprot ID: Q9BSA9
  ENST ID: ENST00000515740
  CDS Start-End: 269-1435
tccggctgtcaagctcccggccgggctgactcaagcggaggcgcgcggaacagtcgccgaggcgattcccgcccagcagttcgacagaagtgtacagaggcttctggcaacacggattgccgtctacctgatgacctttctcatcgtgacagtggcctgggcagcacacacaaggttgttccaagttgttgggaaaacagacgacacacttgccctgctcaacctggccgcatcatggctgtgatgccctccctccctccaggcctgcatgatgaccatcaccttcctgccttacacgttttcgttaatggtgaccttccctgatgtgcctctgggcatcttcttgttctgtgtgtgtgtgatcgccattggggtcgtgcaggcactgattgtggggtacgcattccacttcccgcacctgctgagcccgcagatccagcgctctgcccacagggctctgtaccgacgacacgtcctgggcatcgtcctccaaggcccggccctgtgctttgcagcggccatcttctctctcttctttgtccccttgtcttacctgctgatggtgactgtcatcctcctcccctatgtcagcaaggtcaccggctggtgcagagacaggctcctgggccacagggagccctcggctcacccagtggaagtcttctcgtttgacctccacgagccactcagcaaggagcgcgtggaagccttcagcgacggagtctacgccatcgtggccacgcttctcatcctggacatctgcgaagacaacgtcccggaccccaaggatgtgaaggagaggttcagcggcagcctcgtggccgccctgagtgcgaccgggccgcgcttcctggcgtacttcggctccttcgccacagtgggactgctgtggttcgcccaccactcactcttcctgcatgtgcgcaaggccacgcgggccatggggctgctgaacacgctctcgctggccttcgtgggtggcctcccactagcctaccagcagacctcggccttcgcccggcagccccgcgatgagctggagcgcgtgcgtgtcagctgcaccatcatcttcctggccagcatcttccagctggccatgtggaccacggcgctgctgcaccaggcggagacgctgcagccctcggtgtggtttggcggccgggagcatgtgctcatgttcgccaagctggcgctgtacccctgtgccagcctgctggccttcgcctccacctgcctgctgagcaggttcagtgtgggcatcttccacctcatgcagatcgccgtgccctgcgccttcctgttgctgcgcctgctcgtgggcctggccctggccaccctgcgggtcctgcggggcctcgcccggcccgaacaccccccgccagcccccacgggccaggacgacccacagtcccagctcctccctgccccctgctagcagccacagagcccactcccagccgtcctcaccagagatggaccagggaggacaggatgctgggcaggggaagccaagt

SEQ ID NO: 193744 - DNA, 2084 bp, Homo sapiens
  Payload ID: 18260
  Gene Name: transmembrane protein 175
  ENST ID: ENST00000513952
  CDS Start-End: 169-387
gcaggcgcggaggtctgacggagacagcgcgtgcgcggcgtcgccgggcttgcgatgaacttccggctgtcaagctcccggccgggctgactcaagcggaggcgcgcggaacagtcgccgaggcgattcccgcccaggctcctgtaaccgccaggcagcggccccgccatgtcccagccccggaccccagagcaggcactggatacaccgggggactgccccccaggcaggagagacgaggacgctggggaggggatccagtgctcccaacgcatgctcagcttcagtgacgccctgctgtccatcatcgccaccgtcatgatcctgcctgtgacccacacggagatctccccagaacagtggacaaaggcagcaccctggaagtgagccagaggacaggttggaagaggaaggttccgggcctgccccaaggacagaagtttcctctgcgggagggcagctgccccagcaggcaggccccttacgtagctgctctgagtaaacgcggccagcgccccgtctcagcggggacactcccaccccggctgctcctgcaggcctggagcagttcgacagaagtgtacagaggcttctggcaacacggattgccgtctacctgatgacctttctcatcgtgacagtggcctgggcagcacacacaaggttgttccaagttgttgggaaaacagacgacacacttgccctgctcaacctggccgcatcatggctgtgatgccctccctccctccaggcctgcatgatgaccatcaccttcctgccttacacgttttcgttaatggtgaccttccctgatgtgcctctgggcatcttcttgttctgtgtgtgtgtgatcgccattggggtcgtgcaggcactgattgtggggtacgcattccacttcccgcacctgctgagcccgcagatccagcgctctgcccacagggctctgtaccgacgacacgtcctgggcatcgtcctccaaggcccggccctgtgctttgcagcggccatcttctctctcttctttgtccccttgtcttacctgctgatggtgactgtcatcctcctcccctatgtcagcaaggtcaccggctggtgcagagacaggctcctgggccacagggagccctcggctcacccagtggaagtcttctcgtttgacctccacgagccactcagcaaggagcgcgtggaagccttcagcgacggagtctacgccatcgtggccacgcttctcatcctggacatctgcgaagacaacgtcccggaccccaaggatgtgaaggagaggttcagcggcagcctcgtggccgccctgagtgcgaccgggccgcgcttcctggcgtacttcggctccttcgccacagtgggactgctgtggttcgcccaccactcactcttcctgcatgtgcgcaaggccacgcgggccatggggctgctgaacacgctctcgctggccttcgtgggtggcctcccactagcctaccagcagacctcggccttcgcccggcagccccgcgatgagctggagcgcgtgcgtgtcagctgcaccatcatcttcctggccagcatcttccagctggccatgtggaccacggcgctgctgcaccaggcggagacgctgcagccctcggtgtggtttggcggccgggagcatgtgctcatgttcgccaagctggcgctgtacccctgtgccagcctgctggccttcgcctccacctgcctgctgagcaggttcagtgtgggcatcttccacctcatgcagatcgccgtgccctgcgccttcctgttgctgcgcctgctcgtgggcctggccctggccaccctgcgggtcctgcggggcctcgcccggcccgaacaccccccgccagcccccacgggccaggacgacccacagtcccagctcctccctgccccctgctagcagccacagagcccactcccagccgtcctcaccagagatggaccagggaggacaggatgctgggcaggggaagccaagtcacgggcaggccgcagtggttcttgcgtggcctggttttattttcattgtgaaatatcatgctcttatttcagtcctcaaa

SEQ ID NO: 193745 - DNA, 581 bp, Homo sapiens
  Payload ID: 18260
  Gene Name: transmembrane protein 175
  ENST ID: ENST00000513682
  CDS Start-End: 111-344
acttccggctgtcaagctcccggccgggctgactcaagcggaggcgcgcggaacagtcgccgaggcgattcccgcccaggctcctgtaaccgccaggcagcggccccgccatgtcccagccccggaccccagagcaggcactggatacaccgggggactgccccccaggcaggagagacgaggacgctggggaggggatccagtgctcccaacgcatgctcagcttcagtgacgccctgctgtccatcatcgccaccgtcatgatcctgcctgtgacccacacggagatctccccagaacagctgccccagcaggcaggccccttacgtagctgctctgagtaaacgcggccagcgccccgtctcagcggggacactcccaccccggctgctcctgcaggcctggagcagttcgacagaagtgtacagaggcttctggcaacacggattgccgtctacctgatgacctttctcatcgtgacagtggcctgggcagcacacacaaggttgttccaagttgttgggaaaacagacgacacacttgccctgctcaacctggcctgcatgatgaccatcaccttc

SEQ ID NO: 193746 - DNA, 1967 bp, Homo sapiens
  Payload ID: 18260
  Gene Name: transmembrane protein 175
  Uniprot ID: Q9BSA9
  ENST ID: ENST00000622959
  CDS Start-End: 645-1811
gtcgccgaggcgattcccgcccaggctcctgtaaccgccaggcagcggccccgccatgtcccagccccggaccccagagcaggcactggatacaccgggggactgccccccaggcaggagagacgaggacgctggggaggggatccagtgctcccaacgcatgctcagcttcagtgacgccctgctgtccatcatcgccaccgtcatgatcctgcctgtgacccacacggagatctccccagaacagtggacaaaggcagcaccctggaagtgagccagaggacaggttggaagaggaaggttccgggcctgccccaaggacagaagtttcctctgcgggagggcagctgccccagcaggcaggccccttacgtagctgctctgagtaaacgcggccagcgccccgtctcagcggggacactcccaccccggctgctcctgcaggcctggagcagttcgacagaagtgtacagaggcttctggcaacacggattgccgtctacctgatgacctttctcatcgtgacagtggcctgggcagcacacacaaggttgttccaagttgttgggaaaacagacgacacacttgccctgctcaacctggccgcatcatggctgtgatgccctccctccctccaggcctgcatgatgaccatcaccttcctgccttacacgttttcgttaatggtgaccttccctgatgtgcctctgggcatcttcttgttctgtgtgtgtgtgatcgccattggggtcgtgcaggcactgattgtggggtacgcattccacttcccgcacctgctgagcccgcagatccagcgctctgcccacagggctctgtaccgacgacacgtcctgggcatcgtcctccaaggcccggccctgtgctttgcagcggccatcttctctctcttctttgtccccttgtcttacctgctgatggtgactgtcatcctcctcccctatgtcagcaaggtcaccggctggtgcagagacaggctcctgggccacagggagccctcggctcacccagtggaagtcttctcgtttgacctccacgagccactcagcaaggagcgcgtggaagccttcagcgacggagtctacgccatcgtggccacgcttctcatcctggacatctgcgaagacaacgtcccggaccccaaggatgtgaaggagaggttcagcggcagcctcgtggccgccctgagtgcgaccgggccgcgcttcctggcgtacttcggctccttcgccacagtgggactgctgtggttcgcccaccactcactcttcctgcatgtgcgcaaggccacgcgggccatggggctgctgaacacgctctcgctggccttcgtgggtggcctcccactagcctaccagcagacctcggccttcgcccggcagccccgcgatgagctggagcgcgtgcgtgtcagctgcaccatcatcttcctggccagcatcttccagctggccatgtggaccacggcgctgctgcaccaggcggagacgctgcagccctcggtgtggtttggcggccgggagcatgtgctcatgttcgccaagctggcgctgtacccctgtgccagcctgctggccttcgcctccacctgcctgctgagcaggttcagtgtgggcatcttccacctcatgcagatcgccgtgccctgcgccttcctgttgctgcgcctgctcgtgggcctggccctggccaccctgcgggtcctgcggggcctcgcccggcccgaacaccccccgccagcccccacgggccaggacgacccacagtcccagctcctccctgccccctgctagcagccacagagcccactcccagccgtcctcaccagagatggaccagggaggacaggatgctgggcaggggaagccaagtcacgggcaggccgcagtggttcttgcgtggcctggttttattttcattgtgaaatatcatgctcttatttcagtcct

SEQ ID NO: 193747 - DNA, 1261 bp, Homo sapiens
  Payload ID: 18261
  Gene Name: transmembrane protein 176A
  Uniprot ID: Q96HP8
  ENST ID: ENST00000004103
  CDS Start-End: 302-1009
gcacgccggccctggccgggcggggctggaggcgagaacgaccccacgggctttcccagggccgtccgcccgcggaccctcccagctccccagagcccagtgaccctcgcgcagcaggagaaccccagacggaccccaggccctgcagcctgtcatgaacccgaggggctgaagttcagccccacccccgcctcccctccccgcctccccctccaactctcaacccacttctccagccagcgccccagccctcccgccgcccgctcgcaggtcccgaggagcgcagactgtgtccctgacaatgggaacagccgacagtgatgagatggccccggaggccccacagcacacccacatcgatgtgcacatccaccaggagtctgccctggccaagctcctgctcacctgctgctctgcgctgcggccccgggccacccaggccaggggcagcagccggctgctggtggcctcgtgggtgatgcagatcgtgctggggatcttgagtgcagtcctaggaggatttttctacatccgcgactacaccctcctcgtcacctcgggagctgccatctggacaggggctgtggctgtgctggctggagctgctgccttcatttacgagaaacggggtggtacatactgggccctgctgaggactctgctaacgctggcagctttctccacagccatcgctgccctcaaactttggaatgaagatttccgatatggctactcttattacaacagtgcctgccgcatctccagctcgagtgactggaacactccagcccccactcagagtccagaagaagtcagaaggctacacctatgtacctccttcatggacatgctgaaggccttgttcagaacccttcaggccatgctcttgggtgtctggattctgctgcttctggcatctctgacccctctgtggctgtactgctggagaatgttcccaaccaaagggaaaagagaccagaaggaaatgttggaagtgagtggaatctagccatgcctctcctgattattagtgcctggtgcttctgcaccgggcgtccctgcatctgactgctggaagaagaaccagactgaggaaaagaggctcttcaacagccccagttatcctggccccatgaccgtggccacagccctgctccagcagcacttgcccattccttacaccccttccccatcctgctccgcttcatgtcccctcctgagtagtcatgtgataataaactctcatgttattgttcccagg

SEQ ID NO: 193748 - DNA, 1530 bp, Homo sapiens
  Payload ID: 18261
  Gene Name: transmembrane protein 176A
  Uniprot ID: Q96HP8
  ENST ID: ENST00000484928
  CDS Start-End: 582-1289
ggccccgcccaggctgcgcggtttcccgaaaccagctgcggcccgggggcccggcaaagggggttccgcccggaggagcggaccgggcgggagaagaccgagcccccgcgcgccccctgcgctcccactcgcgcacacttgcacgccggccctggccgggcggggctggaggcgagaacgaccccacgggctttcccagggccgtccgcccgcggaccctcccagctccccagagcccagtgaccctcgcgcagcaggagaaccccagacggaccccaggccctgcagcctgtcatgaacccgaggggctgaagttcagccccacccccgcctcccctccccgcctccccctccaactctcaacccacttctccagccagcgccccagccctcccgccgcccgctcgcaggtcccgaggagcgcaggtgaggcggcaccccactcccggcggcccccgggcctccttccgcacgcaccccgagctgcctccgcacagttggaggagcgtaggagggacccccacccagggatgacactccaggaaggggactgcagaggaagccagactgtgtccctgacaatgggaacagccgacagtgatgagatggccccggaggccccacagcacacccacatcgatgtgcacatccaccaggagtctgccctggccaagctcctgctcacctgctgctctgcgctgcggccccgggccacccaggccaggggcagcagccggctgctggtggcctcgtgggtgatgcagatcgtgctggggatcttgagtgcagtcctaggaggatttttctacatccgcgactacaccctcctcgtcacctcgggagctgccatctggacaggggctgtggctgtgctggctggagctgctgccttcatttacgagaaacggggtggtacatactgggccctgctgaggactctgctaacgctggcagctttctccacagccatcgctgccctcaaactttggaatgaagatttccgatatggctactcttattacaacagtgcctgccgcatctccagctcgagtgactggaacactccagcccccactcagagtccagaagaagtcagaaggctacacctatgtacctccttcatggacatgctgaaggccttgttcagaacccttcaggccatgctcttgggtgtctggattctgctgcttctggcatctctgacccctctgtggctgtactgctggagaatgttcccaaccaaagggaaaagagaccagaaggaaatgttggaagtgagtggaatctagccatgcctctcctgattattagtgcctggtgcttctgcaccgggcgtccctgcatctgactgctggaagaagaaccagactgaggaaaagaggctcttcaacagccccagttatcctggccccatgaccgtggccacagccctgctccagcagcacttgcccattccttacaccccttccccatcctgctccgcttcatgtcccctcctgagtagtcatgtgataataaactctcatgtta

SEQ ID NO: 193749 - DNA, 827 bp, Homo sapiens
  Payload ID: 18261
  Gene Name: transmembrane protein 176A
  ENST ID: ENST00000475536
  CDS Start-End: 1-534
ggcagcagccggctgctggtggcctcgtgggtgatgcagatcgtgctggggatcttgagtgcagtcctaggaggatttttctacatccgcgactacaccctcctcgtcacctcgggagctgccatctggacaggggctgtggctgtgctggctggagctgctgccttcatttacgagaaacggggtggtacatactgggccctgctgaggactctgctaacgctggcagctttctccacagccatcgctgccctcaaactttggaatgaagatttccgatatggctactcttattacaacagtgcctgccgcatctccagctcgagtgactggaacactccagcccccactcagagtccagaagaagtcagaaggctacacctatgtacctccttcatggacatgctgaaggccttgttcagaacccttcaggccatgctcttgggtgtctggattctgctgcttctggcatctctgacccctctgtggctgtactgctggagaatgttcccaaccaaaggggtgagtccctaagaaaagagaccagaaggaaatgttggaagtgagtggaatctagccatgcctctcctgattattagtgcctggtgcttctgcaccgggcgtccctgcatctgactgctggaagaagaaccagactgaggaaaagaggctcttcaacagccccagttatcctggccccatgaccgtggccacagccctgctccagcagcacttgcccattccttacaccccttccccatcctgctccgcttcatgtcccctcctgagtagtcatgtgataataaactctcatgttattgttccca

SEQ ID NO: 193750 - DNA, 469 bp, Homo sapiens
  Payload ID: 18261
  Gene Name: transmembrane protein 176A
  ENST ID: ENST00000468689
  CDS Start-End: 116-469
gaggaactccccacctccagccgcagcagcactctctgccagcctccctctgaacaggacaccgagccagttatgtcttcttacttagcgatgtgattctctggccttctcagtgatgcagatcgtgctggggatcttgagtgcagtcctaggaggatttttctacatccgcgactacaccctcctcgtcacctcgggagctgccatctggacaggggctgtggctgtgctggctggagctgctgccttcatttacgagaaacggggtggtacatactgggccctgctgaggactctgctaacgctggcagctttctccacagccatcgctgccctcaaactttggaatgaagatttccgatatggctactcttattacaacagtgcctgccgcatctccagctcgagtgactggaacactccagcccccactcagagtccagaagaagtcagaaggctacacctatgt

SEQ ID NO: 193751 - DNA, 635 bp, Homo sapiens
  Payload ID: 18261
  Gene Name: transmembrane protein 176A
  ENST ID: ENST00000461345
  CDS Start-End: 37-567
agactgtgtccctgacaatgggaacagccgacagtgatgcagatcgtgctggggatcttgagtgcagtcctaggaggatttttctacatccgcgactacaccctcctcgtcacctcgggagctgccatctggacaggggctgtggctgtgctggctggagctgctgccttcatttacgagaaacggggtggtacatactgggccctgctgaggactctgctaacgctggcagctttctccacagccatcgctgccctcaaactttggaatgaagatttccgatatggctactcttattacaacagtgcctgccgcatctccagctcgagtgactggaacactccagcccccactcagagtccagaagaagtcagaaggctacacctatgtacctccttcatggacatgctgaaggccttgttcagaacccttcaggccatgctcttgggtgtctggattctgctgcttctggcatctctgacccctctgtggctgtactgctggagaatgttcccaaccaaagggaaaagagaccagaaggaaatgttggaagtgagtggaatctagccatgcctctcctgattattagtgcctggtgcttctgcaccgggcgtccctgcatctgactgctggaa

SEQ ID NO: 193752 - DNA, 1129 bp, Homo sapiens
  Payload ID: 18262
  Gene Name: transmembrane protein 176B
  Uniprot ID: Q3YBM2
  ENST ID: ENST00000326442
  CDS Start-End: 73-885
gtcgctcccctgctcggggtcagctagtgtccgctctgctcggccgcgggctcccggaggactgcaggcaggatgacgcaaaacacggtgattgtgaatggagttgctatggcctctaggccatcccagcccacccacgtcaacgtccacatccaccaggagtcagctttgacacaactgctgaaagctggaggttctctgaagaagtttctttttcaccctggggacactgtgccttccacagccaggattggttatgagcagctggctctaggggtgactcagatattgctgggggttgtgagttgtgttcttggagtgtgtctcagcttggggccctggactgtgctgagtgcctcaggctgtgccttctgggcggggtctgtggtgatcgcagcaggagctggggccattgtccatgagaagcacccgggcaaacttgctggctatatatccagcctgctcaccctggcaggctttgctacagctatggctgctgttgtcctctgcgtgaatagcttcatctggcaaactgaaccctttttatacatcgacactgtgtgtgatcgctcagaccctgtcttccctaccactgggtacagatggatgcggcgaagtcaagagaaccaatggcagaaggaggagtgtagagcttacatgcagatgctgaggaagttgttcacagcaatccgtgccctgttcctggctgtctgtgtcttgaaggtcattgtgtccttggtttccttgggagtaggtcttcgaaacttgtgtggccagagctcccagcccctgaatgaggaaggatcagagaagaggctactgggggagaattcagtgcccccttcgccctctagggagcagacctccactgccattgtcctgtgagctgccaaagaccccacggggtgcccgcatgtccctgtctagggcagcccagggcccccactcctggctcctcacacttgcctcccctatggccgctctccagaccctcctcctttcttctccccacatccgcacctgctgttcccactctggggttctcaagtccatgaacagatattgttgcattttccacaatgctgattaaacataataaacaatccagaaaagcagttttgcccagaaa

SEQ ID NO: 193753 - DNA, 1206 bp, Homo sapiens
  Payload ID: 18262
  Gene Name: transmembrane protein 176B
  Uniprot ID: Q3YBM2
  ENST ID: ENST00000429904
  CDS Start-End: 164-976
cccacctcagcctcccaaagcactgggattacaggcgtgagctattgtgcccagctgggatcttgacaaagacactatttctctcctttcacctgtgctgtgtatttttccctcgcctagttcccagacctcactgctatatgtcttctccctggcaggcaggatgacgcaaaacacggtgattgtgaatggagttgctatggcctctaggccatcccagcccacccacgtcaacgtccacatccaccaggagtcagctttgacacaactgctgaaagctggaggttctctgaagaagtttctttttcaccctggggacactgtgccttccacagccaggattggttatgagcagctggctctaggggtgactcagatattgctgggggttgtgagttgtgttcttggagtgtgtctcagcttggggccctggactgtgctgagtgcctcaggctgtgccttctgggcggggtctgtggtgatcgcagcaggagctggggccattgtccatgagaagcacccgggcaaacttgctggctatatatccagcctgctcaccctggcaggctttgctacagctatggctgctgttgtcctctgcgtgaatagcttcatctggcaaactgaaccctttttatacatcgacactgtgtgtgatcgctcagaccctgtcttccctaccactgggtacagatggatgcggcgaagtcaagagaaccaatggcagaaggaggagtgtagagcttacatgcagatgctgaggaagttgttcacagcaatccgtgccctgttcctggctgtctgtgtcttgaaggtcattgtgtccttggtttccttgggagtaggtcttcgaaacttgtgtggccagagctcccagcccctgaatgaggaaggatcagagaagaggctactgggggagaattcagtgcccccttcgccctctagggagcagacctccactgccattgtcctgtgagctgccaaagaccccacggggtgcccgcatgtccctgtctagggcagcccagggcccccactcctggctcctcacacttgcctcccctatggccgctctccagaccctcctcctttcttctccccacatccgcacctgctgttcccactctggggttctcaagtccatgaacagatattgttgcattttccacaatgctgattaaacataataaacaatccagaaaagca

SEQ ID NO: 193754 - DNA, 1006 bp, Homo sapiens
  Payload ID: 18262
  Gene Name: transmembrane protein 176B
  Uniprot ID: Q3YBM2
  ENST ID: ENST00000450753
  CDS Start-End: 76-777
cccgtcgctcccctgctcggggtcagctagtgtccgctctgctcggccgcgggctcccggaggactgcaggcaggatgacgcaaaacacggtgattgtgaatggagttgctatggcctctaggccatcccagcccacccacgtcaacgtccacatccaccaggagtcagctttgacacaactgctgaaagctggaggttctctgaagaagtttctttttcaccctggggacactgtgccttccacagccaggattggttatgagcagctggctctaggggtgatcgcagcaggagctggggccattgtccatgagaagcacccgggcaaacttgctggctatatatccagcctgctcaccctggcaggctttgctacagctatggctgctgttgtcctctgcgtgaatagcttcatctggcaaactgaaccctttttatacatcgacactgtgtgtgatcgctcagaccctgtcttccctaccactgggtacagatggatgcggcgaagtcaagagaaccaatggcagaaggaggagtgtagagcttacatgcagatgctgaggaagttgttcacagcaatccgtgccctgttcctggctgtctgtgtcttgaaggtcattgtgtccttggtttccttgggagtaggtcttcgaaacttgtgtggccagagctcccagcccctgaatgaggaaggatcagagaagaggctactgggggagaattcagtgcccccttcgccctctagggagcagacctccactgccattgtcctgtgagctgccaaagaccccacggggtgcccgcatgtccctgtctagggcagcccagggcccccactcctggctcctcacacttgcctcccctatggccgctctccagaccctcctcctttcttctccccacatccgcacctgctgttcccactctggggttctcaagtccatgaacagatattgttgcattttccacaatgctgattaaacataataaacaatccagaaaagc

SEQ ID NO: 193755 - DNA, 1430 bp, Homo sapiens
  Payload ID: 18262
  Gene Name: transmembrane protein 176B
  Uniprot ID: Q3YBM2
  ENST ID: ENST00000447204
  CDS Start-End: 374-1186
gctgaccatgctggaactgcggcgactacagagcctgcgggaacctcccctttcgcccaagatctgctctgtccccctcatcctcctcccagggccctggcgtctgggtcaagcagcgccccacacctcgacccctcaccccctcctcccgggctcttcctgcggcctcccctccacagtccgcaggctctgggacaggaccgagtccttggctgcctgtggagctcctgtgccagcagctgcgccccggctgcgctccggatacccccatccccgccaccgccgacctcccgctccaccgactgctgctcacgcccgacgggttcacgccgcccctgccccgtgaaggaccgcgctgcggtgcggaggcaggatgacgcaaaacacggtgattgtgaatggagttgctatggcctctaggccatcccagcccacccacgtcaacgtccacatccaccaggagtcagctttgacacaactgctgaaagctggaggttctctgaagaagtttctttttcaccctggggacactgtgccttccacagccaggattggttatgagcagctggctctaggggtgactcagatattgctgggggttgtgagttgtgttcttggagtgtgtctcagcttggggccctggactgtgctgagtgcctcaggctgtgccttctgggcggggtctgtggtgatcgcagcaggagctggggccattgtccatgagaagcacccgggcaaacttgctggctatatatccagcctgctcaccctggcaggctttgctacagctatggctgctgttgtcctctgcgtgaatagcttcatctggcaaactgaaccctttttatacatcgacactgtgtgtgatcgctcagaccctgtcttccctaccactgggtacagatggatgcggcgaagtcaagagaaccaatggcagaaggaggagtgtagagcttacatgcagatgctgaggaagttgttcacagcaatccgtgccctgttcctggctgtctgtgtcttgaaggtcattgtgtccttggtttccttgggagtaggtcttcgaaacttgtgtggccagagctcccagcccctgaatgaggaaggatcagagaagaggctactgggggagaattcagtgcccccttcgccctctagggagcagacctccactgccattgtcctgtgagctgccaaagaccccacggggtgcccgcatgtccctgtctagggcagcccagggcccccactcctggctcctcacacttgcctcccctatggccgctctccagaccctcctcctttcttctccccacatccgcacctgctgttcccactctggggttctcaagtccatgaacagatattgttgcattttccacaatgctgattaaacataataaacaatccagaaaagcagttttgcccagaaa

SEQ ID NO: 193756 - DNA, 1303 bp, Homo sapiens
  Payload ID: 18262
  Gene Name: transmembrane protein 176B
  Uniprot ID: Q3YBM2
  ENST ID: ENST00000434545
  CDS Start-End: 252-1064
cgagtgggagcgcagggggcgcgcgggggctcggtcttctcccgcccggtccgctcctccgggcggaaccccctttgccgggcccccgggccgcagctggtttcgggaaaccgcgcagcctgggcggggccgcagcccccacccgtgcatctgccgtctccgccctcccgtcgctcccctgctcggggtcagctagtgtccgctctgctcggccgcgggctcccggaggactgcaggtgaggccaggcaggatgacgcaaaacacggtgattgtgaatggagttgctatggcctctaggccatcccagcccacccacgtcaacgtccacatccaccaggagtcagctttgacacaactgctgaaagctggaggttctctgaagaagtttctttttcaccctggggacactgtgccttccacagccaggattggttatgagcagctggctctaggggtgactcagatattgctgggggttgtgagttgtgttcttggagtgtgtctcagcttggggccctggactgtgctgagtgcctcaggctgtgccttctgggcggggtctgtggtgatcgcagcaggagctggggccattgtccatgagaagcacccgggcaaacttgctggctatatatccagcctgctcaccctggcaggctttgctacagctatggctgctgttgtcctctgcgtgaatagcttcatctggcaaactgaaccctttttatacatcgacactgtgtgtgatcgctcagaccctgtcttccctaccactgggtacagatggatgcggcgaagtcaagagaaccaatggcagaaggaggagtgtagagcttacatgcagatgctgaggaagttgttcacagcaatccgtgccctgttcctggctgtctgtgtcttgaaggtcattgtgtccttggtttccttgggagtaggtcttcgaaacttgtgtggccagagctcccagcccctgaatgaggaaggatcagagaagaggctactgggggagaattcagtgcccccttcgccctctagggagcagacctccactgccattgtcctgtgagctgccaaagaccccacggggtgcccgcatgtccctgtctagggcagcccagggcccccactcctggctcctcacacttgcctcccctatggccgctctccagaccctcctcctttcttctccccacatccgcacctgctgttcccactctggggttctcaagtccatgaacagatattgttgcattttccacaatgctgattaaacataataaacaatccagaaaagcagttttgccc

SEQ ID NO: 193757 - DNA, 1265 bp, Homo sapiens
  Payload ID: 18262
  Gene Name: transmembrane protein 176B
  Uniprot ID: Q3YBM2
  ENST ID: ENST00000492607
  CDS Start-End: 207-1019
ctcggggtcagctagtgtccgctctgctcggccgcgggctcccggaggactgcaggaggactcacgtaggagggagggacagctgggtgcaggtgtttctccccagaaaaacggctggagagcgggaggagaggcctggggctggcgcgtcccgtccaccttctgccgcctgcacgcctggaccctggctggagccctacggcaggatgacgcaaaacacggtgattgtgaatggagttgctatggcctctaggccatcccagcccacccacgtcaacgtccacatccaccaggagtcagctttgacacaactgctgaaagctggaggttctctgaagaagtttctttttcaccctggggacactgtgccttccacagccaggattggttatgagcagctggctctaggggtgactcagatattgctgggggttgtgagttgtgttcttggagtgtgtctcagcttggggccctggactgtgctgagtgcctcaggctgtgccttctgggcggggtctgtggtgatcgcagcaggagctggggccattgtccatgagaagcacccgggcaaacttgctggctatatatccagcctgctcaccctggcaggctttgctacagctatggctgctgttgtcctctgcgtgaatagcttcatctggcaaactgaaccctttttatacatcgacactgtgtgtgatcgctcagaccctgtcttccctaccactgggtacagatggatgcggcgaagtcaagagaaccaatggcagaaggaggagtgtagagcttacatgcagatgctgaggaagttgttcacagcaatccgtgccctgttcctggctgtctgtgtcttgaaggtcattgtgtccttggtttccttgggagtaggtcttcgaaacttgtgtggccagagctcccagcccctgaatgaggaaggatcagagaagaggctactgggggagaattcagtgcccccttcgccctctagggagcagacctccactgccattgtcctgtgagctgccaaagaccccacggggtgcccgcatgtccctgtctagggcagcccagggcccccactcctggctcctcacacttgcctcccctatggccgctctccagaccctcctcctttcttctccccacatccgcacctgctgttcccactctggggttctcaagtccatgaacagatattgttgcattttccacaatgctgattaaacataataaacaatccagaaaagcagttttgcccagaaaga

SEQ ID NO: 193758 - DNA, 1394 bp, Homo sapiens
  Payload ID: 18263
  Gene Name: transmembrane protein 177
  Uniprot ID: Q53S58
  ENST ID: ENST00000272521
  CDS Start-End: 130-1065
gtgctttgcggccgccctgccgcgcgcacatgtaggcgttccgagcggcggcggaggtgagcgcacggacgagcgggagggacccttctccggcctgatgcgacccgattgtccgcagtgactacactcatggcaggtcccctgtggcggaccgcagcatttgtgcagagacacaggacaggcctcttggtgggttcctgtgcaggcctgtttggagttccaatctcgtaccacctcttcccggatcccgtggtccaatggctctaccagtactggcctcagggccagccagctccgctccctccacagctgcagagcctcttccaagaggtgctacaggacataggtgttccttcaggccattgctacaagcccttcaccaccttcaccttccaacctgtgagtgcaggcttcccaagactccctgctggggctgtggtgggcatccctgccagtttcttgggagacctagtgatcaacactaaccatcccgtggtcatacatgggcatacagtggactggcggagcccagcaggcgcccggctgagagcttccctgaccttgtcccgtgaagcccagaagttcgccttggccagggaagtggtgtacctggaaagcagtaccactgccgtgcacgccctgctggccccagcttgcctggcagggacctgggcactgggcgtgggtgccaagtacaccctggggctccatgcaggccccatgaatttacgggctgccttcagcttggtggcagcagtggcaggctttgtggcctacgccttctcccaggattctctcactcatgccgtggagtcctggctggaccgccgcacggcctccctctctgcagcctatgcctgtggtggagtggagttctatgagaagcttctgtcgggcaacctggccctgcgcagtctcttgggcaaagacggggagaagctgtatacacccagcgggaacatcgtccccagacacttgttccgaatcaaacatttaccctacaccacccgccgggactctgtgctgcagatgtggagggggatgctcaatccgggccgctcctgatgggctcatcacaaggacacttccagcttgtgcagacaccaccctgccattgagtctggagggccctgttggagcctttggacctatagctcacggccagaaaaatcactggctttggaattaaatagcttagattgtactataaccactacttatgaactcagggactatgagggactattcaggggctatgaatctgagcctttgtttcttgaactgtaaagtggagatgatgtaaaccgccttgcaagattgtagagttgggtaaggtcatgaacataagggcctggcacaaagggtgcactgtaaataaacagacatccctcctt

SEQ ID NO: 193759 - DNA, 1346 bp, Homo sapiens
  Payload ID: 18263
  Gene Name: transmembrane protein 177
  Uniprot ID: Q53S58
  ENST ID: ENST00000401466
  CDS Start-End: 82-1017
ggcgtgctttgcggccgccctgccgcgcgcacatgtaggcgttccgagcggcggcggagattgtccgcagtgactacactcatggcaggtcccctgtggcggaccgcagcatttgtgcagagacacaggacaggcctcttggtgggttcctgtgcaggcctgtttggagttccaatctcgtaccacctcttcccggatcccgtggtccaatggctctaccagtactggcctcagggccagccagctccgctccctccacagctgcagagcctcttccaagaggtgctacaggacataggtgttccttcaggccattgctacaagcccttcaccaccttcaccttccaacctgtgagtgcaggcttcccaagactccctgctggggctgtggtgggcatccctgccagtttcttgggagacctagtgatcaacactaaccatcccgtggtcatacatgggcatacagtggactggcggagcccagcaggcgcccggctgagagcttccctgaccttgtcccgtgaagcccagaagttcgccttggccagggaagtggtgtacctggaaagcagtaccactgccgtgcacgccctgctggccccagcttgcctggcagggacctgggcactgggcgtgggtgccaagtacaccctggggctccatgcaggccccatgaatttacgggctgccttcagcttggtggcagcagtggcaggctttgtggcctacgccttctcccaggattctctcactcatgccgtggagtcctggctggaccgccgcacggcctccctctctgcagcctatgcctgtggtggagtggagttctatgagaagcttctgtcgggcaacctggccctgcgcagtctcttgggcaaagacggggagaagctgtatacacccagcgggaacatcgtccccagacacttgttccgaatcaaacatttaccctacaccacccgccgggactctgtgctgcagatgtggagggggatgctcaatccgggccgctcctgatgggctcatcacaaggacacttccagcttgtgcagacaccaccctgccattgagtctggagggccctgttggagcctttggacctatagctcacggccagaaaaatcactggctttggaattaaatagcttagattgtactataaccactacttatgaactcagggactatgagggactattcaggggctatgaatctgagcctttgtttcttgaactgtaaagtggagatgatgtaaaccgccttgcaagattgtagagttgggtaaggtcatgaacataagggcctggcacaaagggtgcactgtaaataaacagacatccctcctt

SEQ ID NO: 193760 - DNA, 1216 bp, Homo sapiens
  Payload ID: 18263
  Gene Name: transmembrane protein 177
  ENST ID: ENST00000409951
  CDS Start-End: 97-423
aggcgttccgagcggcggcggaggtgagcgcacggacgagcgggagggacccttctccggcctgatgcgacccgattgtccgcagtgactacactcatggcaggtcccctgtggcggaccgcagcatttgtgcagagacacaggacaggcctcttggtgggttcctgtgcaggcctgtttggagttccaatctcgtaccacctcttcccggatcccgtggtccaatggctctaccagtactggcctcagggccagccagctccgctccctccacagctgcagagcctcttccaagaggtgctacaggacataggtgttccttcaggccattgctacaagcccttcaccaccttcaccttccaacctgaaagggaacatcacagaaaggtgaagaaatttgccctaaatcataaaactttgtaagtggcagaacaaggatttgaagctggcagtctggttccaggtatcgttcttaaaacactaaatttatactgtcctatttagcctgaaagtttcatggtgcagacttatactgtggactccatagcccttttcctcatgctgggttagaagtaactttttcaggctcactatttttattaggaaaaaatagtcactgagcagaacttccgaggagacccctccagctaactgaagagaaagggacaaccagcctaccatgtttagtgcagcagggggaacaggacggaagggcagggtgtcatggagctctaggaggcaccagctgaggaaaggggatctcaggaggtagggagagagcagagtgggcagccagctgtgggttcaaatcctggcctaccactttaacagggcgatctggaacaagtgacttctggtcctgagtttcctgtctgtaaaatgggtgcattcctatctatctttcaggattgttttgacgatgaaagtgaaagaaagtttgcaaaatgtggagcctggtgagggcatatagtaggctttaaaaaaaagattgattttctaaatgttagtgctcctaaatggcataaggtgttcaggtcttggagttgctgcccaaataccagcaatttccagagaactcgctgctgcctaatacagctttattttaaagcttttcaaagccccagttcagttagggcagttttcccagtggctatcagttggcatcttctggaaggtacttggcagcagctgaaagcagaggacacatgtggcctta

SEQ ID NO: 193761 - DNA, 1738 bp, Homo sapiens
  Payload ID: 18263
  Gene Name: transmembrane protein 177
  Uniprot ID: Q53S58
  ENST ID: ENST00000424086
  CDS Start-End: 474-1409
ggcgtgctttgcggccgccctgccgcgcgcacatgtaggcgttccgagcggcggcggaggtgagcgcacggacgagcgggagggacccttctccggcctgatgcgacccggtaacgcgttcagactgcggagtagcctaggggcccagagtggaagcgtagcgaggacccctctgcggggctcctgcagcccctcctcccccagccaccggcgggctgcatggtactgtgttctaggcccaccccgcagcgcgatggccctagggacgttggactttggtccagacctttcctttcttagcctcactttccgcattgggaaaaaaaaaaagcccgaatgataatgattcttataggagttcttgattaagataggccaagcggtaccctgcgtttttgtttgcggcaactcattcgttgctcattaagcacttttcacggacaggaatacaattgtccgcagtgactacactcatggcaggtcccctgtggcggaccgcagcatttgtgcagagacacaggacaggcctcttggtgggttcctgtgcaggcctgtttggagttccaatctcgtaccacctcttcccggatcccgtggtccaatggctctaccagtactggcctcagggccagccagctccgctccctccacagctgcagagcctcttccaagaggtgctacaggacataggtgttccttcaggccattgctacaagcccttcaccaccttcaccttccaacctgtgagtgcaggcttcccaagactccctgctggggctgtggtgggcatccctgccagtttcttgggagacctagtgatcaacactaaccatcccgtggtcatacatgggcatacagtggactggcggagcccagcaggcgcccggctgagagcttccctgaccttgtcccgtgaagcccagaagttcgccttggccagggaagtggtgtacctggaaagcagtaccactgccgtgcacgccctgctggccccagcttgcctggcagggacctgggcactgggcgtgggtgccaagtacaccctggggctccatgcaggccccatgaatttacgggctgccttcagcttggtggcagcagtggcaggctttgtggcctacgccttctcccaggattctctcactcatgccgtggagtcctggctggaccgccgcacggcctccctctctgcagcctatgcctgtggtggagtggagttctatgagaagcttctgtcgggcaacctggccctgcgcagtctcttgggcaaagacggggagaagctgtatacacccagcgggaacatcgtccccagacacttgttccgaatcaaacatttaccctacaccacccgccgggactctgtgctgcagatgtggagggggatgctcaatccgggccgctcctgatgggctcatcacaaggacacttccagcttgtgcagacaccaccctgccattgagtctggagggccctgttggagcctttggacctatagctcacggccagaaaaatcactggctttggaattaaatagcttagattgtactataaccactacttatgaactcagggactatgagggactattcaggggctatgaatctgagcctttgtttcttgaactgtaaagtggagatgatgtaaaccgccttgcaagattgtagagttgggtaaggtcatgaacataagggcctggcacaaagggtgcactgtaaataaacagacatccctcctt

SEQ ID NO: 193762 - DNA, 791 bp, Homo sapiens
  Payload ID: 18263
  Gene Name: transmembrane protein 177
  ENST ID: ENST00000445518
  CDS Start-End: 450-791
gcgcgcacatgtaggcgttccgagcggcggcggaggtgagcgcacggacgagcgggagggacccttctccggcctgatgcgacccggtaacgcgttcagactgcggagtagcctaggggcccagagtggaagcgtagcgaggacccctctgcggggctcctgcagcccctcctcccccagccaccggcgggctgcatggtactgtgttctaggcccaccccgcagcgcgatggccctagggacgttggactttggtccagacctttcctttcttagcctcactttccgcattgggaaaaaaaaaaagcccgaatgataatgattcttataggagttcttgattaagataggccaagcggtaccctgcgtttttgtttgcggcaactcattcgttgctcattaagcacttttcacggacaggaatacaattgtccgcagtgactacactcatggcaggtcccctgtggcggaccgcagcatttgtgcagagacacaggacaggcctcttggtgggttcctgtgcaggcctgtttggagttccaatctcgtaccacctcttcccggatcccgtggtccaatggctctaccagtactggcctcagggccagccagctccgctccctccacagctgcagagcctcttccaagaggtgctacaggacataggtgttccttcaggccattgctacaagcccttcaccaccttcaccttccaacctgtgagtgcaggcttcccaagactccctgctggggctgtggtgggcatccctgccagtttcttgggagaccta

SEQ ID NO: 193763 - DNA, 1662 bp, Homo sapiens
  Payload ID: 18264
  Gene Name: transmembrane protein 178A
  Uniprot ID: Q8NBL3
  ENST ID: ENST00000281961
  CDS Start-End: 57-950
attgtgtctggcggcggcgcgcgagcccaccggcggctgcggcggggcgggaagccatggagccgcgggcgctcgtcacggcgctcagcctcggcctcagcctgtgctccctggggctgctcgtcacggccatcttcaccgaccactggtacgagaccgacccccggcgccacaaggagagctgcgagcgcagccgcgcgggcgccgaccccccggaccagaagaaccgcctgatgccgctgtcgcacctgccgctgcgggactcgcccccgctggggcgccggctgctcccgggcggcccggggcgcgccgaccccgagtcctggcgctcgctcctggggctcggcgggctggacgccgagtgcggccggcccctcttcgccacctactcgggcctctggaggaagtgctacttcctgggcatcgaccgggacatcgacaccctcatcctgaaaggtattgcgcagcgatgcacggccatcaagtaccacttttctcagcccatccgcttgcgaaacattccttttaatttaaccaagaccatacagcaagatgagtggcacctgcttcatttaagaagaatcactgctggcttcctcggcatggccgtagccgtccttctctgcggctgcattgtggccacagtcagtttcttctgggaggagagcttgacccagcacgtggctggactcctgttcctcatgacagggatattttgcaccatttccctctgtacttatgccgccagtatctcgtatgatttgaaccggctcccaaagctaatttatagcctgcctgctgatgtggaacatggttacagctggtccatcttttgcgcctggtgcagtttaggctttattgtggcagctggaggtctctgcatcgcttatccgtttattagccggaccaagattgcacagctaaagtctggcagagactccacggtatgactgtcctcactgggcctgtccacagtgcgagcgactcctgaggggaacagcgcggagttcaggagtccaagcacaaagcggtcttttacattccaacctgttgcctgccagccctttctggattactgatagaaaatcatgcaaaacctcccaacctttctaaggacaagactactgtggattcaagtgctttaatgactatttatgcgttgactgtgagaatagggagcagtgccatgggacatttctaggtgtagagaaagaagaaactgcaatggaaaaatttgtatgatttccatttatttcagaaagtttgtatgtaacaattacccgagagtcatttctacttgcaaaaggattcgtaacaaagcgagtataattttcttgtcattgtatcatgcttgttaaattttaatgcagcatcttcagaacttgtcctgatggtgtcttattgtgtcagcaccaaatatttgtgcattatttgtggacgttccttgtcacaggaagattcttcttctgttgccttattgtttttttttttttaagtctcttctctgtctttgtactggaatcgaaatcataagataaacagatcaaacgtgcttaagagctaactcgtgacactatgcagtattgtttgaagacctgttgttcaacctctgtctctttatgttaactggatttctgcattaaatgactgcccccttgttaa

SEQ ID NO: 193764 - DNA, 1286 bp, Homo sapiens
  Payload ID: 18264
  Gene Name: transmembrane protein 178A
  Uniprot ID: Q8NBL3
  ENST ID: ENST00000618232
  CDS Start-End: 9-344
gggaagccatggagccgcgggcgctcgtcacggcgctcagcctcggcctcagcctgtgctccctggggctgctcgtcacggccatcttcaccgaccactggtacgagaccgacccccggcgccacaaggagagctgcgagcgcagccgcgcgggcgccgaccccccggaccagaagaaccgcctgatgccgctgtcgcacctactcgggcctctggaggaagtgctacttcctgggcatcgaccgggacatcgacaccctcatcctgaaaggtattgcgcagcgatgcacggccatcaagtaccacttttctcagcccatccgcttgcgaaacattccttttaatttaaccaagaccatacagcaagatgagtggcacctgcttcggatattttgcaccatttccctctgtacttatgccgccagtatctcgtatgatttgaaccggctcccaaagctaatttatagcctgcctgctgatgtggaacatggttacagctggtccatcttttgcgcctggtgcagtttaggctttattgtggcagctggaggtctctgcatcgcttatccgtttattagccggaccaagattgcacagctaaagtctggcagagactccacggtatgactgtcctcactgggcctgtccacagcacaaagcggtcttttacattccaacctgttgcctgccagccctttctggattactgatagaaaatcatgcaaaacctcccaacctttctaaggacaagactactgtggattcaagtgctttaatgactatttatgcgttgactgtgagaatagggagcagtgccatgggacatttctaggtgtagagaaagaagaaactgcaatggaaaaatttgtatgatttccatttatttcagaaagtttgtatgtaacaattacccgagagtcatttctacttgcaaaaggattcgtaacaaagcgagtataattttcttgtcattgtatcatgcttgttaaattttaatgcagcatcttcagaacttgtcctgatggtgtcttattgtgtcagcaccaaatatttgtgcattatttgtggacgttccttgtcacaggaagattcttcttctgttgccttattgtttttttttttttaagtctcttctctgtctttgtactggaatcgaaatcataagataaacagatcaaacgtgcttaagagctaactcgtgacactatgcagtattgtttgaagacctgttgttcaacctctgtctctttatgttaactggatttctgcattaaatgactgccccc

SEQ ID NO: 193765 - DNA, 10558 bp, Homo sapiens
  Payload ID: 18265
  Gene Name: transmembrane protein 178B
  Uniprot ID: H3BS89
  ENST ID: ENST00000565468
  CDS Start-End: 80-964
cgccgctttgttccgggtgcggcgagggaaggcgaggctgcggcggatcatgcccatggtgtagccgccaagcggaggcatggctgccggaaggttactgctctacactggcctctcgctagcgctctgcgccctcggcatgctggccgtggccatctgctcggaccactggtacgagacggacgccaggaagcacagggacaggtgcaaggccttcaacacccgccgggtcgaccccggcttcatttacaacaataacaacaacttgccgctccgggcgagccgctcgcgcctggaccgctgggagggcaaactcctccgggcccggaatcgccggcagctgttcgccatgagccccgcggacgagtgcagccggcagtacaactccaccaacatgggcctctggaggaagtgccaccggcagggcttcgaccccgagatcgccgccctcattcggaaaggagaaattgagcgatgtacgtacatcaaataccactactcctcagcaaccatccccaggaacctcactttcaatatcacgaagaccatccgtcaggatgagtggcatgccctacacctgcgcagaatgacggctggcttcatgggcatggcggtggccatcatcctctttggctggatcatcggcgtgctgggctgctgctgggaccgaggccttatgcagtacgtggcagggctgctcttcctcatgggaggaaccttctgcatcatttcactgtgcacctgtgtggccgggatcaactttgagctgtcacgctacccacgctacctgtacggactccctgatgacatcagccatggctatggctggtccatgttctgtgcatgggggggcctgggcctcacactcatctcgggattcttctgtaccttagccccttctgttcaacctgtcccgaggaccaactaccctaaatccagacccgagaatgggacagtgtgctaaaaaacaaacccatacatacatatatatatataaatatatatatataatatacatatataaaacaaaacaaaactaaatcaagacgatgccagtgccaaggtagagttgagttggctcaggcacctgcatctcgccggactttgtgttgcctcatctctgagatggggaaagtttttccatcctgtggctcttccatcagttcttgacttttggcttcatggtctcttgaagacagagcaaacaccaccacttgcgaccgcgtcttgatccccatcactggcgaggatggggtggtgaagggacagtggaaggggtctgaggcagcacagatgtagagaaggaagtgccacccactgggtcaacgggagaggacgccacccctaaccagtcatatcacagggtaacaaagccctcagttcctagaatgtaaccaaattattgaggccattttcagaatcacttcttctcctgctcttcctgttcggacttccttcccagcccaccagcaacacacaaggagtggaagagaaaacaaactgagaaggacgttttctctttgctgccaaacttttggaccatgtttcataggtgggaagggaagagaacatgctgagaggcaagatctgcatcaatgaaaggacgcttcggtggatgctcagacaacccagtcttaccttccagctgccttacacccagtgaaacaagaggccaccctgtccccagccgcacctgcactccctgggcagactggagccttggagtcatgctgtgatgtgtgtgtgtgggtgtgcgtgcatgtgtactttgggcggtttcctttttttcttttctaccttttaaatggaaatactgcattatgactgttgtctctcttatcactgtagtggtttcatggccccagatagaggcccagagacctagaaattgtcatgagggacaggcctataagggtgccaattctgcagctacagatccctggagtggtgtgtgtgtgcgtgtgtgtgtgtgtgtgtgtgtgtgtgtgtgtgtgtggtggatgtttcttgagcgtggggttttattgtttgtgttgtgtttttttaaattgtttctggtatagctgaaatttccagagggcagaaccaagaacaaagccactgggccagaggacccccgtggttctccacattacagctctgggactctgcacgatttagtcctctaattttggaagttcaagacacagctgggcacataagccatgagagaagagggggaacacacagttcaggagagagaagaaatgttgctctggttgctgttgtacaagaacataaaccaacaagaccttcactccccattatagaagctgtcctttgtcactggacatctcccctttccctaggggtgacctctgtacaaacgaaaggaagtgggtcacatgcagagagagcacctccatttcccatgggctcaagtttgtatgatattgtgtaaattaatgcagaactcttgactctttccatcctcttcctttccctcttgatattcaaggccatgaatcccaaaataacagtcttagtggctagcacccaaacagaggtggaataaatccaccccagtgtctcgggctcatttgagcaaattagcactgcaggtgctggcaagcaaagtcagccagagagttgtgaacgctgtaggggtgggagtctgctggagtgggctggagccgctcacagtcatctcagtgagcctgctggtgcccagcagccctggggaggccaggtgagaatccctgagctggtgtagccatggtcaactgtgtagcagagaatccccttgtttcataaacaaatatgctttgggagctttgccaggcactcagcagcctttcttccactgctgtgtaatctgtttcatttacacgtcttccaacccatcttcctaccactctcctccttttctcacctactaaccacttaccttctctctcttctatcttccaccctcatctgctcctttgaactgcgtgtatgtaattcatatctggatatgatatgacatctgatgtgcatgaatggggttgaatgtggatctctctgtatgtgtatctctctggtgcattttgtgtacgtttgtgtcagtacacacctgcacacaggtgtgggtgccctactcaagacttccttaccggggactctggtcagcttctgcaaaaggtctcatgtgtgagttccctgtgtgtgggtgtgctgggcgatagggtaaggtgtgcaacgggaaaagttgttagcttccagttggggttctaaggattatttttaaaacaaaggatttattctatgagaagggaaataattttcaggaaaacccagtttttcaattgggcattttatttctaattttctttgaaaagttagatttctcccttaaggggaagggcatacttgggcttaaggaaaagtgaagaaaagtatctcagattgagaggccttttgtcttccttccaagcgtcctgaaggggctctgccgaggaagggacagacaggttcacaagcatccatttgggggagagggcttgtctatgaccacactgaaattccagcttttttccagttgcaggagagaggggaaaaattctaaatggggaaatttgctatgaaccatttaaactttttgtaagtaatcatgtttgaggatgctggctcacagacctatcattatttatatcctctttttaaaaaaaaatcccatactttcaatgaatagattatctgctctatccaattattgtctttgtgacagacatttagcaaagcttactgcatccctttgaaaccttgagagttcctgaaatgttagaaagctcccaggaaagacgtaaacaacctgggctcaactcaccagcccagagcaggggctttgagtgacttctttgatagcaggaccagataaatacgaacacactttgggatctgatcctgctgggaagcaaaagacgcccagccacatgaccaggatagaggcccctttcagacggcaagtcctggccaatgggaggacttctcaggtgaccttgatccctctagcataagggcttgaccacagattaaaacatgtgactccaaccagttacggaagctttctggctgtgaggtagctgagggagatgaggaggaggaagagaggagccttgacttgtgaggctctgtaggtcagactctgctaactccaaatcaaagtggaacccaaccttatgagggcatttagggtcaatgacctcactaaagtcaccagccgcaaccccaggtcaagttcaaacttcttactggcatatgaacatgtatgtgctttgagctccatgcaagtcaaccttgagcctggggcccattgcaacttttatttccttccctactctactaccttgagattcaggaaagtgaggtattctacctagagagaggtcccatatctttttctccttattttgggagttacggtttcttcttctgtttccgtttcctctctctctactcactcctactttctcctgcatcaactttggtcaattaacatagacaagtgattcatctgtagagaggctcctagactccaagcagcccccttccttgttcattgtggctgtaggttttataaggaggtctgtggctccctggcatcaaaatatgaaaaataaaatctgtgcctgttccagcttcaatcctcctccaagccttagcttttcaacaaccctaccctttcaacttcagggatcatggagtcacagagactggacaactcctccaaatctagacaaagactttcttaagcgccctgagcccaggtgcatatcttcccatcagggatgagtggtcccacctagcaatgcttgcctctcctgtgacaagagggtaggatatcctaggactctgagactgggccctatatctcaatattcatccacactcatgataagatgccggaaatgaatgcactgtgtgtagctgtcttgatttagtgggaggatgtgctgcttaggtctccaaagatgcccacctgggtcaaattcagaataatgaactcaggtacatcacccagaggcatttagaatggactctctcttcacctggattatgtgctgagtgttaagtgatttttcaaatatctgggggaaggagtgggaagagatacactctggtcatcctttggtgtggtttgtgggggatacttggttgattcttgtagttaaagtgaagttgcttttctgaaaatgttccctgtcttcaggggacttacccatcccaggggacacatccatcccaggggacacagccagccctttccagggaaatacgatgtttctgagtgagaggtgatttcagtgcagataggaagagctggtgcacaccagcagggttgccttccatgccatcttccagctggtgtgggatagactaagggggcagatttttaagaaccccaccagagttgacatacacacgtgattctcgtgtctgtctctcaaagctctcaatgtctggggctgtgtttgccctcttttcattgatgctgccatgatgcaaaatgtttcttaaacattattcctggttcttagaatatgtgattactgagtattggatttctttcctgaataataactgctcattgtagaaaataagaaaaataaaatacaaaaaagactacaagatttttcataatccagtcactctgaggcatctaccgcgggcccaatccaaatggtcatgacctcaaaacttccccaatgagtgcttgtctctgggttggcagctggggccatgtgagcagtgtacaccacagaaccgcactggtctgcgttgagttgaccctgtgttcctggcagcaagagtgcagggccctgagcccccagagatagcaaagaggcctaaaagtttaatgccagaccttaggggcaggatggagcagggctaaaagatgtctctttgggcctgtctgcctgctttccttccttccttttctttcctttttttttttggtcagttgccatctcaatctaatcatagatgtaagaatgcggaagccagagtaactcactcattaagctacacttgtgtaacagttactgtaaatttcactacagctctgcactgaaatgatttgtgactctgggcactgtgtcttctccatacttgaacttcctcatctacaaaatgaggataagtgataacaccttacctcatggtatattaagggtgacaaagaaattgcaaagtgatttgcaaacatgaagtgtcatatgagttatgtatgttctaattatccctcagaagaccccccgctggaatggaattctcacatcaagtgtctgtgcctcgctgctgaaggataacccagagtgcaaggtcatctttgttgctgaacagggctggacctgtcgcacttaagcacacttaaaggattctattcttcattcaggtcccccagagaaattggctccttatttttctttacctattcctagacttccttttgtctagagccagttttgcaaagggcacttttatccatctcagttattcccagaggtgacagaatgagtaaaccatatggggcaaatagcatatatgagctaaaccagttaactgttaaccaaggcacatggtcaatgccttagtatttttttttttaattctcctaacgttatttctagctgtacattcccaaaaggaatgggtggaagcaaatcagattctgaaaggtttcaatgatctttcaagtttaggatgagaccaagtctcaaggagctgggatcttctttctcttgtcagttgctgaagccagtagcttcgtcaaaaacatatgaattcatataaggaagccctttagatggtacattcactaagacgtgtctgggtgtgatcctgtttgggaaaaacagaatcctaggttctaaacaagaaaagaacgcccttcccaaagggtccgcacactttctgctttgcagcggatcaagtgtccttgtgagggtgagacttccttcaagggaagggaagccattgctctctctgtagatagagcccagctggtaacgggggagccacccaactgcaggggggtgtatgttcaggtgtgaaaaacagaaaactgggtctgaacatgaagagttgcacagcagtagttcgaagaagctggcatctctttggcaaacaccaacctcagcaaatgcaactcctacacttcattcccaaggaccaggtgttgctccttaaggaactctgtatccctctctcctctccagaaccccattcctcccactggctgagcttttcctttcctttccgggtcacccatagaccctctccgtctgtaccagtgcgtctgtgttgtgagcgtgacgaagcctttcctgtgaagagctttcatgaactcattctcatactccttccccatttccacccatggtgtgactgttttgctattcaagactatctgtaaaaatgtacaaataaaagtgaaaactgaaaataaaggggagggagattgagattaaacaaatgcaatgatgtagcccttagttttctgaggacttctgtggacggccctaaaatcctgagttagggtgggatatgaagggagggataccattgacacaggaggtttttttctggttgtttctctcacagtcatcagtgtctgcttagaactctctgttctaaaggtttttccctgtaaagtagaatgcacttcccccaaaataaaagtaaatcagcaatgtttgaagggtcatggcaagggtcatgacaaagacctgactctggggtggcatgagtggccctgtcaccggctcactcagggccttgggggagtctcattacctcaccttgtctccacgtcttctcagccaaatggggatcaggggcttccagggctctgggggtgcgcagtccccttgtgtattttgctgctatttctagagagactttgagcccttgctagtgcgtgcttactgcatggaggtaaattaggagatgttttctctctgctactcctggcctctgctttcgcccctcagaaagtgaccttgagctagcagccagtttgcactcagagtccagagccttctatctaccgtttcattctcagattccttttcccacccactttgacgatctcattttactatcagtctctactgactgagctttgctgcactgggctggggtaggagaaagagcatccaaggagatgatgtgtgaattgctttgtaatttatgactcaccatataaatgtggcttgcagtgtcagaagcagggagtctggccaagggttgctaccaaataagactgaagatggtggaggcagtggtggcgtggaggcagtaggcagaagatgtgggttgggagcagaggtaagatgaacggagctttgggaaggacagatggcagaagcaccagaaaatcctcagcaaggcagcagagaaggatcctcaaagcagtaaccctgaagtaataggaagtaggaaagaggagcagggattaggtaaatctgcagcataaacagctgtctccctgcaggactgagaagaccagctgccccagagaggggaggcacgtcgagcttggccagtgacccaacccatgattagaggcaccttcaatcccaactttcctctcctctgctgggtcacagtgatggaaccagcttcaggaaggtagtatagaccagcgtcatccaatggaaccatgatccaagccacatatgcaatttaaaatattctagtagccacattttttaaagtccaaagaaacagctaaaatcagtgaaattaatttttagactacattttaacctaacatgtcaaaaatagtatcacttcagcatggaatcaatataaaaattactgggatattttacattcttttttccaaatgaagtcttcaaaatccaatgtgattttcctcttagaaaacatctcagtctggcccagccctatttccagtgttcaatagccacacctgactactggttgctgtataggacagcacggacttaggttcttcattaggagactgatggggggggtccttcctggtgggtcactcactgccatagctcttgtcatagctgatgaaggcaggagtgagtcttattatgttggcctagagtagaaagcacagagctatgtcgaggctgctgtctcagcctctggaagttctgcttcacctgcttagtaagaggagatgaccactcctgtggactgcatgtcccatctgcccccagagggtgtcggcgctgccccagtcatgtcccttatgacctgtccaagtcctagaggccaaagcaggtcatattcttcagctgcaggaatgtcagctactgcctcccaccccttaacctgatccccttatcatatagtggggaaggggcaggcaggccttctctctgtcaagaacaaagatctctacaacatttcgtcacctgggccagtcacctgctaatatcatctcaccaatatttggagctgttttctgaatcccttaattttcttaaatatttatcttaaagtcaaatgctataaaggagataccctgggaagggcagtggccacaggcagactgggtctcctaggaggtggtggtgttggtgacaagttctacttggactgggactcaacccaccattgcctacctctcttccctgcctggagaccttccttaggattgaagaaacctcttttgtttgtgaaaaagataggtatcgagatcttaatggagagaacagaataaaatgcaaggagccaacccctgggtattctcaaagcatttcaacggtcagtataacaaggtttgattgatttaaaatataacattctgagccctgtgttactgagcaaaaatgagctgatttggtgagtatgttttatatatggtcattagacagggaccataactgacaaaactctcaaacgcctggagtgtttatggcccaccagattattgctcagtcaatataaatttatttacctttattttaatttgcatagtgctttctgattggtcagacaaggagtggtgtgtactgcaggattctaacaatgcctctgcccttggaggcagcaattcctgtggttattggtgctaaaataagataaaatattatgttaatttgttctgatatgatgtgaataaatgtgttgtttaatcttaacaagaatgctacatcttatcagatctattgtactgtctgttccttctcataattaattaattacaggaaaggcgattcaaaccagatcttgaaactattgtgatgttctgagaggtaaatttaacagggaagtgggaggggggatgaaaagggaaattgccaggttcctgtgactttgaaaggactgaggaagcagagagcatttggggacttcactgaaactgactgcatcttgcaattttctttttcgaattggcagaaatattgtatttccattgattgaagaaaaacaagtgtctggtaattaattaaatgacttgttcatggaaaaaataaataatctgtcagttgtggaatgtaaactgattaaacaattaaataaagaagattatgttgtgtgttttaaa

SEQ ID NO: 193766 - DNA, 10552 bp, Homo sapiens
  Payload ID: 18265
  Gene Name: transmembrane protein 178B
  ENST ID: ENST00000610315
  CDS Start-End: 80-958
cgccgctttgttccgggtgcggcgagggaaggcgaggctgcggcggatcatgcccatggtgtagccgccaagcggaggcatggctgccggaaggttactgctctacactggcctctcgctagcgctctgcgccctcggcatgctggccgtggccatctgctcggaccactggtacgagacggacgccaggaagcacagggacaggtgcaaggccttcaacacccgccgggtcgaccccggcttcatttacaacaataacaacaacttgccgctccgggcgagccgctcgcgcctggaccgctgggagggcaaactcctccgggcccggaatcgccggcagctgttcgccatgagccccgcggacgagtgcagccggcagtacaactccaccaacatgggcctctggaggaagtgccaccggcagggcttcgaccccgagatcgccgccctcattcggaaaggagaaattgagcgatgtacgtacatcaaataccactactcctcagcaaccatccccaggaacctcacttttaacgtgaccaagactttgcgttgtatgtactgtatgtacctgcgcagaatgacggctggcttcatgggcatggcggtggccatcatcctctttggctggatcatcggcgtgctgggctgctgctgggaccgaggccttatgcagtacgtggcagggctgctcttcctcatgggaggaaccttctgcatcatttcactgtgcacctgtgtggccgggatcaactttgagctgtcacgctacccacgctacctgtacggactccctgatgacatcagccatggctatggctggtccatgttctgtgcatgggggggcctgggcctcacactcatctcgggattcttctgtaccttagccccttctgttcaacctgtcccgaggaccaactaccctaaatccagacccgagaatgggacagtgtgctaaaaaacaaacccatacatacatatatatatataaatatatatatataatatacatatataaaacaaaacaaaactaaatcaagacgatgccagtgccaaggtagagttgagttggctcaggcacctgcatctcgccggactttgtgttgcctcatctctgagatggggaaagtttttccatcctgtggctcttccatcagttcttgacttttggcttcatggtctcttgaagacagagcaaacaccaccacttgcgaccgcgtcttgatccccatcactggcgaggatggggtggtgaagggacagtggaaggggtctgaggcagcacagatgtagagaaggaagtgccacccactgggtcaacgggagaggacgccacccctaaccagtcatatcacagggtaacaaagccctcagttcctagaatgtaaccaaattattgaggccattttcagaatcacttcttctcctgctcttcctgttcggacttccttcccagcccaccagcaacacacaaggagtggaagagaaaacaaactgagaaggacgttttctctttgctgccaaacttttggaccatgtttcataggtgggaagggaagagaacatgctgagaggcaagatctgcatcaatgaaaggacgcttcggtggatgctcagacaacccagtcttaccttccagctgccttacacccagtgaaacaagaggccaccctgtccccagccgcacctgcactccctgggcagactggagccttggagtcatgctgtgatgtgtgtgtgtgggtgtgcgtgcatgtgtactttgggcggtttcctttttttcttttctaccttttaaatggaaatactgcattatgactgttgtctctcttatcactgtagtggtttcatggccccagatagaggcccagagacctagaaattgtcatgagggacaggcctataagggtgccaattctgcagctacagatccctggagtggtgtgtgtgtgcgtgtgtgtgtgtgtgtgtgtgtgtgtgtgtgtgtgtggtggatgtttcttgagcgtggggttttattgtttgtgttgtgtttttttaaattgtttctggtatagctgaaatttccagagggcagaaccaagaacaaagccactgggccagaggacccccgtggttctccacattacagctctgggactctgcacgatttagtcctctaattttggaagttcaagacacagctgggcacataagccatgagagaagagggggaacacacagttcaggagagagaagaaatgttgctctggttgctgttgtacaagaacataaaccaacaagaccttcactccccattatagaagctgtcctttgtcactggacatctcccctttccctaggggtgacctctgtacaaacgaaaggaagtgggtcacatgcagagagagcacctccatttcccatgggctcaagtttgtatgatattgtgtaaattaatgcagaactcttgactctttccatcctcttcctttccctcttgatattcaaggccatgaatcccaaaataacagtcttagtggctagcacccaaacagaggtggaataaatccaccccagtgtctcgggctcatttgagcaaattagcactgcaggtgctggcaagcaaagtcagccagagagttgtgaacgctgtaggggtgggagtctgctggagtgggctggagccgctcacagtcatctcagtgagcctgctggtgcccagcagccctggggaggccaggtgagaatccctgagctggtgtagccatggtcaactgtgtagcagagaatccccttgtttcataaacaaatatgctttgggagctttgccaggcactcagcagcctttcttccactgctgtgtaatctgtttcatttacacgtcttccaacccatcttcctaccactctcctccttttctcacctactaaccacttaccttctctctcttctatcttccaccctcatctgctcctttgaactgcgtgtatgtaattcatatctggatatgatatgacatctgatgtgcatgaatggggttgaatgtggatctctctgtatgtgtatctctctggtgcattttgtgtacgtttgtgtcagtacacacctgcacacaggtgtgggtgccctactcaagacttccttaccggggactctggtcagcttctgcaaaaggtctcatgtgtgagttccctgtgtgtgggtgtgctgggcgatagggtaaggtgtgcaacgggaaaagttgttagcttccagttggggttctaaggattatttttaaaacaaaggatttattctatgagaagggaaataattttcaggaaaacccagtttttcaattgggcattttatttctaattttctttgaaaagttagatttctcccttaaggggaagggcatacttgggcttaaggaaaagtgaagaaaagtatctcagattgagaggccttttgtcttccttccaagcgtcctgaaggggctctgccgaggaagggacagacaggttcacaagcatccatttgggggagagggcttgtctatgaccacactgaaattccagcttttttccagttgcaggagagaggggaaaaattctaaatggggaaatttgctatgaaccatttaaactttttgtaagtaatcatgtttgaggatgctggctcacagacctatcattatttatatcctctttttaaaaaaaaatcccatactttcaatgaatagattatctgctctatccaattattgtctttgtgacagacatttagcaaagcttactgcatccctttgaaaccttgagagttcctgaaatgttagaaagctcccaggaaagacgtaaacaacctgggctcaactcaccagcccagagcaggggctttgagtgacttctttgatagcaggaccagataaatacgaacacactttgggatctgatcctgctgggaagcaaaagacgcccagccacatgaccaggatagaggcccctttcagacggcaagtcctggccaatgggaggacttctcaggtgaccttgatccctctagcataagggcttgaccacagattaaaacatgtgactccaaccagttacggaagctttctggctgtgaggtagctgagggagatgaggaggaggaagagaggagccttgacttgtgaggctctgtaggtcagactctgctaactccaaatcaaagtggaacccaaccttatgagggcatttagggtcaatgacctcactaaagtcaccagccgcaaccccaggtcaagttcaaacttcttactggcatatgaacatgtatgtgctttgagctccatgcaagtcaaccttgagcctggggcccattgcaacttttatttccttccctactctactaccttgagattcaggaaagtgaggtattctacctagagagaggtcccatatctttttctccttattttgggagttacggtttcttcttctgtttccgtttcctctctctctactcactcctactttctcctgcatcaactttggtcaattaacatagacaagtgattcatctgtagagaggctcctagactccaagcagcccccttccttgttcattgtggctgtaggttttataaggaggtctgtggctccctggcatcaaaatatgaaaaataaaatctgtgcctgttccagcttcaatcctcctccaagccttagcttttcaacaaccctaccctttcaacttcagggatcatggagtcacagagactggacaactcctccaaatctagacaaagactttcttaagcgccctgagcccaggtgcatatcttcccatcagggatgagtggtcccacctagcaatgcttgcctctcctgtgacaagagggtaggatatcctaggactctgagactgggccctatatctcaatattcatccacactcatgataagatgccggaaatgaatgcactgtgtgtagctgtcttgatttagtgggaggatgtgctgcttaggtctccaaagatgcccacctgggtcaaattcagaataatgaactcaggtacatcacccagaggcatttagaatggactctctcttcacctggattatgtgctgagtgttaagtgatttttcaaatatctgggggaaggagtgggaagagatacactctggtcatcctttggtgtggtttgtgggggatacttggttgattcttgtagttaaagtgaagttgcttttctgaaaatgttccctgtcttcaggggacttacccatcccaggggacacatccatcccaggggacacagccagccctttccagggaaatacgatgtttctgagtgagaggtgatttcagtgcagataggaagagctggtgcacaccagcagggttgccttccatgccatcttccagctggtgtgggatagactaagggggcagatttttaagaaccccaccagagttgacatacacacgtgattctcgtgtctgtctctcaaagctctcaatgtctggggctgtgtttgccctcttttcattgatgctgccatgatgcaaaatgtttcttaaacattattcctggttcttagaatatgtgattactgagtattggatttctttcctgaataataactgctcattgtagaaaataagaaaaataaaatacaaaaaagactacaagatttttcataatccagtcactctgaggcatctaccgcgggcccaatccaaatggtcatgacctcaaaacttccccaatgagtgcttgtctctgggttggcagctggggccatgtgagcagtgtacaccacagaaccgcactggtctgcgttgagttgaccctgtgttcctggcagcaagagtgcagggccctgagcccccagagatagcaaagaggcctaaaagtttaatgccagaccttaggggcaggatggagcagggctaaaagatgtctctttgggcctgtctgcctgctttccttccttccttttctttcctttttttttttggtcagttgccatctcaatctaatcatagatgtaagaatgcggaagccagagtaactcactcattaagctacacttgtgtaacagttactgtaaatttcactacagctctgcactgaaatgatttgtgactctgggcactgtgtcttctccatacttgaacttcctcatctacaaaatgaggataagtgataacaccttacctcatggtatattaagggtgacaaagaaattgcaaagtgatttgcaaacatgaagtgtcatatgagttatgtatgttctaattatccctcagaagaccccccgctggaatggaattctcacatcaagtgtctgtgcctcgctgctgaaggataacccagagtgcaaggtcatctttgttgctgaacagggctggacctgtcgcacttaagcacacttaaaggattctattcttcattcaggtcccccagagaaattggctccttatttttctttacctattcctagacttccttttgtctagagccagttttgcaaagggcacttttatccatctcagttattcccagaggtgacagaatgagtaaaccatatggggcaaatagcatatatgagctaaaccagttaactgttaaccaaggcacatggtcaatgccttagtatttttttttttaattctcctaacgttatttctagctgtacattcccaaaaggaatgggtggaagcaaatcagattctgaaaggtttcaatgatctttcaagtttaggatgagaccaagtctcaaggagctgggatcttctttctcttgtcagttgctgaagccagtagcttcgtcaaaaacatatgaattcatataaggaagccctttagatggtacattcactaagacgtgtctgggtgtgatcctgtttgggaaaaacagaatcctaggttctaaacaagaaaagaacgcccttcccaaagggtccgcacactttctgctttgcagcggatcaagtgtccttgtgagggtgagacttccttcaagggaagggaagccattgctctctctgtagatagagcccagctggtaacgggggagccacccaactgcaggggggtgtatgttcaggtgtgaaaaacagaaaactgggtctgaacatgaagagttgcacagcagtagttcgaagaagctggcatctctttggcaaacaccaacctcagcaaatgcaactcctacacttcattcccaaggaccaggtgttgctccttaaggaactctgtatccctctctcctctccagaaccccattcctcccactggctgagcttttcctttcctttccgggtcacccatagaccctctccgtctgtaccagtgcgtctgtgttgtgagcgtgacgaagcctttcctgtgaagagctttcatgaactcattctcatactccttccccatttccacccatggtgtgactgttttgctattcaagactatctgtaaaaatgtacaaataaaagtgaaaactgaaaataaaggggagggagattgagattaaacaaatgcaatgatgtagcccttagttttctgaggacttctgtggacggccctaaaatcctgagttagggtgggatatgaagggagggataccattgacacaggaggtttttttctggttgtttctctcacagtcatcagtgtctgcttagaactctctgttctaaaggtttttccctgtaaagtagaatgcacttcccccaaaataaaagtaaatcagcaatgtttgaagggtcatggcaagggtcatgacaaagacctgactctggggtggcatgagtggccctgtcaccggctcactcagggccttgggggagtctcattacctcaccttgtctccacgtcttctcagccaaatggggatcaggggcttccagggctctgggggtgcgcagtccccttgtgtattttgctgctatttctagagagactttgagcccttgctagtgcgtgcttactgcatggaggtaaattaggagatgttttctctctgctactcctggcctctgctttcgcccctcagaaagtgaccttgagctagcagccagtttgcactcagagtccagagccttctatctaccgtttcattctcagattccttttcccacccactttgacgatctcattttactatcagtctctactgactgagctttgctgcactgggctggggtaggagaaagagcatccaaggagatgatgtgtgaattgctttgtaatttatgactcaccatataaatgtggcttgcagtgtcagaagcagggagtctggccaagggttgctaccaaataagactgaagatggtggaggcagtggtggcgtggaggcagtaggcagaagatgtgggttgggagcagaggtaagatgaacggagctttgggaaggacagatggcagaagcaccagaaaatcctcagcaaggcagcagagaaggatcctcaaagcagtaaccctgaagtaataggaagtaggaaagaggagcagggattaggtaaatctgcagcataaacagctgtctccctgcaggactgagaagaccagctgccccagagaggggaggcacgtcgagcttggccagtgacccaacccatgattagaggcaccttcaatcccaactttcctctcctctgctgggtcacagtgatggaaccagcttcaggaaggtagtatagaccagcgtcatccaatggaaccatgatccaagccacatatgcaatttaaaatattctagtagccacattttttaaagtccaaagaaacagctaaaatcagtgaaattaatttttagactacattttaacctaacatgtcaaaaatagtatcacttcagcatggaatcaatataaaaattactgggatattttacattcttttttccaaatgaagtcttcaaaatccaatgtgattttcctcttagaaaacatctcagtctggcccagccctatttccagtgttcaatagccacacctgactactggttgctgtataggacagcacggacttaggttcttcattaggagactgatggggggggtccttcctggtgggtcactcactgccatagctcttgtcatagctgatgaaggcaggagtgagtcttattatgttggcctagagtagaaagcacagagctatgtcgaggctgctgtctcagcctctggaagttctgcttcacctgcttagtaagaggagatgaccactcctgtggactgcatgtcccatctgcccccagagggtgtcggcgctgccccagtcatgtcccttatgacctgtccaagtcctagaggccaaagcaggtcatattcttcagctgcaggaatgtcagctactgcctcccaccccttaacctgatccccttatcatatagtggggaaggggcaggcaggccttctctctgtcaagaacaaagatctctacaacatttcgtcacctgggccagtcacctgctaatatcatctcaccaatatttggagctgttttctgaatcccttaattttcttaaatatttatcttaaagtcaaatgctataaaggagataccctgggaagggcagtggccacaggcagactgggtctcctaggaggtggtggtgttggtgacaagttctacttggactgggactcaacccaccattgcctacctctcttccctgcctggagaccttccttaggattgaagaaacctcttttgtttgtgaaaaagataggtatcgagatcttaatggagagaacagaataaaatgcaaggagccaacccctgggtattctcaaagcatttcaacggtcagtataacaaggtttgattgatttaaaatataacattctgagccctgtgttactgagcaaaaatgagctgatttggtgagtatgttttatatatggtcattagacagggaccataactgacaaaactctcaaacgcctggagtgtttatggcccaccagattattgctcagtcaatataaatttatttacctttattttaatttgcatagtgctttctgattggtcagacaaggagtggtgtgtactgcaggattctaacaatgcctctgcccttggaggcagcaattcctgtggttattggtgctaaaataagataaaatattatgttaatttgttctgatatgatgtgaataaatgtgttgtttaatcttaacaagaatgctacatcttatcagatctattgtactgtctgttccttctcataattaattaattacaggaaaggcgattcaaaccagatcttgaaactattgtgatgttctgagaggtaaatttaacagggaagtgggaggggggatgaaaagggaaattgccaggttcctgtgactttgaaaggactgaggaagcagagagcatttggggacttcactgaaactgactgcatcttgcaattttctttttcgaattggcagaaatattgtatttccattgattgaagaaaaacaagtgtctggtaattaattaaatgacttgttcatggaaaaaataaataatctgtcagttgtggaatgtaaactgattaaacaattaaataaagaagattatgttgtgtgttttaaa

SEQ ID NO: 193767 - DNA, 2513 bp, Homo sapiens
  Payload ID: 18266
  Gene Name: transmembrane protein 179
  Uniprot ID: Q6ZVK1
  ENST ID: ENST00000341595
  CDS Start-End: 907-1500
aataaaacaaaaatattttttaatgcttgcaacaaaaatgctgatggaattttaaaccaggaggagcaatgttaaggcttcctcactctgggaattggactaaaggtgacttagtcttaaaggcaactagaaaaggcattaattctattaattaatgcctcagcgatttccatctcagcaaagatgtcttaatgaggcgctcgggacacccattatttatcttacaaatgcagctccagggtcctgcccatgtcaggcagtgtaacacacgtccccgcggagggctggcgctgcagaagctcccggtccaccccctcctgcccacacctggcctcaccctccccatctcttcgaggatgacctctgtcccagtcccttggaccccgactcctccacgatctggcccctcccctcatacattgcatttcgggacccccgcaaaggaatcacttcagcctggactgcaaaccgcactcctacacctcactatgagcaccttgggggtgtcctccaacaccccccgccccgccctctctctcctggtctcctttcgttcgagctgatgaggaactgacgacccagagtcggcctgtgtgaggcccgtacaggtggctcccgaagtctttagcggcacagggtcggtccctccaggccgacctggtaaaattcccgcatctcccgcaggccgcccttctctggcccctggaccccgggctcctggcccgcgcgcaccaggagctgtccgcggtgctgaccgcaggcgcttcccgcgctcggccgatgcgcacgcgtcccgggaggggcgcgcgggacctgccggcgccgccactgcgcagcctcccgcggcctccccgcccggcgcagcctcccgcggccttcccgccgccgctctcgcccgggccggccatggcgctcaacaatttccttttcgctcagtgcgcctgctacttcttggccttcctgttcagcttcgtggtggtggtcccgctgtccgagaacggccacgacttccgcggccgctgcctgctcttcaccgagggcatgtggctgagcgccaacctcacggtgcaggagcgcgagcgcttcacggtgcaggagtggggcccgccggccgcctgccgcttcagcctgctcgccagcctcctgtctctgctgctggccgccgcgcacgcctggcgcacgctcttcttcctctgcaagggacacgagggctccttcttctccgccttcctgaacctcctggtcagcgccttcgtggtcttcctggtcttcattgccagcaccatcgtgagcgtgggcttcaccatgtggtgcgacaccatcaccgagaagggcaccgtaccccacagctgtgaagagctccaggacatcgacttggagctgggcgtggacaactccgccttctacgatcagtttgcaattgcccaggtagggggctctgggcaagaagggaggcttgcaatgctgggagggggccatttactgctggacatttgctgagctctcccccatccagaggaggaggcaggctcctgtgtggataaggtagttagcaatgggaccaggcagtgggagcagtcgggaaggcttcctgcaggaggtgggggagagctgggcttttgtaggtgggtttggggaggagatggccacagtgagttagaatcaggaagtggcaaggccctggggtctggggtgggaagtgtgggggtgtggggggaggtggtgccagaaacgaaaccaggcatcagatcctgggggtccagtgtagggacaagggctttggactttggtgctggcgctgggtgggcctgttcagatcagagctggaggcttagaggagtcccctagccagggggaagctgatacagagtccaaggaaggaggcaggggatcccacttgtgaattcagatttgccaccctgcccttgtataagctgcgtcccccgccccctaggagacttggtggagggcgatggtggcccccactctgagggacgctatttgctgaaatgcaggcatgtggggacacatcagtggcccgtgagggccggagggggaaccctggaattgggtttgccccttgaaatctgcagatgtgccccagacggagatgaggcagatgaggggtgccgggtgggggtggctgagaccagacacctggctcctgccagcactgatcagggcccgctggcttcaggtccaattccggaccccaggctggcctctgaaggctcttgctggccgtggctggcctgaggacgcttctcctggccaggagccctccaagggtgctggacatgggtgggcctgaatgctctttgccgagatgaactggacctgtcaaagacaccttcatgcaaatttagtgagtggaagaggcctcaggcctaatttgtgccagttggattaaggtgtgagtgcagtctgatggcaaatacgctcaaatgagaatcagcttaatgtagctcaggcctggttctgattaaattgtttctccttcaactgtttggaaa

SEQ ID NO: 193768 - DNA, 588 bp, Homo sapiens
  Payload ID: 18266
  Gene Name: transmembrane protein 179
  ENST ID: ENST00000415614
  CDS Start-End: 19-588
ctctcgcccgggccggccatggcgctcaacaatttccttttcgctcagtgcgcctgctacttcttggccttcctgttcagcttcgtggtggtggtcccgctgtccgagaacggccacgacttccgcggccgctgcctgctcttcaccgagggcatgtggctgagcgccaacctcacggtgcaggagcgcgagcgcttcacggtgcaggagtggggcccgccggccgcctgccgcttcagcctgctcgccagcctcctgtctctgctgctggccgccgcgcacgcctggcgcacgctcttcttcctctgcaagggacacgagggctccttcttctccgccttcctgaacctcctggtcagcgccttcgtggtcttcctggtcttcattgccagcaccatcgtgagcgtgggcttcaccatgtggtgcgacaccatcaccgagaagggcaccgtaccccacagctgtgaagagctccaggacatcgacttggagctgggcgtggacaactccgccttctacgatcagtttgcaattgcccagggttccctgattgactcacatggcgtggagactcctcccgggcagtcc

SEQ ID NO: 193769 - DNA, 1430 bp, Homo sapiens
  Payload ID: 18266
  Gene Name: transmembrane protein 179
  Uniprot ID: Q6ZVK1
  ENST ID: ENST00000556573
  CDS Start-End: 243-944
aattcccgcatctcccgcaggccgcccttctctggcccctggaccccgggctcctggcccgcgcgcaccaggagctgtccgcggtgctgaccgcaggcgcttcccgcgctcggccgatgcgcacgcgtcccgggaggggcgcgcgggacctgccggcgccgccactgcgcagcctcccgcggcctccccgcccggcgcagcctcccgcggccttcccgccgccgctctcgcccgggccggccatggcgctcaacaatttccttttcgctcagtgcgcctgctacttcttggccttcctgttcagcttcgtggtggtggtcccgctgtccgagaacggccacgacttccgcggccgctgcctgctcttcaccgagggcatgtggctgagcgccaacctcacggtgcaggagcgcgagcgcttcacggtgcaggagtggggcccgccggccgcctgccgcttcagcctgctcgccagcctcctgtctctgctgctggccgccgcgcacgcctggcgcacgctcttcttcctctgcaagggacacgagggctccttcttctccgccttcctgaacctcctggtcagcgccttcgtggtcttcctggtcttcattgccagcaccatcgtgagcgtgggcttcaccatgtggtgcgacaccatcaccgagaagggcaccgtaccccacagctgtgaagagctccaggacatcgacttggagctgggcgtggacaactccgccttctacgatcagtttgcaattgcccagtttggcctctgggcctcatggctggcctggctggccatcaccacgctggccttcctgaaggtctaccacaactaccgtcaggaggacctgctggacagcctgatccacgagaaggagctgctgctggcccggccgtccccacgcacctccttccaagaggagaagagcgctgtcatttaggcacagtgcaggcagggggagctggccccgacctccctgctgcgctcgggggcacgggcctgcctggggaagcagctggggggctctgcctgggccctggccacatgcagccctgcgtgtgtcccctcgacgccacgtgtagtgaggtgagcgccccagtgcccacctgtgagcctggcagtggactgggtgggtgccggctccctgatgaggatggtgcagagagactatgggtgtggggcgggggcggggggcacctccaggcctcgcacagggccccttggctgtcccagtaggacctgactggccagcctatgtggagggcgtccagcttgtctcccccaaccctggccggatgctgtctccatgccagctggcccaggggtggccagatgtcacttagccctgaacgaattctgcatgaattctgccatccaggcagaggctgcgtgtggggaggagctcacggcaccttccagcctctgg

SEQ ID NO: 193770 - DNA, 815 bp, Homo sapiens
  Payload ID: 18266
  Gene Name: transmembrane protein 179
  ENST ID: ENST00000556320
  CDS Start-End: 1-235
gcctgatccacgagaaggagctgctgctggcccggccgtccccacgcacctccttccaagaggagaagagcgctgtcatttaggcacagtgcaggcagggggagctggccccgacctccctgctgcgctcgggggcacgggcctgcctggggaagcagctggggggctctgcctgggccctggccacatgcagccctgcgtgtgtcccctcgacgccacgtgtagtgagccctgacccactggacatggggactctttccagtccggagagctccttgtctgtgtccccagcagaaggtggggtggctcctgcctcaccctctgcccagccctgatccaggccacagccatctagggccctgaaggaggggcaggaggcaggggtggcttctggaacctgaggcttggccccggttgggtctgttcttgggggctgcactgctggatcccaggagcaggtgtggaacagccccatggccagggtgatggaaatcctcggctgcatgcagacatagacccaccctggactgggctgtctccggagcccagacacatcgccctgggaaggggcagctgggcctgcagtgtgctgggcaggggctggcggccctggtcgtgggctctccagggtccctcaggggattgggcctctccccaggcaggaaggtgggaagtgcaggcatgacccggggttcctgaggctggtccaccaagttgcttctgagacgccttcgcttctgtcctggctggctgttaatgatatccctgttctaattccactctggctaaactgaaagtaaagatccttaagctta

SEQ ID NO: 193771 - DNA, 1645 bp, Homo sapiens
  Payload ID: 18266
  Gene Name: transmembrane protein 179
  ENST ID: ENST00000620158
  CDS Start-End: 332-880
gtgagggtgtgactgagtgcatgagagtgtgactgcctgtgagtgaatgtgtgactgcatgtgcgagtgactgcctgggaggatgtgattgtgcatgagtgtgcatgtgggtgtgactgcatgtgagggtgtgactgttgtgcgtgtgaaggcttgattgtgagtgtgcctgggaggatgtgagtgtgagggtgtgactccctgtgacatgagtgtgcatgcatgtgagtgtgaggaagagtgtgtaggtgtgagtgtctaggcaggtgtgtctgcagtgtgtgcagcatgtgcgtaagtgcatgtgaatgtgcgtgtgttgcatgtgagcatgtgcacgcctgtgcgtgtgagcattgtgtgcgtgatgggagccgtgggtgctgtgtggacagcccctctgcccctcccatgggctcccacgcccagcatccacctgagagaggagggagctgccttcccattctgcagagtctgtgtgctgaggccccgcagaagcaagtggaggagctgggatgtgaacctgggaccccggcgtagggggctgcttggctgtggaccctgcccctcaggaaagcccagggtccacctccagaggactcgttctggggcgggggcggaggcggggggcctccccacccggggctcgatgaggggctgtccgtttcttggctcgagtgctgccaagtgctccctgctgctgcgcccaccttcccggggagaggcgagcccctggctccctgagttcatgacccaccctgtccaccatcagcagctggcttgtgtctctgggtggctgggcaccagcctcctggaggccacgtgcctgggtccacatggagggtcctggtgggggcatcatcctgggtcccgggagtgaggctggcaggtgcccatcgggggtgtcaagtccagggggatcgaggctctggaagctcaagggggctctggccttggggaccagctgagtttccagctggcagccaggtcctcgagggaaggggtttggacagaatccgaggccccctaagctgatggggtcccctgtctccccttccagccctgacccactggacatggggactctttccagtccggagagctccttgtctgtgtccccagcagaaggtggggtggctcctgcctcaccctctgcccagccctgatccaggccacagccatctagggccctgaaggaggggcaggaggcaggggtggcttctggaacctgaggcttggccccggttgggtctgttcttgggggctgcactgctggatcccaggagcaggtgtggaacagccccatggccagggtgatggaaatcctcggctgcatgcagacatagacccaccctggactgggctgtctccggagcccagacacatcgccctgggaaggggcagctgggcctgcagtgtgctgggcaggggctggcggccctggtcgtgggctctccagggtccctcaggggattgggcctctccccaggcaggaaggtgggaagtgcaggcatgacccggggttcctgaggctggtccaccaagttgcttctgagacgccttcgcttctgtcctggctggctgttaatgatatccctgttctaattccactctggctaaactgaaagtaaagatccttaagctt

SEQ ID NO: 193772 - DNA, 1645 bp, Homo sapiens; identical to SEQ ID NO: 193771
  Payload ID: 18266
  Gene Name: transmembrane protein 179
  ENST ID: ENST00000616017
  CDS Start-End: 332-880

SEQ ID NO: 193773 - DNA, 586 bp, Homo sapiens
  Payload ID: 18266
  Gene Name: transmembrane protein 179
  ENST ID: ENST00000615269
  CDS Start-End: 19-586
ctctcgcccgggccggccatggcgctcaacaatttccttttcgctcagtgcgcctgctacttcttggccttcctgttcagcttcgtggtggtggtcccgctgtccgagaacggccacgacttccgcggccgctgcctgctcttcaccgagggcatgtggctgagcgccaacctcacggtgcaggagcgcgagcgcttcacggtgcaggagtggggcccgccggccgcctgccgcttcagcctgctcgccagcctcctgtctctgctgctggccgccgcgcacgcctggcgcacgctcttcttcctctgcaagggacacgagggctccttcttctccgccttcctgaacctcctggtcagcgccttcgtggtcttcctggtcttcattgccagcaccatcgtgagcgtgggcttcaccatgtggtgcgacaccatcaccgagaagggcaccgtaccccacagctgtgaagagctccaggacatcgacttggagctgggcgtggacaactccgccttctacgatcagtttgcaattgcccagggttccctgattgactcacatggcgtggagactcctcccgggcagt

SEQ ID NO: 193774 - DNA, 636 bp, Homo sapiens
  Payload ID: 18266
  Gene Name: transmembrane protein 179
  ENST ID: ENST00000615704
  CDS Start-End: 1-636
atggcgctcaacaatttccttttcgctcagtgcgcctgctacttcttggccttcctgttcagcttcgtggtggtggtcccgctgtccgagaacggccacgacttccgcggccgctgcctgctcttcaccgagggcatgtggctgagcgccaacctcacggtgcaggagcgcgagcgcttcacggtgcaggagtggggcccgccggccgcctgccgcttcagcctgctcgccagcctcctgtctctgctgctggccgccgcgcacgcctggcgcacgctcttcttcctctgcaagggacacgagggctccttcttctccgccttcctgaacctcctggtcagcgccttcgtggtcttcctggtcttcattgccagcaccatcgtgagcgtgggcttcaccatgtggtgcgacaccatcaccgagaagggcaccgtaccccacagctgtgaagagctccaggacatcgacttggagctgggcgtggacaactccgccttctacgatcagtttgcaattgcccaggtccaattccggaccccaggctggcctctgaaggctcttgctggccgtggctggcctgaggacgcttctcctggccaggagccctccaagggtgctggacatgggtgggcctga

SEQ ID NO: 193775 - DNA, 636 bp, Homo sapiens; identical to SEQ ID NO: 193774
  Payload ID: 18266
  Gene Name: transmembrane protein 179
  ENST ID: ENST00000621393
  CDS Start-End: 1-636

SEQ ID NO: 193776 - DNA, 1430 bp, Homo sapiens; identical to SEQ ID NO: 193769
  Payload ID: 18266
  Gene Name: transmembrane protein 179
  Uniprot ID: Q6ZVK1
  ENST ID: ENST00000630378
  CDS Start-End: 243-944

SEQ ID NO: 193777 - DNA, 815 bp, Homo sapiens; identical to SEQ ID NO: 193770
  Payload ID: 18266
  Gene Name: transmembrane protein 179
  ENST ID: ENST00000625459
  CDS Start-End: 1-235

SEQ ID NO: 193778 - DNA, 2513 bp, Homo sapiens; identical to SEQ ID NO: 193767
  Payload ID: 18266
  Gene Name: transmembrane protein 179
  Uniprot ID: Q6ZVK1
  ENST ID: ENST00000625335
  CDS Start-End: 907-1500

SEQ ID NO: 193779 - DNA, 1023 bp, Homo sapiens
  Payload ID: 18267
  Gene Name: transmembrane protein 179B
  Uniprot ID: Q7Z7N9
  ENST ID: ENST00000333449
  CDS Start-End: 6-665
gcgccatggcgctgtcctggctgcagcgcgtcgagcttgcgctctttgctgccgccttcctgtgcggggccgtggcggccgcggcgatgactcggacccagggctccttcagtggtagatgtcccctgtatggtgtggccaccctgaatggctcctccctggccttatcccgtccctcagcaccatccctgtgctactttgtagctggggcctctggcctcttggccctctactgcctcctgcttttgctcttctggatctacagcagctgcatcgaggactcccacagaggtgctatagggctgcgcattgcactggccatctcagctatagccgtcttcctggtcttggtgtctgcctgtatccttcgatttggcaccaggtctctctgcaactccatcatctccttgaacactacaattagctgttctgaagcccagaaaattccatggacaccccctggaactgctctgcagttttactccaacctacacaatgctgaaacctcttcttgggtgaatttggtattgtggtgtgtggtcttggtgctccaggtcgtgcagtggaagtctgaagccaccccataccggcctctggagaggggtgaccctgagtggagctctgagacagatgctctcgttgggtcacgcctttcccattcctgaagaataagcggagtgcttcctgcagccgaagactccatgcccaagtgcctgtaatcccccccctcaaggccctgtttatgttgggagtcttagttttcctttcgttggggggtgggggggaaacataatgacaggcccccctccacctcttcctgcagctgtttttgtaccaaaatattatattactgtcttcatcttagtagtgagtttttgatgttaaagtacaactagataggaggaaggagtgaaggctaagcagacatggactgaaacttagaggtactgttaggcagctgccctagggatgactgctcctttatttgttgttaatgaatcttgacctccttgtgtgaccctg

SEQ ID NO: 193780 - DNA, 797 bp, Homo sapiens
  Payload ID: 18267
  Gene Name: transmembrane protein 179B
  ENST ID: ENST00000533861
  CDS Start-End: 18-452
ctggtggtcagggcgccatggcgctgtcctggctgcagcgcgtcgagcttgcgctctttgctgccgccttcctgtgcggggccgtggcggccgcggcgatgactcggacccagggctccttcagtggtagatgtcccctgtatggtgtggccaccctgaatggctcctccctggccttatcccgtccctcagcaccatccctgtgctactttgtagctggggcctctggcctcttggccctctactgcctcctgcttttgctcttctggatctacagcagctgcatcgaggactcccacagaggtgctatagggctgcgcattgcactggccatctcagctatagccgtcttcctggtcttggtgtctgcctgtatccttcgatttggcaccaggtctctctgcaactccatcatctccttgaacactacaattagacctcttcttgggtgaatttggtattgtggtgtgtggtcttggtgctccaggtcgtgcagtggaagtctgaagccaccccataccggcctctggagaggggtgaccctgagtggagctctgagacagatgctctcgttgggtcacgcctttcccattcctgaagaataagcggagtgcttcctgcagccgaagactccatgcccaagtgcctgtaatcccccccctcaaggccctgtttatgttgggagtcttagttttcctttcgttggggggtgggggggaaacataatgacaggcccccctccacctcttcctgcagctgtttttgtaccaaaatattatattactgtcttcatctta

SEQ ID NO: 193781 - DNA, 400 bp, Homo sapiens
  Payload ID: 18267
  Gene Name: transmembrane protein 179B
  ENST ID: ENST00000526546
  CDS Start-End: 1-286
gctcttctggatctacagcagctgcatcgaggactcccacagaggtgctatagggctgcgcattgcactggccatctcagctatagccgtcttcctggtcttggtgtctgcctgtatccttcgatttggcaccaggtctctctgcaactccatcatctccttgaacactacaattagctgttctgaagcccagaaaattccatggacaccccctggaactgctctgcagttttactccaacctacacaatgctgaagtgagacccaaggataggaggaaaaactgacataaatatctgtagctgtgtgggtgctcaccagtgtattgtgagcttggcctaccagtgagaggagctgaaggggttgtcagcttaaaattcagcagttcagagtggtgtgtg

SEQ ID NO: 193782 - DNA, 2762 bp, Homo sapiens
  Payload ID: 18268
  Gene Name: transmembrane protein 18
  Uniprot ID: Q96B42
  ENST ID: ENST00000281017
  CDS Start-End: 95-517
ggcagatctcacgagagaggatttggcgccctcctctgtggattctggccaggccgggttcggcggttgctgtgagagcgggcttcccaacaccatgccgtccgccttctctgtcagctctttccccgtcagcatcccagccgtgctcacgcagacggactggactgagccctggctcatggggctggccaccttccacgcgctctgcgtgctcctcacctgcttgtcctcccgaagctacagactacagatcgggcactttctgtgtctagtcatcttagtctactgtgctgaatacatcaatgaggcggctgcgatgaactggagattattttcgaaataccagtatttcgactccagggggatgttcatttctatagtattttcagccccactgctggtgaatgccatgatcattgtggttatgtgggtatggaagactttgaatgtgatgactgacctgaagaatgcacaagagagaagaaaggaaaagaaaaggagaaggaaagaagactgaggggcagcagctgcttggagtttgcgtccttcccgtccacccagtgcagctcccagtgctgcagtgtgcgtggcgtgggcatccttccagctgactcatggtttgaaaaaccgttgttttatttaaatatccacagtggtagggcacacactgaagttggcttttcagccagcactgaatgtatccatcaggacatgcgtcttcaggtgcctgatctttgtagtcaggctgtgggaacggtctctgcagagcttcataactgggaatttgatttgaagaagtccatgtcatatgtgtaactagtactaattataaatataaaatacacaatataaaatatgaaactcaataataaacagtgccacctgtacatgggcaccatgccctcctcctcgtgctgtgttttctagtgcatgccacagttcgcagtagagggtgttttcaccttccaagacatggggcaaagtttggagacacctggttgtcactggagggggtggtgctcctggcttctcctgtggagcccggggtgatgcataaaatcctgtgtgcctgggtcagccgcatcacagacaatgacttgacatgaaatgtcagctgtgctggggcagagagaccttggaaggaagctcttggaaaatacgttgtatctcagtttgatgaaccaattcacaagaggctaggccctctctagcaaagttatgggctgctttactgaaaacagaatggaagccctgaagtcaacactccatggagaagcgtgtctttcctaatgtcctggtgttctgttgatttaggtgcttgggaacacaatgctcccagttctgttaggacaggcatactgttactttgcaatatccactttataaaatagctcctgcccagtggctcttggttcctgtcaaatgtggacctgtagtttaagaatgacaggtggttagagacccagatatttaaaaataggtgttcaataagggaatactgattgtgcattgtatctggatagcatgcctaattgtgcatttctgaaagttaccaattcaaaatgtaattggaacagttatctttgattagacaagcctgggaagagaatgttgaggtgcagagctcaccagccaagttcatgcccctctcgggcctttgtggctgagaagtgggacagaaagatgattaaggtaatgtgtcctccctgtagcattgtccagggccgttgtgtagatatttgacttcactgacagaaaagaaaccagggagtttgtagagactgtgcatttttagtataacattttcaccatctgatatggtttggctttgtgtccccacccaaattgcatctcaaattgtaatccccatgtgtcaagggagggacctgatgggaggtgatgggatcatgggggtggtttcccctatgttgttatcataatagagagggagttctcacaagatctgctggttttaaagacagcagtttcccctgctgtcactgtctctctcctgctgccttgtgaagaaggtgcttgtttctccctctgccatgattgtaagtttcccgaggcctccccggccatgtggaactgagtcaattaaacttcttgtttataaagtaatccaggtctcaggtagtatctttatagcagtgtgagaacagactaattaaacatctatatgttatttggacttaatatggggccgtgtgattgaatctcagtttgcctgtgataaagtagtgtaacagtattgctagctttgcatgaatttgatgctgatgacatgtcagtgtgaaaccatgacgtgtggtctttgattttcattctgcatgtgtgtgtctgtgttttggaacagttatattttggttttgtaaaaacaaccttcactttatttttaactgtgtagtaagtttatattcaatgccttaaagtgcattgttaacaattgtcttgatatgttgtcctcattttagggaaagtcatagaagccaaaatgatcagcagttgagtaatttacgaaagcacaggtgcaatcccactttaaagcactgggggttgcacagagcacactggtttcaggctccataaatgtggatgactcactggagagcttcatctgtttaagtagaacaaatgtttttactctactgataaagtacaggaaaggaggtttgggatcaaaattatttttcacattccaaacctgtgacaccttacgtttatcgattgctatgcaataaaatacatctttaataata

SEQ ID NO: 193783 - DNA, 2376 bp, Homo sapiens
  Payload ID: 18268
  Gene Name: transmembrane protein 18
  Uniprot ID: Q96B42
  ENST ID: ENST00000355654
  CDS Start-End: 388-771
gttggagaaaatcaagtcttgcacgtggcgatggctcaagattccctgaggtcttcagtgctgactaaggagtctgaaatgatgattcatgttttacctttggggctgagccaagtgcatctctttgagcaatcgtcttaatttccttgtcgtcaccaattatcataaccaattatcatcgtaaaggatggtaattcctttaattatacccaccttaaaaacatgattctgttccacaaacgaaaggagcacatcagagatgccttcagttctgtgtgcttgaactttgaattccatgaattatagttgcactgaggggagaatcctgtttccatcctcctggttccttctccctttcctgtccccatgtttctctgaggcctggcaatgctctctggatacttgcagacggactggactgagccctggctcatggggctggccaccttccacgcgctctgcgtgctcctcacctgcttgtcctcccgaagctacagactacagatcgggcactttctgtgtctagtcatcttagtctactgtgctgaatacatcaatgaggcggctgcgatgaactggagattattttcgaaataccagtatttcgactccagggggatgttcatttctatagtattttcagccccactgctggtgaatgccatgatcattgtggttatgtgggtatggaagactttgaatgtgatgactgacctgaagaatgcacaagagagaagaaaggaaaagaaaaggagaaggaaagaagactgaggggcagcagctgcttggagtttgcgtccttcccgtccacccagtgcagctcccagtgctgcagtgtgcgtggcgtgggcatccttccagctgactcatggtttgaaaaaccgttgttttatttaaatatccacagtggtagggcacacactgaagttggcttttcagccagcactgaatgtatccatcaggacatgcgtcttcaggtgcctgatctttgtagtcaggctgtgggaacggtctctgcagagcttcataactgggaatttgatttgaagaagtccatgtcatatgtgtaactagtactaattataaatataaaatacacaatataaaatatgaaactcaataataaacagtgccacctgtacatgggcaccatgccctcctcctcgtgctgtgttttctagtgcatgccacagttcgcagtagagggtgttttcaccttccaagacatggggcaaagtttggagacacctggttgtcactggagggggtggtgctcctggcttctcctgtggagcccggggtgatgcataaaatcctgtgtgcctgggtcagccgcatcacagacaatgacttgacatgaaatgtcagctgtgctggggcagagagaccttggaaggaagctcttggaaaatacgttgtatctcagtttgatgaaccaattcacaagaggctaggccctctctagcaaagttatgggctgctttactgaaaacagaatggaagccctgaagtcaacactccatggagaagcgtgtctttcctaatgtcctggtgttctgttgatttaggtgcttgggaacacaatgctcccagttctgttaggacaggcatactgttactttgcaatatccactttataaaatagctcctgcccagtggctcttggttcctgtcaaatgtggacctgtagtttaagaatgacaggtggttagagacccagatatttaaaaataggtgttcaataagggaatactgattgtgcattgtatctggatagcatgcctaattgtgcatttctgaaagttaccaattcaaaatgtaattggaacagttatctttgattagacaagcctgggaagagaatgttgaggtgcagagctcaccagccaagttcatgcccctctcgggcctttgtggctgagaagtgggacagaaagatgattaaggtaatgtgtcctccctgtagcattgtccagggccgttgtgtagatatttgacttcactgacagaaaagaaaccagggagtttgtagagactgtgcatttttagtataacattttcaccatctgatatggtttggctttgtgtccccacccaaattgcatctcaaattgtaatccccatgtgtcaagggagggacctgatgggaggtgatgggatcatgggggtggtttcccctatgttgttatcataatagagagggagttctcacaagatctgctggttttaaagacagcagtttcccctgctgtcactgtctctctcctgctgccttgtgaagaaggtgcttgtttctccctctgccatgattgtaagtttcccgaggcctccccggccatgtggaactgagtcaattaaacttcttgtttataaagt

SEQ ID NO: 193784 - DNA, 654 bp, Homo sapiens
  Payload ID: 18268
  Gene Name: transmembrane protein 18
  ENST ID: ENST00000405941
  CDS Start-End: 66-497
ccgtgccgggttcgtctgacagatcccaggggagcccacgccccacgtggccgccaaggggtgacatgggcactcgatggggtctgggcagaaagccgtgctcccctcacctccgtgcctctggtcttctgcagacggactggactgagccctggctcatggggctggccaccttccacgcgctctgcgtgctcctcacctgcttgtcctcccgaagctacagactacagatcgggcactttctgtgtctagtcatcttagtctactgtgctgaatacatcaatgaggcggctgcgatgaactggagattattttcgaaataccagtatttcgactccagggggatgttcatttctatagtattttcagccccactgctggtgaatgccatgatcattgtggttatgtgggtatggaagactttgaatgtgatgactgacctgaagaatgcacaagagagaagaaaggaaaagaaaaggagaaggaaagaagactgaggggcagcagctgcttggagtttgcgtccttcccgtccacccagtgcagctcccagtgctgcagtgtgcgtggcgtgggcatccttccagctgactcatggtttgaaaaaccgttgttttatttaaatatccacagtggtagggcacacactgaagt

SEQ ID NO: 193785 - DNA, 2572 bp, Homo sapiens
  Payload ID: 18268
  Gene Name: transmembrane protein 18
  ENST ID: ENST00000432667
  CDS Start-End: 62-262
ctctgtggattctggccaggccgggttcggcggttgctgtgagagcgggcttcccaacaccatgccgtccgccttctctgtcagctctttccccgtcagcatcccagccgtgctcacggtacagcagggtcccggggagtccaggaggcggcggagtgcggcactgtctggagagttcagtgtattgcagagaggttggagaaaatcaagtcttgcacgtggcgatggctcaagattccctgaggtcttcagtgctgactaaggagtctgaaatgatgattcatgttttacctttggggctgagccaagtgcatctctttgagcaatcgtcttaatttccttgtcgtcaccaattatcataaccaattatcatcgtaaaggatggtaattcctttaattatacccaccttaaaaacatgattctgttccacaaacgaaaggagcacatcagagatgccttcagttctgtgtgcttgaactttgaattccatgaattatagttgcactgaggggagaatcctgtttccatcctcctggttccttctccctttcctgtccccatgtttctctgaggcctggcaatgctctctggatacttgcagacggactggactgagccctggctcatggggctggccaccttccacgcgctctgcgtgctcctcacctgcttgtcctcccgaagctacagactacagatcgggcactttctgtgtctagtcatcttagtctactgtgctgaatacatcaatgaggcggctgcgatgaactggagattattttcgaaataccagtatttcgactccagggggatgttcatttctatagtattttcagccccactgctggtgaatgccatgatcattgtggttatgtgggtatggaagactttgaatgtgatgactgacctgaagaatgcacaagagagaagaaaggaaaagaaaaggagaaggaaagaagactgaggggcagcagctgcttggagtttgcgtccttcccgtccacccagtgcagctcccagtgctgcagtgtgcgtggcgtgggcatccttccagctgactcatggtttgaaaaaccgttgttttatttaaatatccacagtggtagggcacacactgaagttggcttttcagccagcactgaatgtatccatcaggacatgcgtcttcaggtgcctgatctttgtagtcaggctgtgggaacggtctctgcagagcttcataactgggaatttgatttgaagaagtccatgtcatatgtgtaactagtactaattataaatataaaatacacaatataaaatatgaaactcaataataaacagtgccacctgtacatgggcaccatgccctcctcctcgtgctgtgttttctagtgcatgccacagttcgcagtagagggtgttttcaccttccaagacatggggcaaagtttggagacacctggttgtcactggagggggtggtgctcctggcttctcctgtggagcccggggtgatgcataaaatcctgtgtgcctgggtcagccgcatcacagacaatgacttgacatgaaatgtcagctgtgctggggcagagagaccttggaaggaagctcttggaaaatacgttgtatctcagtttgatgaaccaattcacaagaggctaggccctctctagcaaagttatgggctgctttactgaaaacagaatggaagccctgaagtcaacactccatggagaagcgtgtctttcctaatgtcctggtgttctgttgatttaggtgcttgggaacacaatgctcccagttctgttaggacaggcatactgttactttgcaatatccactttataaaatagctcctgcccagtggctcttggttcctgtcaaatgtggacctgtagtttaagaatgacaggtggttagagacccagatatttaaaaataggtgttcaataagggaatactgattgtgcattgtatctggatagcatgcctaattgtgcatttctgaaagttaccaattcaaaatgtaattggaacagttatctttgattagacaagcctgggaagagaatgttgaggtgcagagctcaccagccaagttcatgcccctctcgggcctttgtggctgagaagtgggacagaaagatgattaaggtaatgtgtcctccctgtagcattgtccagggccgttgtgtagatatttgacttcactgacagaaaagaaaccagggagtttgtagagactgtgcatttttagtataacattttcaccatctgatatggtttggctttgtgtccccacccaaattgcatctcaaattgtaatccccatgtgtcaagggagggacctgatgggaggtgatgggatcatgggggtggtttcccctatgttgttatcataatagagagggagttctcacaagatctgctggttttaaagacagcagtttcccctgctgtcactgtctctctcctgctgccttgtgaagaaggtgcttgtttctccctctgccatgattgtaagtttcccgaggcctccccggccatgtggaactgagtcaattaaacttcttgtttataaagtaa

SEQ ID NO: 193786 - DNA, 623 bp, Homo sapiens
  Payload ID: 18268
  Gene Name: transmembrane protein 18
  ENST ID: ENST00000418447
  CDS Start-End: 15-194
gacatgggcactcgatggggtctgggcagaaagccgtgctcccctcacctccgtgcctctggtcttctggtacagcagggtcccggggagtccaggaggcggcggagtgcggcactgtctggagagttcagtgtattgcagagaggttggagaaaatcaagtcttgcacgtggcgatggctcaagattccctgaggtcttcagtgctgactaaggagtctgaaatgatgattcatgttttacctttggggctgagccaagtgcatctctttgagcaatcgtcttaatttccttgtcgtcaccaattatcataaccaattatcatcgtaaaggatggtaattcctttaattatacccaccttaaaaacatgattctgttccacaaacgaaaggagcacatcagagatgccttcagttctgtgtgcttgaactttgaattccatgaattatagttgcactgaggggagaatcctgtttccatcctcctggttccttctccctttcctgtccccatgtttctctgaggcctggcaatgctctctggatacttgcagacggactggactgagccctggctcatggggctggccaccttccacgcgctctgcgtgctcctcacctgct

SEQ ID NO: 193787 - DNA, 2852 bp, Homo sapiens
  Payload ID: 18269
  Gene Name: transmembrane protein 180
  Uniprot ID: Q14CX5
  ENST ID: ENST00000238936
  CDS Start-End: 238-1791
ggctcgcacctggctcccgccagccgtgggattaggcttcgccggctacgattgcggcccccatcttctgacttttcctcgtgtgacccatcttttcaaattcccttacctgaggaaggagcccgattacaaggatatttacctgctcctaccctgatctagggacgaggatgggaagaccgcctgtggccatgagccctccccggtgctcctggggctaaggctggggctgcagccatggggctgggtcagccccaggcctggttgctgggtctgcccacagctgtggtctatggctccctggctctcttcaccaccatcctgcacaatgtcttcctgctctactatgtggacacctttgtctcagtgtacaagatcaacaaaatggccttctgggtcggagagacagtgtttctcctctggaacagcctcaatgaccccctcttcggttggctcagtgaccggcagttcctcagctcccagccccggtcaggcgccgggctctcctcaagggctgtggtgctggcccgggtgcaggccctgggctggcatgggccgctgctggcgctgtcgttcctggcgttctgggtgccctgggccccagctggcctgcagttcttgctgtgcctgtgcctctatgatggcttcctgacgctcgtggacctgcaccaccatgccttgctggccgacctggccctctcagcccacgaccgcacccacctcaacttctactgctccctcttcagcgcggccggctccctctctgtctttgcatcctatgccttttggaacaaggaggatttctcctccttccgcgctttctgcgtgacactggctgtcagctctgggctgggctttctgggggccacacagctgctgaggcggcgggttgaggcggcccgaaaggacccagggtgctcaggcctggttgtggatagcggcctgtgtggagaggagctgcttgtaggcagtgaggaggcggacagcatcaccttgggccggtatctccggcagctggcacgccatcggaacttcctgtggttcgtgagcatggacctggtgcaggtcttccactgccacttcaacagcaacttcttccctctcttcctggagcatctgttgtccgaccatatctccctttccacgggctccatcctgttgggcctctcctatgtcgctccccatctcaacaacctctacttcctgtccctgtgccggcgctggggcgtctacgcggtggtgcgggggctcttcctgctcaagctgggacttagcctgctcatgttgttggccggcccggaccacctcagcctgctgtgcctcttcattgccagcaaccgcgtcttcactgagggcacctgtaagctgctgaccttggtggtcactgacctggtagacgaggacctggtgctgaaccaccgcaagcaggcagcctcggcactcctctttggcatggttgccttggtgaccaagccaggccagacctttgccccgctgctgggcacctggctgctctgtttctacacaggtcatgacctcttccagcagtccctcataacccctgtggggagtgcccatccctggccagagcccccagctccagcccctgcacaggccccgacgctccgccagggctgcttctacctgctggtgctggtgcccatcacctgtgctctgctgcagctcttcacctggtcccagttcacgctgcatgggagacgcctgcacatggtcaaggcccagcgccagaacctgtcacaggcccaaaccctggatgttaagatggtgtgagagctgtggcaaggtcaccccactgaggatgctgctggcagcctggggaaggagccagttttttttggttttttttttaaggatttcatagttttttttttttttttttggagctgttgcccaaaaaaatggatctgttgcagtggtgcaatctgggctcactgaaaccaccacccaggttcaagcaattatcctgcctcagcctcccgagtaggtgggattataggagcgtgccaccatgcccggctactttttgtatttttagtagagacagggtttcatcatgttggccaggctagtctcaaacccctgaccttaggtgatcagcccgcctcggcctcccagagtgctgggattacaggcgtgagccactgtggccaacctaatttttgtattatttagtagagacagggtttcaccacattggccaggctggtctcgaactcctgacctcaagtgatctgcctgccttggtctcccaaagtgctgggaatacaggcatgagccaccgcactcggccaggagctagttttaccagcaccctgctccactgccttcctctagtgcagcctggaagacatggcagcgggtagctcctggggctgagccagaagcatcactgcagtgaaagtctctgcttacctgtctggctcagcttgggcaagggctgggccatatgtgctcagggacgtgcttctcttgtaaggcaggaggacagaagaggaccaagaagggagggggctgccctgtggtgcacacaggcctgccatggggcgtgggagcccatcccgctgcctgactggagctggccgctgtggtggactcaggaaccacttttaatactgcaactgctcccttttgcccagtcagggaaagctgactgtaagtcccacctcccactccgtccacccttctagtggtttctctgagaggtttctctgcttcagctgtgcttgaagtggcatgcctcctctgctgcagggctcccccacccccacacggcctctaaagatgtttatttccttatagactgattaaagtcagccattctttttcctcaa

SEQ ID NO: 193788 - DNA, 823 bp, Homo sapiens
  Payload ID: 18269
  Gene Name: transmembrane protein 180
  ENST ID: ENST00000369931
  CDS Start-End: 220-681
gccagccgtgggattaggcttcgccggctacgattgcggcccccatcttctgacttttcctcgtgtgacccatcttttcaaattcccttacctgaggaaggagcccgattacaaggatatttacctgctcctaccctgatctagggacgaggatgggaagaccgcctgtggccatgagccctccccggtgctcctggggctaaggctggggctgcagccatggggctgggtcagccccaggcctggttgctgggtctgcccacagctgtggtctatggctccctggctctcttcaccaccatcctgcacaatgtcttcctgctctactatgtggacacctttgtctcagtgtacaagatcaacaaaatggccttctgggtcggagagacagtgtttctcctctggaacagcctcaatgaccccctcttcggttggctcagtgaccggcagttcctcagctcccagccccgcctgtgtggagaggagctgcttgtaggcagtgaggaggcggacagcatcaccttgggccggtatctccggcagctggcacgccatcggaacttcctgtggttcgtgagcatggacctggtgcaggtgcagtggctcacgcctgtaatcccagcacttcgggacgccaaggtggaaagaccgcttgagcccaggagttcgaggctgcaatgagttatgattgcaccactgcactccagcctgggcggcagagaaaggctccatctctaaaaaaagaagagctaagtgctgtacctaaaacatgcagtatataaactggctgaacttagaaataaactgttttcatgttatgaaa

SEQ ID NO: 193789 - DNA, 5390 bp, Homo sapiens
  Payload ID: 18270
  Gene Name: transmembrane protein 181
  Uniprot ID: Q9P2C4
  ENST ID: ENST00000367090
  CDS Start-End: 12-1850
cgcggaggcggatgggcgcggctccctcccccactcaggcctcttcacggggcggggggccgggtcccccagcccccacccgcgccgtgtccagctcctcgcgtgctcgcggcggagccctgagcgcactgggtccgagtcctgcgcgccccctcaccacctcccccgcacctgctcctcctcctcggtcccgcccagcgcgccagcagcccgatccccagtgctgggagaagagagggggcgcaggcggcgacacaaagggtggagcggcgggaccgggacccgggaggctgcgcggcatggacgccgagtaccctgcctttgagcccccgctctgcagcgagctcaagcacctgtgccggcggctgcgggaagcgtaccgcgagctcaaggaggacctcacgcccttcaaggatgaccgctactacaggctggcgcccatgcggctctacacgctctccaagcgccactttgtcctcgtgtttgtcgtcttcttcatctgctttggcctgaccatcttcgttgggatcagaggacctaaagtgatccagacttctgcggctaatttttcactaaataatagcaaaaagctaaagccaattcaaatactttcaaatccactgtctacatacaatcagcaactatggctgacatgtgttgttgagttggatcaatcaaaagaaacttctattaagacaagctttcccatgactgttaaagtcgatggtgtagctcaagatggaaccacgatgtacattcataacaaagttcacaaccggacaaggaccctcacatgtgcagggaaatgtgcggagattattgtggctcaccttggctacctgaactacactcagtatacagtgatagtgggatttgaacacctgaagctccccatcaagggaatgaacttcacatggaagacttataaccctgccttctcccggttggaaatctggttccggtttttctttgtggtgctcaccttcatcgtcacttgcctgtttgcgcattccctccggaaattttccatgagagactggggcatcgagcagaagtggatgtctgttctcctgcctctgctgctactttacaatgatccgttcttccccctctccttcctggtcaacagctggctcccagggatgctggatgacctctttcagtccatgttcctgtgcgccctgctgctcttctggctgtgcgtgtaccacgggattcgtgtccagggagaaagaaagtgtttaactttctatttgcctaaattcttcattgttggactattgtggttggcttctgttacgctaggaatatggcaaacagttaacgaattacatgatccaatgtaccagtatcgagttgataccggaaattttcagggaatgaaggtcttcttcatggtggtggcagcggtgtacattctgtacctcttgttcttgatagtgcgggcgtgttccgagctacgtcacatgccttatgtggatctcaggttgaaatttttgactgcattgactttcgtagtacttgtcattagcatcgccatcctttatttgagatttggggcgcaagtactacaagacaattttgtagcagagctgtcaactcactaccagaattcagccgagttcttatctttctatggcctgttgaacttctatctctacaccttggcctttgtatattctccatcgaagaatgccctctatgagtcccagctgaaagacaatcctgccttctccatgctgaatgactcggatgatgatgtgatttatgggagtgactatgaggaaatgccgctgcagaacggccaggccatccgggccaagtacaaggaggagtcagatagtgactgagccccggccagcccagcgaggcgacaagatgcctggatgctttccccggtgaccgtctgctgaccttcccctgttatattcagatttttcttacaagcagagatttcctgttcatttgtttacatatttttttaaaggaaaaccaaaactgagggtaaatttaaatgtttagccaaatttattgtcatggtggctacgagaagaggcattgataacaagtttcaacagccaaatccttttttacagagatttcagatgagcgtgttttcagtgatgaggaaatttcacgtttttagtacagtgaattatgtacttttttttcctgtaatcattcactgattccaagttcacgggcagcctgtgactaggtcctcagcgtgacagcatcaccctctttcttcccttttccatggtactgttttgtgaccctttaaactcaaagggaagccttatctgtggctgcttcagggcagtccttcctcgttgagtggccagtgccctgggtaaccaggtggctgaagtgattggtcagttatgtggactgcgttttgtgcagtgtgtgagttatgactcatcgggaatgggagatgctggggttccaacccttcacgtcaccaaaggggaagtaatagtgtggagttctgaggagggtttgataagttgaataaggaaaggctaagataatttacaggttaccaactcatgtggggaaggtcttactgccatggtgcttttcaggggcctgtgtgtacacacatgattaaatggatttgcctgtgggaggtatgggcaggagaggaacccttaccattccagtaaatagcagtttctgcaattctgttgaatatgaaatgccatagagctttatttatttatgtaagtaaaagctaaatgaggggccaggtgcagtggctcacatctgtaatctcaacactttgggaggccaaggtgggaggatcacttgagcccaggagtttgagaccagcctgggcaacacagggagaccccgtctctataaaacatttagaaagttggctgggcatgctggggcatgcccatagtcccagctactcaggaggctgaggtgggaggattgcttgagccctggaggtcaaggctgcagtgagccatgattgcaccactgcactccagcctgggtgtcagagcgagaacccgtgtcataaataaataaagctacatgaaagattgatagaatattttagattatttattggccaaaagtttttaaaactcatatttggaagcaaaatgaaaagcaagtaaaatgttttaaatggttcatggaaaacgtatttgggtagaaggcaactcgtgcttccggaaggggttccctgtcctccatgtgtccacatggcggtcaggtagggacgacctgttctgtaaagtccttggcactgctgaatctgtggcatcatagaaggccctggagcttccccgttcctttcagtcagggactccatatagagtctcatgtggacgtctcccgtgctttcctcttgacctctacagtcacacttctgttaacatctggtaactgtgggcaacctgactgatgccgtcttggcaattgaggtccagaagatgatagttccgcaacgcaagcagtacctactttttttcttcatctatgcattgactctcagattaccatgcagagcttcacgttatcatccacgttaagtagtgctaggtaggaccttagagatgttcatgagaaactatttgttatgactttcctttgtatctttccttttaatttaaactttaatgataatgtacttttaatatggattctattcacatttgttttaaaaaccttgtaaatatgaatgtttaagacaacttactgcaagggtaattcaagtttacatgatttttaaatttgcaatgatgttttttttattctgtgtattgaaaaaaattttctgttaccaaattttacaacttctaataagactactataactttatgtaaactgatgaagatgtgctgattaacatattctgtgatatggtttacaacttttaatcataattgtccatgattttggaatgctgttatttatcagtaaatgtaaaatatttgaggcatttagccatacacacactagaactttttaaaactttgtcctatagtgtaattataaactgatgactattatcttcatacattgagtcttcatgcatcaatgaaatgaaaaatataggattatttatttactttttgtaactaagtgggaaataagaaaaaaagttagaaagtacttaaggggaaaatcgttcttactaagtcatgtattttcaacttgtcttccctggtatatcataaataccgacatattacataccccatgtaaaattttgcttaaactctctagcacttggcatgtagaatatgtaccataggtatcaggttaaaacactaaagtctgccagaaacttttgacagtagcaagaaaattgttgaagaaaaaataaattatttactgagggtagttatgttaaagttttgcgaacttaaagggctgactttagttccttcatggtaatggcttgagtaacatcatctttgggattttttaaatactggtccagtctaggagaacctggaagatgaccagaggtatttcagtttccctagggagagcttcgttatccatgtggatgataagtctgcttgatttattattaaatcattatagcagtgaagtggtgccattttctctctcttaagccccatttgaaaggctagagaaggggatatatatactatgttcaaggtttgtaaggttgttaatgtacataattgcagattgcaataaaagcttagatacattttgtaaacccaacccactaaatgagcaggttacaagacaaatgtcaccagcctcaagtattttatgaactatttactgagggtagttatgttaaatagattataatgtggtaaattatttcctgaatcctttatcacaggaaaaacacagaccctcataaaagggataattaaaacggatgtgtctgaacatttagtgaagatgagacttaaaacatgaaagtgtatttgtgtattttgagggttttagaaaccggttgccttagaggttagacttttgaagaaaaaaaaaaaaagatacagatcttttcccctggccaaagggaagttgtattagtctgtgacatcttgtgatgctgtttatcttggtttgacattggagatacgctagtaactgtgataccatactataaaacagaagaattttctgctactaaaaactgcctttttacaaaatgactgtaaatatttgtaaaataaaataacactaaactttaagcccaaaaggagagatagagccatgtgttcagttgtggacctgtccgtggggcacagtgccaccccatcacagtgttgctgtcatcaggcaaaagtgaatgtttgtttatggcaaattcgtcttttgcgaatggcttaattctgacactacctttctgggaaatgttaataaatttttaatattc

SEQ ID NO: 193790 - DNA, 3198 bp, Homo sapiens
  Payload ID: 18271
  Gene Name: transmembrane protein 182
  ENST ID: ENST00000409173
  CDS Start-End: 186-746
gagagggggcgggtgctacctggcagctccgcgggtgcgtggccggtgctggctgggagttctggtctcaggcaaggtggggactgggcacatcatcaatacggaatcatggaaaactagaagagtttcaagtgacaggcaaatgtccaattttctgaagaaaaaagacaccttttacctcctccatgatagagaacgtcacttttcaccatgaagggttcttctggaggtgttggtttaatgggattgtggaagagaatgactccaatatttggaagttctggtacaccaatcagccaccgtccaagaactgcacacatgcttacctgtctccgtaccccttcatgagaggcgagcacaactcgacctcctatgactctgcagttatttaccgtggtttctgggcagtcctgatgctcctgggggtagttgctgtagtcatcgcaagctttttgatcatctgtgcagcccccttcgccagccattttctctacaaagctgggggaggctcatatattgctgcaggcatcctattttcattggtggtgatgctgtatgtcatctgggtccaggcagtggctgacatggaaagctaccgaaacatgaaaatgaaggactgcctggatttcaccccttctgttctgtatggctggtcatttttcctggccccagctgggatatttttttctttgctagctggattactatttctggttgttggatggcatattcagatacatcactaaatcaactgttgccacaagtattttcttgagagattttaaaacaaggaatactttttttccattttgtttcattgatcccagcataaagttagtagatataactttttagttgctattcaaattaatcattttactaaaattttcttcagtaagaaggtcctagaatctctccagacaccagcaagcctctatcttgtctaagtgctgtcaaggacctagttctttagggaataggtaaacaggtctccctttcattgaacatgttagagttcatgcaggtcgcaaaggcctgataatagcttaataccatgacatggggaaaatctcgatagatttggcttaaagtctccttggcattcacttctgctaattaaaaaaaatccttgaagaataattaagaatgggcaaggttgtcagagaatttattttgtttcttgcccacacagataatatccacatacacattcactggctcttgtgagcaaatgaatttaaaaatagacagcagttgttctaattagtgggagccatgtactcaccagttaaaatgggccacaacaaacaagactgagagcatgtacttatcttgctttttcaccaacagtggtttggttacctagttttattcacttaattgtgcatgcttacataaactttaaactacatttaaaactagcaaatctgcataccaaattatgtataacgtagattgaatttttatgaacttaaagtgagttaattgtataatgtaatattgtttaaaatatgtaaaaaccaagcatttccgcttggtccataattctatttgatattttaaaattctcatttaaaaattatattgctatcattcagcatgtgaaaatttattgataaaatgtgattttaatattttttagatataaactttcaacgtacttccatatgaggattataatagccctgctttattaaagaccataaaatattaactttccccaagatgttatgggttccagttcttctgatcatttgattcctttaattactgtccctcaatttcttcatctttacaatagatatattaacatttacagatcgactatttcctttaacctcctagaagaaagtttttgtggggaaagatgattctgtattattcagtagcatagacattttgcatatcaaagatgttcatttggcactaatgttgattgaaatcaaatccatctgagatgcctagctcgtatttgcattctggaagcctccatcgcaggggagctcggcagggtatgtgagctttgttggaggtgcggtgtttcattctgcagctgttgtgaggacagagaggcatggcccacaggcaaaaaaagtcaccacccagaagatgctctgggatagaggaactgctccttttcatcagctcttccaatgccgtgggagaggtgatcccagtcttctctgtacatcttgtgcttttccattaagacttgttccagtgggaaggagctttggaaaaattgcaaaggtctgaatcttcagggcattttcatgacaggacttgccaataataataataataataataataataataataataaagctccagaggcctaactggtttctcaagtcatttcagtgatatcattgaaacgtttttgtggtacttccctttgtctttcactgtttcatttttatattgcttcatttacttctttgcttttggctttgttattagaaaaaataattatgaggtctgttgtgcatgttgactgtgatattaagttatggcatgccattaagttttccagacgatgttggatgtatctgattagttcatgtcatctgtaaatacaattcttttttgtagtactttggaatggagcctttttctggtgtactgtatgccatttaagtttcacatacaagctgctttcggcaaaggcttgaatatttataaatttcagatggttatcctcactttatagtacacttaagtggctaccatatattttttatatgacaattggctgaatagctgatgtgtatgacacttttacacagatttgcactttggaactattttatagttgtaatgcatcaatcaaatacatttcaagcacatttcttgatcaatttaccagcaaccctctgaaggaatgaaggagagttgtgattgctatgtcaatgagtgaaatatacttaaaaatggcagagttatatagtacattattgtagcaaccttatatctgatttgagatactgtgttgccaaatgtccatgttatgtttatttctctattggttgtatttattaatttttagaagcctttaaactgtgttagaatctttttgaaaaatgttgattttgcatcataaagtttcaatttatcaaggatatcttttcagttacacttttagaaagagtgaataaaaagggcagtgagttatgctcttggacttggtgaaagcta

SEQ ID NO: 193791 - DNA, 3112 bp, Homo sapiens
  Payload ID: 18271
  Gene Name: transmembrane protein 182
  Uniprot ID: Q6ZP80
  ENST ID: ENST00000409528
  CDS Start-End: 263-664
agagagagggggcgggtgctacctggcagctccgcgggtgcgtggccggtgctggctgggagttctggtctcaggcaaggtggggactgggcacatcatcaatacgatagagaacgtcacttttcaccatgaagggttcttctggaggtgttggtttaatgggattgtggaagagaatgactccaatatttggaagttctggtacaccaatcagccaccgtccaagaactgcacacatgcttacctgtctccgtaccccttcatgagaggcgagcacaactcgacctcctatgactctgcagttatttaccgtggtttctgggcagtcctgatgctcctgggggtagttgctgtagtcatcgcaagctttttgatcatctgtgcagcccccttcgccagccattttctctacaaagctgggggaggctcatatattgctgcaggcatcctattttcattggtggtgatgctgtatgtcatctgggtccaggcagtggctgacatggaaagctaccgaaacatgaaaatgaaggactgcctggatttcaccccttctgttctgtatggctggtcatttttcctggccccagctgggatatttttttctttgctagctggattactatttctggttgttggatggcatattcagatacatcactaaatcaactgttgccacaagtattttcttgagagattttaaaacaaggaatactttttttccattttgtttcattgatcccagcataaagttagtagatataactttttagttgctattcaaattaatcattttactaaaattttcttcagtaagaaggtcctagaatctctccagacaccagcaagcctctatcttgtctaagtgctgtcaaggacctagttctttagggaataggtaaacaggtctccctttcattgaacatgttagagttcatgcaggtcgcaaaggcctgataatagcttaataccatgacatggggaaaatctcgatagatttggcttaaagtctccttggcattcacttctgctaattaaaaaaaatccttgaagaataattaagaatgggcaaggttgtcagagaatttattttgtttcttgcccacacagataatatccacatacacattcactggctcttgtgagcaaatgaatttaaaaatagacagcagttgttctaattagtgggagccatgtactcaccagttaaaatgggccacaacaaacaagactgagagcatgtacttatcttgctttttcaccaacagtggtttggttacctagttttattcacttaattgtgcatgcttacataaactttaaactacatttaaaactagcaaatctgcataccaaattatgtataacgtagattgaatttttatgaacttaaagtgagttaattgtataatgtaatattgtttaaaatatgtaaaaaccaagcatttccgcttggtccataattctatttgatattttaaaattctcatttaaaaattatattgctatcattcagcatgtgaaaatttattgataaaatgtgattttaatattttttagatataaactttcaacgtacttccatatgaggattataatagccctgctttattaaagaccataaaatattaactttccccaagatgttatgggttccagttcttctgatcatttgattcctttaattactgtccctcaatttcttcatctttacaatagatatattaacatttacagatcgactatttcctttaacctcctagaagaaagtttttgtggggaaagatgattctgtattattcagtagcatagacattttgcatatcaaagatgttcatttggcactaatgttgattgaaatcaaatccatctgagatgcctagctcgtatttgcattctggaagcctccatcgcaggggagctcggcagggtatgtgagctttgttggaggtgcggtgtttcattctgcagctgttgtgaggacagagaggcatggcccacaggcaaaaaaagtcaccacccagaagatgctctgggatagaggaactgctccttttcatcagctcttccaatgccgtgggagaggtgatcccagtcttctctgtacatcttgtgcttttccattaagacttgttccagtgggaaggagctttggaaaaattgcaaaggtctgaatcttcagggcattttcatgacaggacttgccaataataataataataataataataataataataataaagctccagaggcctaactggtttctcaagtcatttcagtgatatcattgaaacgtttttgtggtacttccctttgtctttcactgtttcatttttatattgcttcatttacttctttgcttttggctttgttattagaaaaaataattatgaggtctgttgtgcatgttgactgtgatattaagttatggcatgccattaagttttccagacgatgttggatgtatctgattagttcatgtcatctgtaaatacaattcttttttgtagtactttggaatggagcctttttctggtgtactgtatgccatttaagtttcacatacaagctgctttcggcaaaggcttgaatatttataaatttcagatggttatcctcactttatagtacacttaagtggctaccatatattttttatatgacaattggctgaatagctgatgtgtatgacacttttacacagatttgcactttggaactattttatagttgtaatgcatcaatcaaatacatttcaagcacatttcttgatcaatttaccagcaaccctctgaaggaatgaaggagagttgtgattgctatgtcaatgagtgaaatatacttaaaaatggcagagttatatagtacattattgtagcaaccttatatctgatttgagatactgtgttgccaaatgtccatgttatgtttatttctctattggttgtatttattaatttttagaagcctttaaactgtgttagaatctttttgaaaaatgttgattttgcatcataaagtttcaatttatcaaggatatcttttcagttacacttttagaaagagtgaataaaaagggcagtgagttatgctcttggacttggtgaaa

SEQ ID NO: 193792 - DNA, 555 bp, Homo sapiens
  Payload ID: 18271
  Gene Name: transmembrane protein 182
  ENST ID: ENST00000454536
  CDS Start-End: 316-555
agagagagggggcgggtgctacctggcagctccgcgggtgcgtggccggtgctggctgggagttctggtctcaggcaaggtggggactgggcacatcatcaatacgagaagatctttaactcctccaaccatgaagaccttcagaagatgaaattcctgcccaggagagtggatgcccacagagacactggttgtttcatattctgcctactaaagacttatctgtattcaaggaatcatggaaaactagaagagtttcaagtgacaggcaaatgtccaattttctgaagaaaaaagacaccttttacctcctccatgatagagaacgtcacttttcaccatgaagggttcttctggaggtgttggtttaatgggattgtggaagagaatgactccaatatttggaagttctggtacaccaatcagccaccgtccaagaactgcacacatgcttacctgtctccgtaccccttcatgagaggcgagcacaactcgacctcctatgactctgcagttatttaccgtggtttctgggcagtcctgatgctcctgggg

SEQ ID NO: 193793 - DNA, 3593 bp, Homo sapiens
  Payload ID: 18271
  Gene Name: transmembrane protein 182
  Uniprot ID: Q6ZP80
  ENST ID: ENST00000412401
  CDS Start-End: 206-895
ggcgagcaaagggaatatgaatctgccggtggggcgtgagcgagaagccaccaaaacatgagctaggacagccttctcaagaagattctgccaactcaaaaatattattcttttttttttttttttgctgttgtttctgagaaactaggtgtcttaccattttaaaatttcatattttatttaaaaggaaaccagtgaattgaaaatgagactaaatatcgctatcttctttggagctctctttggtgctttgggggtgttactctttttggtggcttttggatcggattattggcttcttgcaactgaagtggggagatgttcaggtgaaaagaatatagagaacgtcacttttcaccatgaagggttcttctggaggtgttggtttaatgggattgtggaagagaatgactccaatatttggaagttctggtacaccaatcagccaccgtccaagaactgcacacatgcttacctgtctccgtaccccttcatgagaggcgagcacaactcgacctcctatgactctgcagttatttaccgtggtttctgggcagtcctgatgctcctgggggtagttgctgtagtcatcgcaagctttttgatcatctgtgcagcccccttcgccagccattttctctacaaagctgggggaggctcatatattgctgcaggcatcctattttcattggtggtgatgctgtatgtcatctgggtccaggcagtggctgacatggaaagctaccgaaacatgaaaatgaaggactgcctggatttcaccccttctgttctgtatggctggtcatttttcctggccccagctgggatatttttttctttgctagctggattactatttctggttgttggatggcatattcagatacatcactaaatcaactgttgccacaagtattttcttgagagattttaaaacaaggaatactttttttccattttgtttcattgatcccagcataaagttagtagatataactttttagttgctattcaaattaatcattttactaaaattttcttcagtaagaaggtcctagaatctctccagacaccagcaagcctctatcttgtctaagtgctgtcaaggacctagttctttagggaataggtaaacaggtctccctttcattgaacatgttagagttcatgcaggtcgcaaaggcctgataatagcttaataccatgacatggggaaaatctcgatagatttggcttaaagtctccttggcattcacttctgctaattaaaaaaaatccttgaagaataattaagaatgggcaaggttgtcagagaatttattttgtttcttgcccacacagataatatccacatacacattcactggctcttgtgagcaaatgaatttaaaaatagacagcagttgttctaattagtgggagccatgtactcaccagttaaaatgggccacaacaaacaagactgagagcatgtacttatcttgctttttcaccaacagtggtttggttacctagttttattcacttaattgtgcatgcttacataaactttaaactacatttaaaactagcaaatctgcataccaaattatgtataacgtagattgaatttttatgaacttaaagtgagttaattgtataatgtaatattgtttaaaatatgtaaaaaccaagcatttccgcttggtccataattctatttgatattttaaaattctcatttaaaaattatattgctatcattcagcatgtgaaaatttattgataaaatgtgattttaatattttttagatataaactttcaacgtacttccatatgaggattataatagccctgctttattaaagaccataaaatattaactttccccaagatgttatgggttccagttcttctgatcatttgattcctttaattactgtccctcaatttcttcatctttacaatagatatattaacatttacagatcgactatttcctttaacctcctagaagaaagtttttgtggggaaagatgattctgtattattcagtagcatagacattttgcatatcaaagatgttcatttggcactaatgttgattgaaatcaaatccatctgagatgcctagctcgtatttgcattctggaagcctccatcgcaggggagctcggcagggtatgtgagctttgttggaggtgcggtgtttcattctgcagctgttgtgaggacagagaggcatggcccacaggcaaaaaaagtcaccacccagaagatgctctgggatagaggaactgctccttttcatcagctcttccaatgccgtgggagaggtgatcccagtcttctctgtacatcttgtgcttttccattaagacttgttccagtgggaaggagctttggaaaaattgcaaaggtctgaatcttcagggcattttcatgacaggacttgccaataataataataataataataataataataataataaagctccagaggcctaactggtttctcaagtcatttcagtgatatcattgaaacgtttttgtggtacttccctttgtctttcactgtttcatttttatattgcttcatttacttctttgcttttggctttgttattagaaaaaataattatgaggtctgttgtgcatgttgactgtgatattaagttatggcatgccattaagttttccagacgatgttggatgtatctgattagttcatgtcatctgtaaatacaattcttttttgtagtactttggaatggagcctttttctggtgtactgtatgccatttaagtttcacatacaagctgctttcggcaaaggcttgaatatttataaatttcagatggttatcctcactttatagtacacttaagtggctaccatatattttttatatgacaattggctgaatagctgatgtgtatgacacttttacacagatttgcactttggaactattttatagttgtaatgcatcaatcaaatacatttcaagcacatttcttgatcaatttaccagcaaccctctgaaggaatgaaggagagttgtgattgctatgtcaatgagtgaaatatacttaaaaatggcagagttatatagtacattattgtagcaaccttatatctgatttgagatactgtgttgccaaatgtccatgttatgtttatttctctattggttgtatttattaatttttagaagcctttaaactgtgttagaatctttttgaaaaatgttgattttgcatcataaagtttcaatttatcaaggatatcttttcagttacacttttagaaagagtgaataaaaagggcagtgagttatgctcttggacttggtgaaagctatcatctctccatattgtatttgttcagctggtttaattcactcaggtggatgattgcacatacattggaattggctggagagactacacagagaagtttaatgatcgtgtacaatttgagggttgatggtagggctttctaaaaaaagtaatatcaagtgtgttgttagtattcatttagtcatttttattactaatctataaatatatttattaaatttgaagattaaatggaattataaaggaa

SEQ ID NO: 193794 - DNA, 3019 bp, Homo sapiens
  Payload ID: 18272
  Gene Name: transmembrane protein 183A
  Uniprot ID: Q8IXX5
  ENST ID: ENST00000367242
  CDS Start-End: 81-1211
agcggcctccggtgtgggatggccgcggagccgggcggagctggcttgcggctcccggggccggctctccggccggagacatggcccgggggcccggcccgctaggcaggcctcgccccgatacggtcgccatgcccaagagaggaaagcgactcaagttccgggcccacgacgcctgctccggccgagtgaccgtggcggattacgccaactcggatccggcggtcgtgaggtctggacgagtcaagaaagccgtagccaacgctgttcagcaggaagtaaaatctctttgtggcttggaagcctctcaggttcctgcagaggaagctctttctggggctggtgagccctgtgacatcatcgacagcagtgatgagatggatgcccaggaggaaagcatccatgagagaactgtctccagaaaaaagaaaagcaagagacacaaagaagaactggacggggctggaggagaagagtatcccatggatatttggctattgctggcctcctatatccgtcctgaggacattgtgaatttttccctgatttgtaagaatgcctggactgtcacttgcactgctgccttttggaccaggttgtaccgaaggcactacacgctggatgcttccctgcctttgcgtctgcgaccagagtcaatggagaagctgcgctgtctccgggcttgtgtgatccgatctctgtaccatatgtatgagccatttgctgctcgaatctccaagaatccagccattccagaaagcacccccagcacattaaagaattccaaatgcttacttttctggtgcagaaagattgttgggaacagacaggaaccaatgtgggaattcaacttcaagttcaaaaaacagtcccctaggttaaagagcaagtgtacaggaggattgcagcctcccgttcagtacgaagatgttcataccaatccagaccaggactgctgcctactgcaggtcaccaccctcaatttcatctttattccgattgtcatgggaatgatatttactctgtttactatcaatgtgagcacggacatgcggcatcatcgagtgagactggtgttccaagattcccctgtccatggtggtcggaaactgcgcagtgaacagggtgtgcaagtcatcctggacccagtgcacagcgttcggctctttgactggtggcatcctcagtacccattctccctgagagcgtagttactgcttcccatcccttgggggcagcctcgagtgtagtccattagtaatcagattccagtttggacagggtggctggattgtatatctcgttagtaatgtacatgctcttcaggttctagggctcctgttaggggagggagaaatgttgaatcaagagggaaaacaactactatgatttataaacatattttaatgtaaaaatttgcatttaaaaggagtggccctgttttctgtgttaaaaccccatttggtgctattgagtttgttctttattcttttatcccagtgaaaattgttgatcttgctgtagggaaaaattaaactctttgaatctccaaacaaggaagtttcagcattcccttatggatcagaggaaccttagaggcctgaaattgttgcttccagtttagctgcccctcaaattcaagtgaatattttcccttctccctttacccttctccagaaataaagcaggtgacagggttttcagaatcttaccatattgacttgtgtatcttttttaaaaaataatttgtgatatttattgcatacattttcttttggcagttttggattttaggtatttttttgcatgaggctgataatggtgatgatgactttatacccttggtactatactaggaactttacatagtatctctacttctcacagtcttgcaaagtaggtgatattattcccattttatagttgagaaaacggaattagtgactgtacctataacaccagtaaatgcagagccaagattctgacccaggtctttttgttgtaccataagtttaaaagatgagtctcatttttcttgtggtagatggtggtaaaaaggagtaggcagagtgtacatagataaaaaaaagtaaaagggtaagtaaaaaattgattgtggtatatgttattctaatcagccaaaaaagtttagaagattgatgaaatgatcttttaaatatgtatttctgaataaaatgtaaaaccaagaaagttatttcaggaaggatagtgaccctttccttgaactgttagaagggcatttattaggctaaaacgtcattaacaaaatgcattgcatgttgaaaccagcctcttgaaccataagcacttagcgactttgctctgccctgtactgtgctgcttctgctgtcatcctgtgtgcctacagaagcctggtcttccgtccatgcagaaatgcttatgtcctcctgttgtttagatgactcctattgttcaggtgtactctgagaagagaatcacgtttttctgttttgctaaggagaaaaccttgctgcttgtctctcctcccaccctccaccatccaaaattaaccagtgagctggatattacctggatattgccaggaggtgggcattaagacagtattctttaaaagtgaaaatcttgtgaggcaaactgctaaattcacatttttgtttttttttttttaccatcttccctaggaatattcctagaaagcatctgcttaattttgctgctaacagctaaccttatcccacgttgagggtggtattaaaactgttcacacagagtgagcctgggtcagtcaaaaacagaatttgggcatttgagtgataacagacaacctaaggacaatgagcactttgcagatctctacaattaaaagttgcctctttgaggcaggaggggagaagcacagtccctgccaggttgcctgaactaaagatgccatggagcaggagtgtcttggtgcattgttccccgcttaggagtacctttaaaaagggggtgaaataaatttggcttaataattgta

SEQ ID NO: 193795 - DNA, 6276 bp, Homo sapiens
  Payload ID: 18273
  Gene Name: transmembrane protein 184A
  Uniprot ID: Q6ZMB5
  ENST ID: ENST00000297477
  CDS Start-End: 318-1559
ataggcaggtgagggcgccaggcggccagcaggttcctgggagccagctgccacccagcaaacaaccgggaggatagggtgtcagccgtgggaggggacaggaggggacgggcctgcagcctggggcccaggtgggccactggggacgtgaggcactggccgccccgccccagcctggcacagcccttcagatcctggccttgccgcacccacagtggggcctccagttggggccacgtggccatgagaatgaccagctaggcttccctggaggccaggcctccctggactgggccaggtgcttcctgccagcaaagatgagtaatgtctcagggatcctggagacagccggcgtccccctggtgtcagcgaactggccgcagcccagccccccaccggctgtgccagctgggccgcagatggaccacatggggaacagctcccagggggccccctggctcttcctcacctccgcactggcccgaggcgtctcggggatcttcgtgtggactgccctggtgctcacctgccaccagatctatctgcacctgcgctcctacaccgtgccacaggagcaacgttacatcatccgcctgctcctcatcgtgcccatctacgccttcgactcctggctcagcctcctcctcctcggagaccaccagtactacgtctacttcgactctgtgcgggactgctacgaagcctttgtcatttacagcttcctgagcctgtgtttccagtacctgggaggcgagggcgccatcatggctgagattcgtggaaagcccatcaagtccagctgcttgtacggcacctgctgcctccggggcatgacctactccatcgggttcctgcgcttctgtaagcaggccactctgcagttctgcctggtgaagcccgtcatggccgtcaccaccatcatcctccaggcatttggcaaataccacgacggggacttcaatgtccgcagcggctacctctatgtgaccctcatctacaacgcctccgtcagcctcgccctctacgccctgttcctcttctacttcaccaccagggagctcctgcggcccttccagcccgtcctcaagttcctcaccatcaaagccgtcatcttcctgtcgttctggcaagggctgctgctggccatcctggagcggtgcggggtcatcccggaggtggagaccagcggcgggaacaagctgggggctggcacgctggccgccggctaccagaacttcatcatctgcgtggagatgctgttcgcctccgtggccctgcgttatgccttcccctgccaggtgtacgcagagaagaaggagaattcaccagcccccccggcacccatgcagagcatctccagcggcatcagggagacagtgagcccccaggacatcgtgcaggacgccatccacaacttctcccccgcctaccagcactacacgcagcaggccacgcacgaggcgcccaggcccggcacccaccccagcggcggctccggcgggagcaggaagagccggagcctggagaagcggatgctgatcccctcggaggacctgtaggggggcctgggctgccagtgctgtagggacccaggctgcccaggcctctggggaagaacagggtccccccacccaccaactcctgccaaaggtggggcctctcctgagagcccacctgtgaggccctcggagcccacttcccatcctccctccagccagggggtcagggcacctgatggccctggcaggcacccaggtgggcccgccaccgcaggagagggcacctgagccaatcggaagagcctggggaccccctgggatcacccagccatcagccccaggagccactgtggggcggagagtgagtgtggctgcggggccttggctgcacggaccccatgggagctgtgagtgggtcagactccctggttcaggagacagacagcggacggatcccaggctgggcagctggagggaggggcgccggggcgctgggcagccgggctctgacacagtcagcagctccgggcgccgcaggccggcggggtccacacaggctggccggggctgggcctccttggagcctgctacggccctcgtgggcacgtggagaagggcccacgtgtctccacacgccagccacaggggagccctggccaggcgcccagccaggggagcgtgtgcctgggatgggtcacagaaccagcgggcacctgtgaggctggccagcaccgtggggctgtgggaatcgctcttatttatatttaaacaccttggattttctaccgggtcttggcttctgttcccgcagggcatgagcctgaggagcaggacgcggtgggggtcacaggaggctgctgctcagagtctgcatgcgggaaaggggtcccacctgtctggggtgggcagcctcgtggtccagggcagtgcagggcagagcctgggctgtgcgatcacagccactgcctttctcctgggagcctccacttcctccaaaacgggccttgtgccagccccacccgcggcgagcggacaaggccacgaaggcagggccctgagtacctgggcgggggggacactcccagggggcacagagggggctcccacctgggcacctgcctcctgcccttctcttcttcctccacgtgccaggtggggccctgggtttgaggagcctcggacgcgtgccctgcccgcaggaagctggaggcgtgcaagtggcctcggaaatcgcggccgcaagaacagtagccgcccagggactaagggggcttctgggaggacacacggctggcccagggcgaggggtgtcactgcagggcgccccccaggcccagggcccgtcaggggacagtacggtgacccggcctgcaggtggcagtcagttctgtgtgtctggggcccgcagcacaggttgggtgggggctggggcaggggcagcagaagtgggcaaggcctggggggctcaggcactgggcgtggagagcagacaggaagctccagtgggcaccaccccgggaccgcggctcccacccgtgctgccccccacccatggccacggtcaccaggaacagcgggacctggggtctccgagggactcagcagggcgggcacagaccagtggagtccgggctagagagggccagctcccagcctcttgcttcctgggctgaggacatggggatccaaggccagtgggtctgcagggcccagcccggctgcctgataagataggctgagctcctccctgcacggctgcaaagacgcccacctgtcttattggatccccacaggaatagacccaccaggcggcccccgtgtctcactctgtcagcaggtccccagggacctgctgccgaggggcagtttctggaggctgggggcactggctgggctctaggcctgctctgcccttgccgtggggaaggccaccccgataggggtcaagttgctcaaatctgcgtttggagggtgtgtggccgagggctccctttctggagacccagacaccgcctgggctccgggcggcagaggctgaggtgtcaggggctgagcccctatgtcagcaacacctcaggcctgcactttaggacaggggagaagtcagtttccgccaaatgccccctcagaccagccgaggactgtgccaggaaactgacatgctcaacgctcaagccagctgggacagcgaccgagcccagagagacggagcaagttgcctgaggtcacagagcagggacttggacaccaggcagccggctccacagaggccctctctcctccctgcctcctgaccctcagacgcctccgccccacgggtgaggctgcttctgcttctttccaacacgactcgaaggaaagccctgagggccgagcccgctctgcgtggacggaaggcagcgtggggcggtccaggccggggctcaacctgcctcgagggggagcgtgggcgcatgtgagcgggagggacggagactagcgtggttccagtgtcgtcatcgctgctaaaaaaggggtttcccggtgacaggccccgacagaggagcaggccatgaggcaggcaggagccgcgtatctgggcccagcgcacccgccaagctctctagcctctcctggcctcagtatccttctctgggagatggtccagctgaaaatccccagcatccacaagaaacggtggaagccctgggggccctggcctggcccgggtgcaggctgcatggccgggcggggcggtgtctcctttcacagcttccccgtctgtccgcagcctccaggagccccacacagggctggggctctgtgcccccaactcacacccgtcggctcccccaggaggagcaggctgggcccagagccgcagggtgggctgcagggaggtctgacttagctggggaaagtgccatccctgccattgctagtgacaagctcgggctgctgtggccccagcacagattcaacactcactgcgctatgtgccagctgttgcacactcacctccacacccaactcacaggaagcaaggctgggaaggagggaactggccccaggccacacagatgctgcgagttgggattatgatcgggtgcagtggctcacacctgtaattccagcacttggggaggccaaggcgagtggattgcttgagcccaggagtctgagaccagcctgggcaacatggtgaaaccccatctctacaaaaaaaaaatacaaaaattagctgggcgtggtggtgcgtgccggcggtcccagctactcaggaggctgagatgggaggattgcttgagcctgggaggtcgaggctgcagtgaactgtgatcacgcccctgcactccagcttgggtgacaaagcaagatactgtctcaaaaaactcgagttgggatttcaccctgcgtggtccagcactgaacagcgttcacacctcggtcagctcagccccaaaaacggggaaggccgggcggggtggggacggcatgcgggcaggcccgtggcttttcggaggagtccacgggcttccggccactgtgcaggggcgctttgctctctgctcccagacagaccctgtcttgctcacagcttcctgcaggctcctctgagagtccagcaaagctgggcgagatgtctcccagggaaggggaacactgacagccgtgctgctctctgctccttccactggaagggagaggctgcatggacagggggctccgggtggggcagatggggacactcaggactgcggcctgaccctcagagactgagcccaggacgtggtcacctgaccagcacctcccccgtggctgtcccagcctcacggtcacggcccagcagtccgggaaagccacttacacgtagtgcccggatcctgaccccggtgagggacaggcagggtcccctgggattggggggggggtgtggttcttggcccaagaaagccccagctgaaagcaccagctacgcaacgaaagggtctgaaaccagaaaattctttattgcaaaggtacaaaagcagtcacagcagcaggacgcacggcaataaattaggtggtggccgcagggacggggcagggcggcggcggccagacacgggcccacatgtgatctgttttcaataatttatatcatgataaaaagcagcacaaaaaataaataatgaaatggaactgccaagtagcacagaagccagggtgaggcggtgtggcggcgtggcggcatagggggccggggtccccacgccctggaaacgcaaagacctggatctctttgggaagccggaggcacggagacagaaaacaaacccacgtgacaaagagtccctcgtctttttcttaaataaaaaaatccatatattaaatcatgacaatgaaatttcaacaatctgaaaagaaaagcagaacacaccgtgcttccccggcccagctctgggcggtgacagcggctccgtccaccctggggaccagggagtcccttctccagcaaagcactgcaggccaagggcaggtagaagcccacggcccacaagacgtggacaccaagaaccccaagacgggacagaaccggccacccgctgcggcctgtcctgcggggcccagctgcctggtacagtccgtggggagatgaagggggacggcgggcagcccgggcctccgctttgctcccaactcccacctgtgcccgtgcccccggctctgctctgatagatttacagtatcaaactggaaaagaaagattgttacgaaaaatctgtagataaactgtgaatataattttatatctcta

SEQ ID NO: 193796 - DNA, 866 bp, Homo sapiens
  Payload ID: 18273
  Gene Name: transmembrane protein 184A
  ENST ID: ENST00000319010
  CDS Start-End: 125-866
cctggccttgccgcacccacagtggggcctccagttggggccacgtggccatgagaatgaccagctaggcttccctggaggccaggcctccctggactgggccaggtgcttcctgccagcaaagatgagtaatgtctcagggatcctggagacagccggcgtccccctggtgtcagcgaactggccgcagcccagccccccaccggctgtgccagctgggccgcagatggaccacatggggaacagctcccagggggccccctggctcttcctcacctccgcactggcccgaggcgtctcggggatcttcgtgtggactgccctggtgctcacctgccaccagatctatctgcacctgcgctcctacaccgtgccacaggagcaacgttacatcatccgcctgctcctcatcgtgcccatctacgccttcgactcctggctcagcctcctcctcctcggagaccaccagtactacgtctacttcgactctgtgcgggactgctacgaagcctttgtcatttacagcttcctgagcctgtgtttccagtacctgggaggcgagggcgccatcatggctgagattcgtggaaagcccatcaagtccagctgcttgtacggcacctgctgcctccggggcatgacctactccatcgggttcctgcgcttctgtaagcaggccactctgcagttctgcctggtgaagcccgtcatggccgtcaccaccatcatcctccaggcatttggcaaataccacgacggggacttcaagacctcggtgcctgccaaggccgggggcctggacctcccctcacaggacacggctgggtgtccgcagcggctacctctatgtgaccctcatctacaac

SEQ ID NO: 193797 - DNA, 4374 bp, Homo sapiens
  Payload ID: 18273
  Gene Name: transmembrane protein 184A
  ENST ID: ENST00000319018
  CDS Start-End: 71-571
gaatgaccagctaggcttccctggaggccaggcctccctggactgggccaggtgcttcctgccagcaaagatgagtaatgtctcagggatcctggagacagccggcgtccccctggtgtcagcgaactggccgcagcccagccccccaccggctgtgccagctgggccgcagatggaccacatggggaacagctcccagggggccccctggctcttcctcacctccgcactggcccgaggcgtctcggggatcttcgtgtggactgccctggtgctcacctgccaccagatctatctgcacctgcgctcctacaccgtgccacaggagcaacgttacatcatccgcctgctcctcatcgtgcccatctacgccttcgactcctggctcagcctcctcctcctcggagaccaccagtactacgtctacttcgactctgtgcgggactgctacgaagcctttgtcatttacagcttcctgagcctgtgtttccagtacctgggaggcgagggcgccatcatggctgagattcgtggaaagcccatcaagccactctgcagttctgcctggtgaagcccgtcatggccgtcaccaccatcatcctccaggcatttggcaaataccacgacggggacttcaatgtccgcagcggctacctctatgtgaccctcatctacaacgcctccgtcagcctcgccctctacgccctgttcctcttctacttcaccaccagggagctcctgcggcccttccagcccgtcctcaagttcctcaccatcaaagccgtcatcttcctgtcgttctggcaagggctgctgctggccatcctggagcggtgcggggtcatcccggaggtggagaccagcggcgggaacaagctgggggctggcacgctggccgccggctaccagaacttcatcatctgcgtggagatgctgttcgcctccgtggccctgcgttatgccttcccctgccaggtgtacgcagagaagaaggagaattcaccagcccccccggcacccatgcagagcatctccagcggcatcagggagacagtgagcccccaggacatcgtgcaggacgccatccacaacttctcccccgcctaccagcactacacgcagcaggccacgcacgaggcgcccaggcccggcacccaccccagcggcggctccggcgggagcaggaagagccggagcctggagaagcggatgctgatcccctcggaggacctgtaggggggcctgggctgccagtgctgtagggacccaggctgcccaggcctctggggaagaacagggtccccccacccaccaactcctgccaaaggtggggcctctcctgagagcccacctgtgaggccctcggagcccacttcccatcctccctccagccagggggtcagggcacctgatggccctggcaggcacccaggtgggcccgccaccgcaggagagggcacctgagccaatcggaagagcctggggaccccctgggatcacccagccatcagccccaggagccactgtggggcggagagtgagtgtggctgcggggccttggctgcacggaccccatgggagctgtgagtgggtcagactccctggttcaggagacagacagcggacggatcccaggctgggcagctggagggaggggcgccggggcgctgggcagccgggctctgacacagtcagcagctccgggcgccgcaggccggcggggtccacacaggctggccggggctgggcctccttggagcctgctacggccctcgtgggcacgtggagaagggcccacgtgtctccacacgccagccacaggggagccctggccaggcgcccagccaggggagcgtgtgcctgggatgggtcacagaaccagcgggcacctgtgaggctggccagcaccgtggggctgtgggaatcgctcttatttatatttaaacaccttggattttctaccgggtcttggcttctgttcccgcagggcatgagcctgaggagcaggacgcggtgggggtcacaggaggctgctgctcagagtctgcatgcgggaaaggggtcccacctgtctggggtgggcagcctcgtggtccagggcagtgcagggcagagcctgggctgtgcgatcacagccactgcctttctcctgggagcctccacttcctccaaaacgggccttgtgccagccccacccgcggcgagcggacaaggccacgaaggcagggccctgagtacctgggcgggggggacactcccagggggcacagagggggctcccacctgggcacctgcctcctgcccttctcttcttcctccacgtgccaggtggggccctgggtttgaggagcctcggacgcgtgccctgcccgcaggaagctggaggcgtgcaagtggcctcggaaatcgcggccgcaagaacagtagccgcccagggactaagggggcttctgggaggacacacggctggcccagggcgaggggtgtcactgcagggcgccccccaggcccagggcccgtcaggggacagtacggtgacccggcctgcaggtggcagtcagttctgtgtgtctggggcccgcagcacaggttgggtgggggctggggcaggggcagcagaagtgggcaaggcctggggggctcaggcactgggcgtggagagcagacaggaagctccagtgggcaccaccccgggaccgcggctcccacccgtgctgccccccacccatggccacggtcaccaggaacagcgggacctggggtctccgagggactcagcagggcgggcacagaccagtggagtccgggctagagagggccagctcccagcctcttgcttcctgggctgaggacatggggatccaaggccagtgggtctgcagggcccagcccggctgcctgataagataggctgagctcctccctgcacggctgcaaagacgcccacctgtcttattggatccccacaggaatagacccaccaggcggcccccgtgtctcactctgtcagcaggtccccagggacctgctgccgaggggcagtttctggaggctgggggcactggctgggctctaggcctgctctgcccttgccgtggggaaggccaccccgataggggtcaagttgctcaaatctgcgtttggagggtgtgtggccgagggctccctttctggagacccagacaccgcctgggctccgggcggcagaggctgaggtgtcaggggctgagcccctatgtcagcaacacctcaggcctgcactttaggacaggggagaagtcagtttccgccaaatgccccctcagaccagccgaggactgtgccaggaaactgacatgctcaacgctcaagccagctgggacagcgaccgagcccagagagacggagcaagttgcctgaggtcacagagcagggacttggacaccaggcagccggctccacagaggccctctctcctccctgcctcctgaccctcagacgcctccgccccacgggtgaggctgcttctgcttctttccaacacgactcgaaggaaagccctgagggccgagcccgctctgcgtggacggaaggcagcgtggggcggtccaggccggggctcaacctgcctcgagggggagcgtgggcgcatgtgagcgggagggacggagactagcgtggttccagtgtcgtcatcgctgctaaaaaaggggtttcccggtgacaggccccgacagaggagcaggccatgaggcaggcaggagccgcgtatctgggcccagcgcacccgccaagctctctagcctctcctggcctcagtatccttctctgggagatggtccagctgaaaatccccagcatccacaagaaacggtggaagccctgggggccctggcctggcccgggtgcaggctgcatggccgggcggggcggtgtctcctttcacagcttccccgtctgtccgcagcctccaggagccccacacagggctggggctctgtgcccccaactcacacccgtcggctcccccaggaggagcaggctgggcccagagccgcagggtgggctgcagggaggtctgacttagctggggaaagtgccatccctgccattgctagtgacaagctcgggctgctgtggccccagcacagattcaacactcactgcgctatgtgccagctgttgcacactcacctccacacccaactcacaggaagcaaggctgggaaggagggaactggccccaggccacacagatgctgcgagttgggattatgatcgggtgcagtggctcacacctgtaattccagcacttggggaggccaaggcgagtggattgcttgagcccaggagtctgagaccagcctgggcaacatggtgaaaccccatctctac

SEQ ID NO: 193798 - DNA, 640 bp, Homo sapiens
  Payload ID: 18273
  Gene Name: transmembrane protein 184A
  ENST ID: ENST00000441933
  CDS Start-End: 165-640
agcaaaggtagagctgggccctgtgaccgcagaccagagggagaggaggaggctggactgggctgcgagtgtgggagagggtggactcagggccccagcaggttagtgggagatggaacaggcacccagggctgccaagaaccccagcaaagccgggctcccagatgagtaatgtctcagggatcctggagacagccggcgtccccctggtgtcagcgaactggccgcagcccagccccccaccggctgtgccagctgggccgcagatggaccacatggggaacagctcccagggggccccctggctcttcctcacctccgcactggcccgaggcgtctcggggatcttcgtgtggactgccctggtgctcacctgccaccagatctatctgcacctgcgctcctacaccgtgccacaggagcaacgttacatcatccgcctgctcctcatcgtgcccatctacgccttcgactcctggctcagcctcctcctcctcggagaccaccagtactacgtctacttcgactctgtgcgggactgctacgaagcctttgtcatttacagcttcctgagcctgtgtttccagtacctgggaggcgagggcgccatcatggctgagattcgtggaaagcccatcaa

SEQ ID NO: 193799 - DNA, 574 bp, Homo sapiens
  Payload ID: 18273
  Gene Name: transmembrane protein 184A
  ENST ID: ENST00000414730
  CDS Start-End: 48-574
acctttgccctcactcctcccggtgtgtgtcctccctccctctgcagatgagtaatgtctcagggatcctggagacagccggcgtccccctggtgtcagcgaactggccgcagcccagccccccaccggctgtgccagctgggccgcagatggaccacatggggaacagctcccagggggccccctggctcttcctcacctccgcactggcccgaggcgtctcggggatcttcgtgtggactgccctggtgctcacctgccaccagatctatctgcacctgcgctcctacaccgtgccacaggagcaacgttacatcatccgcctgctcctcatcgtgcccatctacgccttcgactcctggctcagcctcctcctcctcggagaccaccagtactacgtctacttcgactctgtgcgggactgctacgaagcctttgtcatttacagcttcctgagcctgtgtttccagtacctgggaggcgagggcgccatcatggctgagattcgtggaaagcccatcaagtccagctgcttgtacggcacctgctgcctccggggcatgacctactccat

SEQ ID NO: 193800 - DNA, 579 bp, Homo sapiens
  Payload ID: 18273
  Gene Name: transmembrane protein 184A
  ENST ID: ENST00000431208
  CDS Start-End: 161-579
aatcatctctcagggacccaggctgcccgccgctgtgaggaggcggcagcagaggccaggaggccgggggccgagcttcaggcccaccccgccttggcccccccctcaggcccagagacctgcagccaacctgcctgacaggctgagcgccaccagggagatgagtaatgtctcagggatcctggagacagccggcgtccccctggtgtcagcgaactggccgcagcccagccccccaccggctgtgccagctgggccgcagatggaccacatggggaacagctcccagggggccccctggctcttcctcacctccgcactggcccgaggcgtctcggggatcttcgtgtggactgccctggtgctcacctgccaccagatctatctgcacctgcgctcctacaccgtgccacaggagcaacgttacatcatccgcctgctcctcatcgtgcccatctacgccttcgactcctggctcagcctcctcctcctcggagaccaccagtactacgtctacttcgactctgtgcgggactgctacgaagcctttgtcatttacagcttcctgagcctgtgttt

SEQ ID NO: 193801 - DNA, 744 bp, Homo sapiens
  Payload ID: 18273
  Gene Name: transmembrane protein 184A
  ENST ID: ENST00000421923
  CDS Start-End: 161-553
aatcatctctcagggacccaggctgcccgccgctgtgaggaggcggcagcagaggccaggaggccgggggccgagcttcaggcccaccccgccttggcccccccctcaggcccagagacctgcagccaacctgcctgacaggctgagcgccaccagggagatgagtaatgtctcagggatcctggagacagccggcgtccccctggtgtcagcgaactggccgcagcccagccccccaccggctgtgccagctgggccgcagatggaccacatggggaacagctcccagggggccccctggctcttcctcacctccgcactggcccgaggcgtctcggggatcttcgtgtggactgccctggtgctcacctgccaccagatctatctgcacctgcgctcctacaccgtgccacaggagcaacgttacatcatccgcctgctcctcatcgtgcccatctacgccttcgactcctggctcagcctcctcctcctcggagaccaccagtactacgtctacttcgactctgtgcgggactgctacgaagcttcctgagcctgtgtttccagtacctgggaggcgagggcgccatcatggctgagattcgtggaaagcccatcaagtccagctgcttgtacggcacctgctgcctccggggcatgacctactccatcgggttcctgcgcttctgtaagcaggccactctgcagttctgcctggtgaagcccgtcatggccgtcaccacc

SEQ ID NO: 193802 - DNA, 3593 bp, Homo sapiens
  Payload ID: 18274
  Gene Name: transmembrane protein 184B
  Uniprot ID: Q9Y519
  ENST ID: ENST00000361684
  CDS Start-End: 225-1448
gggtgtgcccgctccctttccacgccaacgtggcgggggcagctcctggagtgtaatcggacctgtccggggggcggccccgggagagggaggcggatggaccaaggcgctttgcaagagggattgtgtgctcccgggtgggtgtgctggcgactggcacggccgagctagcttgtcactttctgcaaaggtttccctcagggagcctcctgctgccaggcaccatgacagtgaggggggatgtgctggccccggatccagcgtcgcccacgaccgcagcagcctcgcccagcgtctccgtgatccccgagggcagccccactgccatggagcagcctgtgttcctgatgacaactgccgctcaggccatctctggcttcttcgtgtggacggccctgctcatcacatgccaccagatctacatgcacctgcgctgctacagctgccccaacgagcagcgctacatcgtgcgcatcctcttcatcgtgcccatctacgcctttgactcctggctcagcctcctcttcttcaccaacgaccagtactacgtgtacttcggcaccgtccgcgactgctatgaggccttggtcatctataatttcctgagcctgtgctatgagtacctaggaggagaaagttccatcatgtcggagatcagaggaaaacccattgagtccagctgtatgtatggcacctgctgcctctggggaaagacttattccatcggatttctgaggttctgcaaacaggccaccctgcagttctgtgtggtgaagccactcatggcggtcagcactgtggtcctccaggccttcggcaagtaccgggatggggactttgacgtcaccagtggctacctctacgtgaccatcatctacaacatctccgtcagcctggccctctacgccctcttcctcttctacttcgccacccgggagctgctcagcccctacagccccgtcctcaagttcttcatggtcaagtccgtcatctttctttccttctggcaaggcatgctcctggccatcctggagaagtgtggggccatccccaaaatccactcggcccgcgtgtcggtgggcgagggcaccgtggctgccggctaccaggacttcatcatctgtgtggagatgttctttgcagccctggccctgcggcacgccttcacctacaaggtctatgctgacaagaggctggacgcacaaggccgctgtgcccccatgaagagcatctccagcagcctcaaggagaccatgaacccgcacgacatcgtgcaggacgccatccacaacttctcacctgcctaccagcagtacacgcagcagtccaccctggagcctgggcccacctggcgtggtggcgcccacggcctctcccgctcccacagcctcagtggcgcccgcgacaacgagaagactctcctgctcagctctgatgatgaattctaggtgcgggctgcagtggcggaagtgctggcgccatagccacggtcaggctgtgccccacctccagcctcaccaccaggccaggaggcagctggcacagtgctcacgccgcctttatttattggaccagaaacactcacatgtcacttccagaggaacgggggacagccaggctcgcccatgggccttcaggaatatttatacatggcccagcctgcactgcccgggcgagggcagaggacactgggagcaaggcttatgcccctgctgcccgtcctgtgctgggggcatgctgggaccagccgcacccaggccccaatgcttgtgtgtggaccagcggctgcagccttctagcccctcctccccgcgagactctcaggctgaggtcggcaagccgtggctcccccacacaccgtgcaataccctgtctgacctgggctcttcccgcctgcatccctcccctgtccacctttgtccagtgctagattcacctcaccccgggcaggagtggggatgtgggcgctctgtggtcctcccctcctgacccaggcctctgtggcatgctgcaaggatcagagccagacaccaggagtcacaggccccacccaggaagggcattcagggcccctgggcaccgcttctgttgaagcaggggcttctgggcccctgggtatccccacctgtcgtggccacacctctgcctgcctcatgccccttccccctggcctaccaaggacagcccacagcccgcactgccggctcacttgggtccttcctcgatagctttgggcagagcccttgcttcctggctgcttcagggctcaggggctcccagccctccttcccaggctgatgctgggtcctctctctctttggggcttctccctcccgtttcaggggaaaggtctgagtctccacgtttcagaccagcttctgggggaaggcagtccggcagggagaccgggaggggtggccacacagtggggagctgggaggtggggggaatggtcccagactcctctcggggcccctatccacacagggcctggtgttctaccccatctggcccctggcccatctcttctgtgccttagtcacatatgaaagcgcccctccctggctccccatctgtcccacacgctccctggggctcttagttcagctgctggcactcgcaggatcctgcagtgctgggcccagagcccttggacaggcctcaggagtggtcaggaccaccaagcccctcctctccccctccacacctctagacctggggcctccggaacccccagcaggctgggcttatactagctcctgacttaggaagagcctcgtgtcacaacacgtgtccctacaggcaaagtgtcctggcatttaaaacccagattatccctgggtttgggctgcagtcacctggagaagctggtagggtaagggagagggaccctgccggtgttcactggggattctttcttttggtccttcctggaatgaacaggttccctccctgccacctgtgaggagagttggggcccagccgtcttcctggcctccttcctttcctcgtggcagaggcctgcatgtgggtgccagaggccagctctccccctccatcttgggggggcggagcagttgggcccaagctgcccgggagggtgggtgcagacacaggctgaggaccagccctggccctgccccgccatctgctttcaccaagctgtctctccaccgtggcttcccttctccctccaggccaaagtgctgctgattcccactcccttggttttcgcctgcccagcgttgctgtttgcgtggagggtggggggagctcagtggcagggaatcagcggtccgtggggtcgtggggacgggaacatgtgcccgaccgctccatcccctcctcctccttaggatgcataacctaccttgtcttttttttttttaattttctttccaggtagagtagctctttgtacataaagaatacttgaaaaattaattgtatgatgtatgagaagacagagtctcctagttttgtatcttgttgtatgactgccatgagttccaccagaaagccactctattttggtctctgtgacattttaaatgcgtgacagaagtgagcaaataaagtgaggaagaaatcta

SEQ ID NO: 193803 - DNA, 3611 bp, Homo sapiens
  Payload ID: 18274
  Gene Name: transmembrane protein 184B
  Uniprot ID: Q9Y519
  ENST ID: ENST00000361906
  CDS Start-End: 210-1433
agagcgcatgcgcgccgcggctgcactccactgggcccgggacgcgccggcggcggcggagactccggggctgcggcgccgcccgccccgcccgcagagtccggctgccgcgcatcgtccgcagacgccgccaccgccatgggctcctgaggctagcttgtcactttctgcaaaggtttccctcagggagcctcctgctgccaggcaccatgacagtgaggggggatgtgctggccccggatccagcgtcgcccacgaccgcagcagcctcgcccagcgtctccgtgatccccgagggcagccccactgccatggagcagcctgtgttcctgatgacaactgccgctcaggccatctctggcttcttcgtgtggacggccctgctcatcacatgccaccagatctacatgcacctgcgctgctacagctgccccaacgagcagcgctacatcgtgcgcatcctcttcatcgtgcccatctacgcctttgactcctggctcagcctcctcttcttcaccaacgaccagtactacgtgtacttcggcaccgtccgcgactgctatgaggccttggtcatctataatttcctgagcctgtgctatgagtacctaggaggagaaagttccatcatgtcggagatcagaggaaaacccattgagtccagctgtatgtatggcacctgctgcctctggggaaagacttattccatcggatttctgaggttctgcaaacaggccaccctgcagttctgtgtggtgaagccactcatggcggtcagcactgtggtcctccaggccttcggcaagtaccgggatggggactttgacgtcaccagtggctacctctacgtgaccatcatctacaacatctccgtcagcctggccctctacgccctcttcctcttctacttcgccacccgggagctgctcagcccctacagccccgtcctcaagttcttcatggtcaagtccgtcatctttctttccttctggcaaggcatgctcctggccatcctggagaagtgtggggccatccccaaaatccactcggcccgcgtgtcggtgggcgagggcaccgtggctgccggctaccaggacttcatcatctgtgtggagatgttctttgcagccctggccctgcggcacgccttcacctacaaggtctatgctgacaagaggctggacgcacaaggccgctgtgcccccatgaagagcatctccagcagcctcaaggagaccatgaacccgcacgacatcgtgcaggacgccatccacaacttctcacctgcctaccagcagtacacgcagcagtccaccctggagcctgggcccacctggcgtggtggcgcccacggcctctcccgctcccacagcctcagtggcgcccgcgacaacgagaagactctcctgctcagctctgatgatgaattctaggtgcgggctgcagtggcggaagtgctggcgccatagccacggtcaggctgtgccccacctccagcctcaccaccaggccaggaggcagctggcacagtgctcacgccgcctttatttattggaccagaaacactcacatgtcacttccagaggaacgggggacagccaggctcgcccatgggccttcaggaatatttatacatggcccagcctgcactgcccgggcgagggcagaggacactgggagcaaggcttatgcccctgctgcccgtcctgtgctgggggcatgctgggaccagccgcacccaggccccaatgcttgtgtgtggaccagcggctgcagccttctagcccctcctccccgcgagactctcaggctgaggtcggcaagccgtggctcccccacacaccgtgcaataccctgtctgacctgggctcttcccgcctgcatccctcccctgtccacctttgtccagtgctagattcacctcaccccgggcaggagtggggatgtgggcgctctgtggtcctcccctcctgacccaggcctctgtggcatgctgcaaggatcagagccagacaccaggagtcacaggccccacccaggaagggcattcagggcccctgggcaccgcttctgttgaagcaggggcttctgggcccctgggtatccccacctgtcgtggccacacctctgcctgcctcatgccccttccccctggcctaccaaggacagcccacagcccgcactgccggctcacttgggtccttcctcgatagctttgggcagagcccttgcttcctggctgcttcagggctcaggggctcccagccctccttcccaggctgatgctgggtcctctctctctttggggcttctccctcccgtttcaggggaaaggtctgagtctccacgtttcagaccagcttctgggggaaggcagtccggcagggagaccgggaggggtggccacacagtggggagctgggaggtggggggaatggtcccagactcctctcggggcccctatccacacagggcctggtgttctaccccatctggcccctggcccatctcttctgtgccttagtcacatatgaaagcgcccctccctggctccccatctgtcccacacgctccctggggctcttagttcagctgctggcactcgcaggatcctgcagtgctgggcccagagcccttggacaggcctcaggagtggtcaggaccaccaagcccctcctctccccctccacacctctagacctggggcctccggaacccccagcaggctgggcttatactagctcctgacttaggaagagcctcgtgtcacaacacgtgtccctacaggcaaagtgtcctggcatttaaaacccagattatccctgggtttgggctgcagtcacctggagaagctggtagggtaagggagagggaccctgccggtgttcactggggattctttcttttggtccttcctggaatgaacaggttccctccctgccacctgtgaggagagttggggcccagccgtcttcctggcctccttcctttcctcgtggcagaggcctgcatgtgggtgccagaggccagctctccccctccatcttgggggggcggagcagttgggcccaagctgcccgggagggtgggtgcagacacaggctgaggaccagccctggccctgccccgccatctgctttcaccaagctgtctctccaccgtggcttcccttctccctccaggccaaagtgctgctgattcccactcccttggttttcgcctgcccagcgttgctgtttgcgtggagggtggggggagctcagtggcagggaatcagcggtccgtggggtcgtggggacgggaacatgtgcccgaccgctccatcccctcctcctccttaggatgcataacctaccttgtcttttttttttttaattttctttccaggtagagtagctctttgtacataaagaatacttgaaaaattaattgtatgatgtatgagaagacagagtctcctagttttgtatcttgttgtatgactgccatgagttccaccagaaagccactctattttggtctctgtgacattttaaatgcgtgacagaagtgagcaaataaagtgaggaagaaatctatatatgagataatatagattgtattgaaatctc

SEQ ID NO: 193804 - DNA, 555 bp, Homo sapiens
  Payload ID: 18274
  Gene Name: transmembrane protein 184B
  ENST ID: ENST00000411679
  CDS Start-End: 114-332
gagtccggctgccgcgcatcgtccgcagacgccgccaccgccatgggctcctgaggctagcttgtcactttctgcaaaggtttccctcagggagcctcctgctgccaggcaccatgacagtgaggggggatgtgctggccccggatccagcgtcgcccacgaccgcagcagcctcgcccagcgtctccgtgatccccgagggcagccccactgccatggagcagcctgtgttcctgatgacaactgccgctcaggccatctctggcttcttcgtgtggacggccctgctcatcacatgccaccagcccagggctcggctgggccaagtgtgatgtcatgagagctgggacgagacacccaggggctgcctggactgaggactgtgatctacatgcacctgcgctgctacagctgccccaacgagcagcgctacatcgtgcgcatcctcttcatcgtgcccatctacgcctttgactcctggctcagcctcctcttcttcaccaacgaccagtactacgtgtacttcggcaccgtccgcgactgctatgaggcctt

SEQ ID NO: 193805 - DNA, 555 bp, Homo sapiens
  Payload ID: 18274
  Gene Name: transmembrane protein 184B
  ENST ID: ENST00000457534
  CDS Start-End: 181-408
actgggcccgggacgcgccggcggcggcggagactccggggctgcggcgccgcccgccccgcccgcagagtccggctgccgcgcatcgtccgcagacgccgccaccgccatgggctcctgaggctagcttgtcactttctgcaaaggtttccctcagggagcctcctgctgccaggcaccatgacagtgaggggggatgtgctggccccggatccagcgtcgcccacgaccgcagcagcctcgcccagcgtctccgtgatccccgagggcagccccactgccatggagcagcctgtgttcctgatgacaactgccgctcaggccatctctggcttcttcgtgtggacggccctgctcatcacatgccaccagaatcccagcatctgcggacccattctgctgatttgactggtttctcctggacactctcttcgcagccttggtcatctataatttcctgagcctgtgctatgagtacctaggaggagaaagttccatcatgtcggagatcagaggaaaacccattgagtccagctgtatgtatggcacctgctg

SEQ ID NO: 193806 - DNA, 3667 bp, Homo sapiens
  Payload ID: 18274
  Gene Name: transmembrane protein 184B
  ENST ID: ENST00000436674
  CDS Start-End: 186-404
actccactgggcccgggacgcgccggcggcggcggagactccggggctgcggcgccgcccgccccgcccgcagagtccggctgccgcgcatcgtccgcagacgccgccaccgccatgggctcctgaggctagcttgtcactttctgcaaaggtttccctcagggagcctcctgctgccaggcaccatgacagtgaggggggatgtgctggccccggatccagcgtcgcccacgaccgcagcagcctcgcccagcgtctccgtgatccccgagggcagccccactgccatggagcagcctgtgttcctgatgacaactgccgctcaggccatctctggcttcttcgtgtggacggccctgctcatcacatgccaccagcccagggctcggctgggccaagtgtgatgtcatgagagctgggacgagacacccaggggctgcctggactgaggactgtggtagagcagctcttggcatttatctacatgcacctgcgctgctacagctgccccaacgagcagcgctacatcgtgcgcatcctcttcatcgtgcccatctacgcctttgactcctggctcagcctcctcttcttcaccaacgaccagtactacgtgtacttcggcaccgtccgcgactgctatgaggccttggtcatctataatttcctgagcctgtgctatgagtacctaggaggagaaagttccatcatgtcggagatcagaggaaaacccattgagtccagctgtatgtatggcacctgctgcctctggggaaagacttattccatcggatttctgaggttctgcaaacaggccaccctgcagttctgtgtggtgaagccactcatggcggtcagcactgtggtcctccaggccttcggcaagtaccgggatggggactttgacgtcaccagtggctacctctacgtgaccatcatctacaacatctccgtcagcctggccctctacgccctcttcctcttctacttcgccacccgggagctgctcagcccctacagccccgtcctcaagttcttcatggtcaagtccgtcatctttctttccttctggcaaggcatgctcctggccatcctggagaagtgtggggccatccccaaaatccactcggcccgcgtgtcggtgggcgagggcaccgtggctgccggctaccaggacttcatcatctgtgtggagatgttctttgcagccctggccctgcggcacgccttcacctacaaggtctatgctgacaagaggctggacgcacaaggccgctgtgcccccatgaagagcatctccagcagcctcaaggagaccatgaacccgcacgacatcgtgcaggacgccatccacaacttctcacctgcctaccagcagtacacgcagcagtccaccctggagcctgggcccacctggcgtggtggcgcccacggcctctcccgctcccacagcctcagtggcgcccgcgacaacgagaagactctcctgctcagctctgatgatgaattctaggtgcgggctgcagtggcggaagtgctggcgccatagccacggtcaggctgtgccccacctccagcctcaccaccaggccaggaggcagctggcacagtgctcacgccgcctttatttattggaccagaaacactcacatgtcacttccagaggaacgggggacagccaggctcgcccatgggccttcaggaatatttatacatggcccagcctgcactgcccgggcgagggcagaggacactgggagcaaggcttatgcccctgctgcccgtcctgtgctgggggcatgctgggaccagccgcacccaggccccaatgcttgtgtgtggaccagcggctgcagccttctagcccctcctccccgcgagactctcaggctgaggtcggcaagccgtggctcccccacacaccgtgcaataccctgtctgacctgggctcttcccgcctgcatccctcccctgtccacctttgtccagtgctagattcacctcaccccgggcaggagtggggatgtgggcgctctgtggtcctcccctcctgacccaggcctctgtggcatgctgcaaggatcagagccagacaccaggagtcacaggccccacccaggaagggcattcagggcccctgggcaccgcttctgttgaagcaggggcttctgggcccctgggtatccccacctgtcgtggccacacctctgcctgcctcatgccccttccccctggcctaccaaggacagcccacagcccgcactgccggctcacttgggtccttcctcgatagctttgggcagagcccttgcttcctggctgcttcagggctcaggggctcccagccctccttcccaggctgatgctgggtcctctctctctttggggcttctccctcccgtttcaggggaaaggtctgagtctccacgtttcagaccagcttctgggggaaggcagtccggcagggagaccgggaggggtggccacacagtggggagctgggaggtggggggaatggtcccagactcctctcggggcccctatccacacagggcctggtgttctaccccatctggcccctggcccatctcttctgtgccttagtcacatatgaaagcgcccctccctggctccccatctgtcccacacgctccctggggctcttagttcagctgctggcactcgcaggatcctgcagtgctgggcccagagcccttggacaggcctcaggagtggtcaggaccaccaagcccctcctctccccctccacacctctagacctggggcctccggaacccccagcaggctgggcttatactagctcctgacttaggaagagcctcgtgtcacaacacgtgtccctacaggcaaagtgtcctggcatttaaaacccagattatccctgggtttgggctgcagtcacctggagaagctggtagggtaagggagagggaccctgccggtgttcactggggattctttcttttggtccttcctggaatgaacaggttccctccctgccacctgtgaggagagttggggcccagccgtcttcctggcctccttcctttcctcgtggcagaggcctgcatgtgggtgccagaggccagctctccccctccatcttgggggggcggagcagttgggcccaagctgcccgggagggtgggtgcagacacaggctgaggaccagccctggccctgccccgccatctgctttcaccaagctgtctctccaccgtggcttcccttctccctccaggccaaagtgctgctgattcccactcccttggttttcgcctgcccagcgttgctgtttgcgtggagggtggggggagctcagtggcagggaatcagcggtccgtggggtcgtggggacgggaacatgtgcccgaccgctccatcccctcctcctccttaggatgcataacctaccttgtcttttttttttttaattttctttccaggtagagtagctctttgtacataaagaatacttgaaaaattaattgtatgatgtatgagaagacagagtctcctagttttgtatcttgttgtatgactgccatgagttccaccagaaagccactctattttggtctctgtgacattttaaatgcgtgacagaagtgagcaaataaagtgaggaagaaatctatatatgagataa

SEQ ID NO: 193807 - DNA, 1369 bp, Homo sapiens
  Payload ID: 18274
  Gene Name: transmembrane protein 184B
  ENST ID: ENST00000633438
  CDS Start-End: 1-1045
gcacctgcgctgctacagctgccccaacgagcagcgctacatcgtgcgcatcctcttcatcgtgcccatctacgcctttgactcctggctcagcctcctcttcttcaccaacgaccagtactacgtgtacttcggcaccgtccgcgactgctatgaggccttggtcatctataatttcctgagcctgtgctatgagtacctaggaggagaaagttccatcatgtcggagatcagaggaaaacccattgagtccagctgtatgtatggcacctgctgcctctggggaaagacttattccatcggatttctgaggttctgcaaacaggccaccctgcagttctgtgtggtgaagccactcatggcggtcagcactgtggtcctccaggccttcggcaagtaccgggatggggactttgacgtcaccagtggctacctctacgtgaccatcatctacaacatctccgtcagcctggccctctacgccctcttcctcttctacttcgccacccgggagctgctcagcccctacagccccgtcctcaagttcttcatggtcaagtccgtcatctttctttccttctggcaaggcatgctcctggccatcctggagaagtgtggggccatccccaaaatccactcggcccgcgtgtcggtgggcgagggcaccgtggctgccggctaccaggacttcatcatctgtgtggagatgttctttgcagccctggccctgcggcacgccttcacctacaaggtctatgctgacaagaggctggacgcacaagtgccaacatacggcccttacggccgctgtgcccccatgaagagcatctccagcagcctcaaggagaccatgaacccgcacgacatcgtgcaggacgccatccacaacttctcacctgcctaccagcagtacacgcagcagtccaccctggagcctgggcccacctggcgtggtggcgcccacggcctctcccgctcccacagcctcagtggcgcccgcgacaacgagaagactctcctgctcagctctgatgatgaattctaggtgcgggctgcagtggcggaagtgctggcgccatagccacggtcaggctgtgccccacctccagcctcaccaccaggccaggaggcagctggcacagtgctcacgccgcctttatttattggaccagaaacactcacatgtcacttccagaggaacgggggacagccaggctcgcccatgggccttcaggaatatttatacatggcccagcctgcactgcccgggcgagggcagaggacactgggagcaaggcttatgcccctgctgcccgtcctgtgctgggggcatgctgggaccagccgcacccaggccccaatgcttgtg

SEQ ID NO: 193808 - DNA, 4178 bp, Homo sapiens
  Payload ID: 18275
  Gene Name: transmembrane protein 184C
  Uniprot ID: Q9NVA4
  ENST ID: ENST00000296582
  CDS Start-End: 575-1891
gagctgaaagtcttggtttggccttgggttccgctgtaggggaggtcccgtgcgaaagaatgaggagatcctggggccttacctactagcggaatcgactgaagagacgcctgccagtgcgggaggtaggaagctcgatccccaaagaaaagagcgagtgggcaggcagctgcgagacagaaccggagtgtgcagggtccctagaggccggttcctggtctgtgctgctctcctggaagccatggtacaggcagagctcagggcgatccccaggtgagggcagcggctctgcctgggattccaccgcagtacaaccgggtagatgcggggtggagaagaaaggatgttgcctgcactgctcgccaatagcaccctgagaggctacatttgcagaagcagcagcagcagaagacacagcgccggtccaggaggcggctcgagctgttcgtaaagtcgcccgacagctttttctccgtagtatgcgagttgacaaaacagccagagaacagggctccccattacaatcttttcgagatcttttcccttgctaaccggatctgatttgtgcgaaaacatgccttgcacttgtacctggaggaactggagacagtggattcgacctttagtagcggtcatctacctggtgtcaatagtggttgcggttcccctatgcgtgtgggaattacagaaactggaggttggaatacacaccaaggcttggtttattgctggaatctttttgctgttgactattcctatatcactgtgggtgatattgcaacacttagtgcattatacacaacctgaactacaaaaaccaataataaggattctttggatggtacctatttacagtttagatagttggatagctttgaaatatcccggaattgcaatatatgtggatacctgcagagaatgctatgaagcttatgtaatttacaactttatgggattccttaccaattatctaactaaccggtatccaaatctggtattaatccttgaagccaaagatcaacagaaacatttccctcctttatgttgctgtccaccatgggctatgggagaagtattgctgtttaggtgcaaactaggtgtattacagtacacagttgtcagacctttcaccaccatcgttgctttaatctgtgagctgcttggtatatatgacgaagggaactttagcttttcaaatgcttggacttatttggttataataaacaacatgtcacagttgtttgccatgtattgtctcctgctcttttataaagtactaaaagaagaactgagcccaatccaacctgttggcaaatttctttgtgtaaagctggtggtttttgtttctttttggcaagcagtagttattgctttgttggtaaaagttggcgttatttctgaaaagcatacgtgggaatggcaaactgtagaagctgtggccaccggactccaggattttattatctgtattgagatgttcctcgctgccattgctcatcattacacattctcatataaaccatatgtccaagaagcagaagagggctcatgctttgattcctttcttgccatgtgggatgtctcagatattagagatgatatttctgaacaagtaaggcatgttggacggacagtcaggggacatcccaggaaaaaattgtttcccgaggatcaagatcaaaatgaacatacaagtttattatcatcatcatcacaagatgcaatttccattgcttcttctatgccaccttcacccatgggtcactaccaagggtttggacacactgtgactccccagactacacctaccacagctaagatatctgatgaaatccttagtgatactataggagagaaaaaagaaccttcagataaatccgtggattcctgaacagtatggaaaagcaaactgtgcaactactacattatatcattacctggtatcccatggattttgtgcttgggacagaccataaatgatggaaaatgtcaacacaaaaatagctgaaagccaggtacaactactgcatttatatatgtaagttttgtatatcaaaaataattggtctaaatttcctagacttagacttgatttcttaacattagggtatcgcatactcaaatggtagacaatgaccccaactaaatcttcctgatgttacactgctttatcaagaggatggacttttttttttttgagacagacagagtcttgctctgtcacccaggctggagtgcagtggcgcaatctcgggtcactgcaagctctgcctcccaagttcatgccattctcctgcctcagcctcccaagtagctgggactacaggcacctgccaccatgcccagctaattttttttttttcagtagagacagggtctcaccatgttagccaggatggtcttgatctgacctcgtgatccgccgacctcggcctcccaaagtgctggaattacaggcgtgagccactgcgcctggccaagaatggacattttttaaaaaaacatcagtacttcctaccactgctgcatgagtataatgctccggaattatcagaaagcataatgcagaaatacgaattagtggaacttaatcatgtgccatataagcttacctaacaaacagttatatccctattcctcaactgaatgtctttcaataaataagaatttatcatttattttctgcaacttttttatgtctcattctttaaacattaaaaacccttaatattttaacaaaaatttcttgattagaggcacagtgaaaaagaagtcaaaaaaaaaagttctacttttcatcagtgctattaaaggtggcagcaaatgtaaatcttggctgaatggtcttaattactcattaaaccacagtcagaaagacatataggtgctatttgggaaaactttttattacctaggatggggtttctctaattgctaatcacaaccccactgggtcatgtttgacattttataatgaaaataaaacagaaagtgccatagtatgttacagaaagcaaagatgagtattgtttctcaaagcctttgctttatgtatttatacacatactcattcatatctatctatatatatagagagagatagtggttcacagtaatcatacaaagtctttattccatccactattataaacatttctattaaaactaaaactgggctctatgtaaaaaccccaaagatacacacacaaaaaaaatctgtttgttagaactcaagtgaattcagtaaagttgcagaatacaaaatcaacatacaaaaagcattagcatttttatacataaataatgaaaataatgacctaactgaaaaattaagatgccatttatgatagcataaaaaaaatacttacttaggaataaatttaacaccaaggcagtaaaagatctgtatgtacactgaaaactatgaaacactgatgaaagaaagacacaaataaatggaaaggtatcccgtgctcatggatcagaataatactgttaaaatggtcacactacccaaagcaattcagaatcaatgcaatcctatcaaaattccaatggcattatttacacaaacagaaaaaaatcctaaaattcatatgtaacgataaaagaccctgaataggcaaaagaatactgaggaaaaaatgttggagacatcacatttcctaattataaattatactacaaaactatagtaatcaagacagtatggtactggtataaaaacacatacacaggccagtgggacagaagaaagagtccagatataaatccaaacatacacagtcaactaatttttgacaaagacaccaagaagacacatcggggaaagaacagtcttcattaagtgttcttaatgaagatgctgggaaaactgcacttccacatgcaaaacaatgaaatcagacccttatcttagacctacacaacaatcaattcaaaatggataaaagacctaaatgtaagaccagaaactatagaagagaacataggagaaaagttcctggacactgacccttggcaatgattttttggatatcacaccaaaagctcagtcaacaaaaacaaaaacaaatgtgactacatcaaaccaaaaagcttctgacagtaaaagaaacagtcaacaaaatgaaacagtagcctacagattgagtaaaaaatatttgtaaggcatatat

SEQ ID NO: 193809 - DNA, 774 bp, Homo sapiens
  Payload ID: 18275
  Gene Name: transmembrane protein 184C
  ENST ID: ENST00000505999
  CDS Start-End: 1-219
cttggtatatatgacgaagggaactttagcttttcaaatgcttggacttatttggttataataaacaacatgtcacagttgtttgccatgtattgtctcctgctcttttataaagtactaaaagaagaactgagcccaatccaacctgttggcaaatttctttgtgtaaagctggtggtttttgtttctttttgcatacgtgggaatggcaaactgtagaagctgtggccaccggactccaggattttattatctgtattgagatgttcctcgctgccattgctcatcattacacattctcatataaaccatatgtccaagaagcagaagagggctcatgctttgattcctttcttgccatgtgggatgtctcagatattagagatgatatttctgaacaagtaaggcatgttggacggacagtcaggggacatcccaggaaaaaattgtttcccgaggatcaagatcaaaatgaacatacaagtttattatcatcatcatcacaagatgcaatttccattgcttcttctatgccaccttcacccatgggtcactaccaagggtttggacacactgtgactccccagactacacctaccacagctaagatatctgatgaaatccttagtgatactataggagagaaaaaagaaccttcagataaatccgtggattcctgaacagtatggaaaagcaaactgtgcaactactacattatatcattacctggtatcccatggattttgtgcttgggacagaccataaatgatggaa

SEQ ID NO: 193810 - DNA, 1528 bp, Homo sapiens
  Payload ID: 18275
  Gene Name: transmembrane protein 184C
  ENST ID: ENST00000508208
  CDS Start-End: 572-1357
ctgaaagtcttggtttggccttgggttccgctgtaggggaggtcccgtgcgaaagaatgaggagatcctggggccttacctactagcggaatcgactgaagagacgcctgccagtgcgggaggtaggaagctcgatccccaaagaaaagagcgagtgggcaggcagctgcgagacagaaccggagtgtgcagggtccctagaggccggttcctggtctgtgctgctctcctggaagccatggtacaggcagagctcagggcgatccccaggtgagggcagcggctctgcctgggattccaccgcagtacaaccgggtagatgcggggtggagaagaaaggatgttgcctgcactgctcgccaatagcaccctgagaggctacatttgcagaagcagcagcagcagaagacacagcgccggtccaggaggcggctcgagctgttcgtaaagtcgcccgacagctttttctccgtagtatgcgagttgacaaaacagccagagaacagggctccccattacaatcttttcgagatcttttcccttgctaaccggatctgatttgtgcgaaaacatgccttgcacttgtacctggaggaactggagacagtggattcgacctttagtagcggtcatctacctggtgtcaatagtggttgcggttcccctatgcgtgtgggaattacagaaactggaggttggaatacacaccaaggcttggtttattgctggaatctttttgctgttgactattcctatatcactgtgggtgatattgcaacacttagtgcattatacacaacctgaactacaaaaaccaataataaggattctttggatggtacctatttacagtttagatagttggatagctttgaaatatcccggaattgcaatatatgtggatacctgcagagaatgctatgaagcttatgtaatttacaactttatgggattccttaccaattatctaactaaccggtatccaaatctggtattaatccttgaagccaaagatcaacagaaacatttccctcctttatgttgctgtccaccatgggctatgggagaagtattgctgtttaggtgcaaactaggtgtattacagtacacagttgtcagacctttcaccaccatcgttgctttaatctgtgagctgcttggtatatatgacgaagggaactttagcttttcaaatgcttggacttatttggttataataaacaacatgtcacagttgtttgccatgtattgtctcctgctcttttataaagtactaaaagaagaactgagcccaatccaacctgttggcaaatttctttgtgtaaagctggtggtttttgtttctttttggccttaaccccgaaactgactatactggagaaggaaaggccgtgtaaagacacaacaagaaagcagaatctgcaatccaggaagagaatcctcacaagaaaccaaacttgccaacaccttgatcatggtcttccagcctccagaactgtgagaaaataaatgcctattgttaaagcta

SEQ ID NO: 193811 - DNA, 903 bp, Homo sapiens
  Payload ID: 18276
  Gene Name: transmembrane protein 185A
  ENST ID: ENST00000507237
  CDS Start-End: 119-640
cgggagcagcagcgtggacgcggctggcgctggcgccatgaacccgctgtaaggcgcaggctgtgcagcacggggtgcgggggaggaggaggaggacgccgcggtgaagttctccgccatgaacctgaggggcctcttccaggacttcaacccgagtaaattcctcatctatgcctgtctgctgctgttctctgtgctgctggcccttcgtttggatggcatcatacagtggagttactgggctgtctttgctccaatatggctgtggaagttaatggtcattgttggagcctcagttggaactggagtctgggcacgaaatcctcaatatcgagcagaaggagaaacgtgtgtggagtttaaagccatgttgattgcagtgggcatccacttgctcttgttgatgtttgaagttctggtctgtgacagaatcgagagaggaagccatttctggctcctggtcttcatgccgctgttctttgtttccccggtgtctgttgcagcttgcgtttggggctttcgacatgacaggtcactagagttagaaatcctgtgttctgtcaacattctccagtttatattcattgccttaagactggacaagatcatccactggccctggcttgtatgtaacttttaaaatccttaaataaagttcttttttattataaaagtaattcatattcactgtacaaagcttggaaaagacggacaagcagaagtaatagcctaatagtcacccataatcccaccatggggagataacatggttagtgtttttatgtctgtgttttatacaaacagtttggatataactgtgtgcaccattttgtatcctgatttttttgttttaatgttgtatcataaacattttatcatgttaataaaaggtctttataaaca

SEQ ID NO: 193812 - DNA, 717 bp, Homo sapiens
  Payload ID: 18276
  Gene Name: transmembrane protein 185A
  ENST ID: ENST00000502858
  CDS Start-End: 1-671
tggtctgtgacagaatcgagagaggaagccatttctggctcctggtcttcatgccgctgttctttgtttccccggtgtctgttgcagcttgcgtttggggctttcgacatgacaggtcactagaggttgtgtgtgtcccgctgtggattctcatgtcctttctgtgcctggtggtcctctactacattgtgtggtccgtcttgttcttgcgctctatggatgtgattgcggagcagcgcaggacacacataaccatggccctgagctggatgaccatcgtcgtgccccttcttacatttgagattctgctggttcacaaactggatggccacaacgccttctcctgcatcccgatctttgtccccctttggctctcgttgatcacgctgatggcaaccacatttggacagaagggaggaaaccactggtggtttggtatccgcaaagatttctgtcagtttctgcttgaaatcttcccatttctacgagaatatggaaacatttcctatgatctccatcacgaagataatgaagaaaccgaagagaccccagttccggagccccctaaaatcgcacccatgtttcgaaagaaggccagggtggtcattacccagagccctgggaagtatgtgctcccacctcccaaattaaatatcgaaatgccagattagatgccacttccggggacagagcttaagtggactgggacgcactctc

SEQ ID NO: 193813 - DNA, 283 bp, Homo sapiens
  Payload ID: 18276
  Gene Name: transmembrane protein 185A
  ENST ID: ENST00000511776
  CDS Start-End: 103-283
gacgcggctggcgctggcgccatgaacccgctgtaaggcgcaggctgtgcagcacggggtgcgggggaggaggaggaggacgccgcggtgaagttctccgccatgaacctgaggggcctcttccaggacttcaacccgagagcagaaggagaaacgtgtgtggagtttaaagccatgttgattgcagtgggcatccacttgctcttgttgatgtttgaagttctggtctgtgacagaatcgagagaggaagccatttctggctcctggtcttcatgccgctgt

SEQ ID NO: 193814 - DNA, 684 bp, Homo sapiens
  Payload ID: 18276
  Gene Name: transmembrane protein 185A
  ENST ID: ENST00000502900
  CDS Start-End: 141-380
gcagcggggacggcagcagtagcgggagcagcagcgtggacgcggctggcgctggcgccatgaacccgctgtaaggcgcaggctgtgcagcacggggtgcgggggaggaggaggaggacgccgcggtgaagttctccgccatgaacctgaggggcctcttccaggacttcaacccgagtaaattcctcatctatgcctgtctgctgctgttctctgtgctgctggcccttcgtttggatggcatcatacagtggagttactgggctgtctttgctccaatatggctgtggaagttaatggtcattgttggagcctcagttggaactggagtctgggcacgaaatcctcaatatcgaaggagaaacgtgtgtggagtttaaagccatgttgattgcagtgggcatccacttgctcttgttgatgtttgaagttctggtctgtgacagaatcgagagaggaagccatttctggctcctggtcttcatgccgctgttctttgtttccccggtgtctgttgcagcttgcgtttggggctttcgacatgacaggtcactagaggcattcctgcccttggaagaaacaacataccaggagctgagctccctcctcctgtgatgcaagaacagtacctatgttggtgcctttaggagagccgagtggcctatgcacagctgggtctgctat

SEQ ID NO: 193815 - DNA, 436 bp, Homo sapiens
  Payload ID: 18276
  Gene Name: transmembrane protein 185A
  ENST ID: ENST00000502618
  CDS Start-End: 1-181
taaattcctcatctatgcctgtctgctgctgttctctgtgctgctggcccttcgtttggatggcatcatacagtggagttactgggctgtctttgctccaatatggctgtggaagttaatggtcattgttggagcctcagttggaactggagtctgggcacgaaatcctcaatatcgttagaaatcctgtgttctgtcaacattctccagtttatattcattgccttaagactggacaagatcatccactggccctggcttgttgtgtgtgtcccgctgtggattctcatgtcctttctgtgcctggtggtcctctactacattgtgtggtccgtcttgttcttgcgctctatggatgtgattgcggagcagcgcaggacacacataaccatggccctgagctggatgaccatcgtcgtgccccttcttacatttg

SEQ ID NO: 193816 - DNA, 2840 bp, Homo sapiens
  Payload ID: 18276
  Gene Name: transmembrane protein 185A
  Uniprot ID: Q8NFB2
  ENST ID: ENST00000600449
  CDS Start-End: 333-1385
ccggtcgcgtgcggacacaaggatggggacctcccagcgaggagcgctctgggcggggctccggacgcatgcgcggccctcgtacggaagcccggaaggaggggcagggggcggtggctcaggtttctccgggcggcggcggcggcggcggcggcggcggcggcggcggcggcggcgacggcgacggcgacggcagcggggacggcagcagtagcgggagcagcagcgtggacgcggctggcgctggcgccatgaacccgctgtaaggcgcaggctgtgcagcacggggtgcgggggaggaggaggaggacgccgcggtgaagttctccgccatgaacctgaggggcctcttccaggacttcaacccgagtaaattcctcatctatgcctgtctgctgctgttctctgtgctgctggcccttcgtttggatggcatcatacagtggagttactgggctgtctttgctccaatatggctgtggaagttaatggtcattgttggagcctcagttggaactggagtctgggcacgaaatcctcaatatcgagcagaaggagaaacgtgtgtggagtttaaagccatgttgattgcagtgggcatccacttgctcttgttgatgtttgaagttctggtctgtgacagaatcgagagaggaagccatttctggctcctggtcttcatgccgctgttctttgtttccccggtgtctgttgcagcttgcgtttggggctttcgacatgacaggtcactagagttagaaatcctgtgttctgtcaacattctccagtttatattcattgccttaagactggacaagatcatccactggccctggcttgttgtgtgtgtcccgctgtggattctcatgtcctttctgtgcctggtggtcctctactacattgtgtggtccgtcttgttcttgcgctctatggatgtgattgcggagcagcgcaggacacacataaccatggccctgagctggatgaccatcgtcgtgccccttcttacatttgagattctgctggttcacaaactggatggccacaacgccttctcctgcatcccgatctttgtccccctttggctctcgttgatcacgctgatggcaaccacatttggacagaagggaggaaaccactggtggtttggtatccgcaaagatttctgtcagtttctgcttgaaatcttcccatttctacgagaatatggaaacatttcctatgatctccatcacgaagataatgaagaaaccgaagagaccccagttccggagccccctaaaatcgcacccatgtttcgaaagaaggccagggtggtcattacccagagccctgggaagtatgtgctcccacctcccaaattaaatatcgaaatgccagattagatgccacttccggggacagagcttaagtggactgggacgcactctctccgccttcctctgccccctcgttcaccccgcagaccagaaccagtactggagctgggtctccaggtacgtccatctcatgccttgtttgcatccagcgcctatcagccactcaccacgacgggacgcggaagtggcaggtgacgggggtgtgtgccagcagatgcggatgccaggaagagtgtgagaacaggggtgggattaccgtctgtctgggaggggctccaggtacccctcttccccgtcagacccactgggagatggctgcttgccaggcccccagaaggaacatctgtctatacggtgctgaaatcccaatcaaaagtattgtttagaaatgtatttctccacagggctgacctcctgcagctcgctgagcactcccaggtcctcagcactcccaggtcgtggctggggcagtcagtaggaactgtaactatgtctctgatgcaccacgtgtttagacacagcacagtccttttttctgttcctactgtggaagtagtttctctttgggcatgctgacagcagtttttcatagcctcacggatgagccctttctacgggagtgactccatgcttgtatacagagtatttatacaaatgttttagcatcttcatatgcggtgttaacccctagttctgtacagcatattctgttcaagtatttttttacaagcttgtgctgtaggcacatgccttctgctgcagaagtggacgcccgtggcacactccccccccccccgtggggtgccacgccttcatgggacattgccacttctgccctggaactcgtgcaggtacgtagtagctgctactgccacaacggcaacaccaagcaagagatggtccatgcttttctgacgttctcagaatagtggctagcttcaaacctgacaagcgctgcttgaagccggaacactagagaatgttgctgagagcagaaacggccacgcgggtcacgactatgcgtgggaaagtctcaagcttccctcctgccagcaacaagaaggctttggagtaggcatgatgttttcacgtgtgcgtgccgtttctccaagcactgcaggttccaccgtgtgtcagaggctgcaagtttaacatcctcctgcctgaaaacaaataggtcctttgctgaaaagagggtaaaaaaagagctttgatcttctcagccaggagaagagggtggtgttttcacgcgggcaactgctcgccggcctacatggggttaattcaagtctgctgcgagcacgactccgcccttggcactggcctccagcaagccctgttctctttggggtacaggggaacgggatggtttagactttcctgctcagtgtgtaaaaaatgtagctaaagccactatttttgctctccttaagctgttcaataaaccggttcctcatttta

SEQ ID NO: 193817 - DNA, 1913 bp, Homo sapiens
  Payload ID: 18276
  Gene Name: transmembrane protein 185A
  ENST ID: ENST00000613273
  CDS Start-End: 19-537
gtcccgctgtggattctcatgtcctttctgtgcctggtggtcctctactacattgtgtggtccgtcttgttcttgcgctctatggatgtgattgcggagcagcgcaggacacacataaccatggccctgagctggatgaccatcgtcgtgccccttcttacatttgagattctgctggttcacaaactggatggccacaacgccttctcctgcatcccgatctttgtccccctttggctctcgttgatcacgctgatggcaaccacatttggacagaagggaggaaaccactggtggtttggtatccgcaaagatttctgtcagtttctgcttgaaatcttcccatttctacgagaatatggaaacatttcctatgatctccatcacgaagataatgaagaaaccgaagagaccccagttccggagccccctaaaatcgcacccatgtttcgaaagaaggccagggtggtcattacccagagccctgggaagtatgtgctcccacctcccaaattaaatatcgaaatgccagattagatgccacttccggggacagagcttaagtggactgggacgcactctctccgccttcctctgccccctcgttcaccccgcagaccagaaccagtactggagctgggtctccaggtacgtccatctcatgccttgtttgcatccagcgcctatcagccactcaccacgacgggacgcggaagtggcaggtgacgggggtgtgtgccagcagatgcggatgccaggaagagtgtgagaacaggggtgggattaccgtctgtctgggaggggctccaggtacccctcttccccgtcagacccactgggagatggctgcttgccaggcccccagaaggaacatctgtctatacggtgctgaaatcccaatcaaaagtattgtttagaaatgtatttctccacagggctgacctcctgcagctcgctgagcactcccaggtcctcagcactcccaggtcgtggctggggcagtcagtaggaactgtaactatgtctctgatgcaccacgtgtttagacacagcacagtccttttttctgttcctactgtggaagtagtttctctttgggcatgctgacagcagtttttcatagcctcacggatgagccctttctacgggagtgactccatgcttgtatacagagtatttatacaaatgttttagcatcttcatatgcggtgttaacccctagttctgtacagcatattctgttcaagtatttttttacaagcttgtgctgtaggcacatgccttctgccctggaactcgtgcaggtacgtagtagctgctactgccacaacggcaacaccaagcaagagatggtccatgcttttctgacgttctcagaatagtggctagcttcaaacctgacaagcgctgcttgaagccggaacactagagaatgttgctgagagcagaaacggccacgcgggtcacgactatgcgtgggaaagtctcaagcttccctcctgccagcaacaagaaggctttggagtaggcatgatgttttcacgtgtgcgtgccgtttctccaagcactgcaggttccaccgtgtgtcagaggctgcaagtttaacatcctcctgcctgaaaacaaataggtcctttgctgaaaagagggtaaaaaaagagctttgatcttctcagccaggagaagagggtggtgttttcacgcgggcaactgctcgccggcctacatggggttaattcaagtctgctgcgagcacgactccgcccttggcactggcctccagcaagccctgttctctttggggtacaggggaacgggatggtttagactttcctgctcagtgtgtaaaaaatgtagctaaagccactatttttgctctccttaagctgttcaataaaccggttcctcatttt

SEQ ID NO: 193818 - DNA, 2178 bp, Homo sapiens
  Payload ID: 18276
  Gene Name: transmembrane protein 185A
  ENST ID: ENST00000612022
  CDS Start-End: 140-277
cagcggggacggcagcagtagcgggagcagcagcgtggacgcggctggcgctggcgccatgaacccgctgtaaggcgcaggctgtgcagcacggggtgcgggggaggaggaggaggacgccgcggtgaagttctccgccatgaacctgaggggcctcttccaggacttcaacccgaggttgtgtgtgtcccgctgtggattctcatgtcctttctgtgcctggtggtcctctactacattgtgtggtccgtcttgttcttgcgctctatggatgtgattgcggagcagcgcaggacacacataaccatggccctgagctggatgaccatcgtcgtgccccttcttacatttgagattctgctggttcacaaactggatggccacaacgccttctcctgcatcccgatctttgtccccctttggctctcgttgatcacgctgatggcaaccacatttggacagaagggaggaaaccactggtggtttggtatccgcaaagatttctgtcagtttctgcttgaaatcttcccatttctacgagaatatggaaacatttcctatgatctccatcacgaagataatgaagaaaccgaagagaccccagttccggagccccctaaaatcgcacccatgtttcgaaagaaggccagggtggtcattacccagagccctgggaagtatgtgctcccacctcccaaattaaatatcgaaatgccagattagatgccacttccggggacagagcttaagtggactgggacgcactctctccgccttcctctgccccctcgttcaccccgcagaccagaaccagtactggagctgggtctccaggtacgtccatctcatgccttgtttgcatccagcgcctatcagccactcaccacgacgggacgcggaagtggcaggtgacgggggtgtgtgccagcagatgcggatgccaggaagagtgtgagaacaggggtgggattaccgtctgtctgggaggggctccaggtacccctcttccccgtcagacccactgggagatggctgcttgccaggcccccagaaggaacatctgtctatacggtgctgaaatcccaatcaaaagtattgtttagaaatgtatttctccacagggctgacctcctgcagctcgctgagcactcccaggtcctcagcactcccaggtcgtggctggggcagtcagtaggaactgtaactatgtctctgatgcaccacgtgtttagacacagcacagtccttttttctgttcctactgtggaagtagtttctctttgggcatgctgacagcagtttttcatagcctcacggatgagccctttctacgggagtgactccatgcttgtatacagagtatttatacaaatgttttagcatcttcatatgcggtgttaacccctagttctgtacagcatattctgttcaagtatttttttacaagcttgtgctgtaggcacatgccttctgctgcagaagtggacgcccgtggcacactccccccccccccgtggggtgccacgccttcatgggacattgccacttctgccctggaactcgtgcaggtacgtagtagctgctactgccacaacggcaacaccaagcaagagatggtccatgcttttctgacgttctcagaatagtggctagcttcaaacctgacaagcgctgcttgaagccggaacactagagaatgttgctgagagcagaaacggccacgcgggtcacgactatgcgtgggaaagtctcaagcttccctcctgccagcaacaagaaggctttggagtaggcatgatgttttcacgtgtgcgtgccgtttctccaagcactgcaggttccaccgtgtgtcagaggctgcaagtttaacatcctcctgcctgaaaacaaataggtcctttgctgaaaagagggtaaaaaaagagctttgatcttctcagccaggagaagagggtggtgttttcacgcgggcaactgctcgccggcctacatggggttaattcaagtctgctgcgagcacgactccgcccttggcactggcctccagcaagccctgttctctttggggtacaggggaacgggatggtttagactttcctgctcagtgtgtaaaaaatgtagctaaagccactatttttgctctccttaagctgttcaataaaccggttcctcatttta

SEQ ID NO: 193819 - DNA, 2662 bp, Homo sapiens
  Payload ID: 18276
  Gene Name: transmembrane protein 185A
  ENST ID: ENST00000611119
  CDS Start-End: 333-1208
ccggtcgcgtgcggacacaaggatggggacctcccagcgaggagcgctctgggcggggctccggacgcatgcgcggccctcgtacggaagcccggaaggaggggcagggggcggtggctcaggtttctccgggcggcggcggcggcggcggcggcggcggcggcggcggcggcggcgacggcgacggcgacggcagcggggacggcagcagtagcgggagcagcagcgtggacgcggctggcgctggcgccatgaacccgctgtaaggcgcaggctgtgcagcacggggtgcgggggaggaggaggaggacgccgcggtgaagttctccgccatgaacctgaggggcctcttccaggacttcaacccgagagcagaaggagaaacgtgtgtggagtttaaagccatgttgattgcagtgggcatccacttgctcttgttgatgtttgaagttctggtctgtgacagaatcgagagaggaagccatttctggctcctggtcttcatgccgctgttctttgtttccccggtgtctgttgcagcttgcgtttggggctttcgacatgacaggtcactagagttagaaatcctgtgttctgtcaacattctccagtttatattcattgccttaagactggacaagatcatccactggccctggcttgttgtgtgtgtcccgctgtggattctcatgtcctttctgtgcctggtggtcctctactacattgtgtggtccgtcttgttcttgcgctctatggatgtgattgcggagcagcgcaggacacacataaccatggccctgagctggatgaccatcgtcgtgccccttcttacatttgagattctgctggttcacaaactggatggccacaacgccttctcctgcatcccgatctttgtccccctttggctctcgttgatcacgctgatggcaaccacatttggacagaagggaggaaaccactggtggtttggtatccgcaaagatttctgtcagtttctgcttgaaatcttcccatttctacgagaatatggaaacatttcctatgatctccatcacgaagataatgaagaaaccgaagagaccccagttccggagccccctaaaatcgcacccatgtttcgaaagaaggccagggtggtcattacccagagccctgggaagtatgtgctcccacctcccaaattaaatatcgaaatgccagattagatgccacttccggggacagagcttaagtggactgggacgcactctctccgccttcctctgccccctcgttcaccccgcagaccagaaccagtactggagctgggtctccaggtacgtccatctcatgccttgtttgcatccagcgcctatcagccactcaccacgacgggacgcggaagtggcaggtgacgggggtgtgtgccagcagatgcggatgccaggaagagtgtgagaacaggggtgggattaccgtctgtctgggaggggctccaggtacccctcttccccgtcagacccactgggagatggctgcttgccaggcccccagaaggaacatctgtctatacggtgctgaaatcccaatcaaaagtattgtttagaaatgtatttctccacagggctgacctcctgcagctcgctgagcactcccaggtcctcagcactcccaggtcgtggctggggcagtcagtaggaactgtaactatgtctctgatgcaccacgtgtttagacacagcacagtccttttttctgttcctactgtggaagtagtttctctttgggcatgctgacagcagtttttcatagcctcacggatgagccctttctacgggagtgactccatgcttgtatacagagtatttatacaaatgttttagcatcttcatatgcggtgttaacccctagttctgtacagcatattctgttcaagtatttttttacaagcttgtgctgtaggcacatgccttctgctgcagaagtggacgcccgtggcacactccccccccccccgtggggtgccacgccttcatgggacattgccacttctgccctggaactcgtgcaggtacgtagtagctgctactgccacaacggcaacaccaagcaagagatggtccatgcttttctgacgttctcagaatagtggctagcttcaaacctgacaagcgctgcttgaagccggaacactagagaatgttgctgagagcagaaacggccacgcgggtcacgactatgcgtgggaaagtctcaagcttccctcctgccagcaacaagaaggctttggagtaggcatgatgttttcacgtgtgcgtgccgtttctccaagcactgcaggttccaccgtgtgtcagaggctgcaagtttaacatcctcctgcctgaaaacaaataggtcctttgctgaaaagagggtaaaaaaagagctttgatcttctcagccaggagaagagggtggtgttttcacgcgggcaactgctcgccggcctacatggggttaattcaagtctgctgcgagcacgactccgcccttggcactggcctccagcaagccctgttctctttggggtacaggggaacgggatggtttagactttcctgctcagtgtgtaaaaaatgtagctaaagccactatttttgctctccttaagctgttcaataaaccggttcctcatttt

SEQ ID NO: 193820 - DNA, 2131 bp, Homo sapiens
  Payload ID: 18277
  Gene Name: transmembrane protein 185B
  Uniprot ID: Q9H7F4
  ENST ID: ENST00000426077
  CDS Start-End: 433-1485
gtgagctcactcccgcctccatgttcccggagtcgcctggaagcgtccgcccaaggtcgcgggccgcttggggagtcagcagcgcgccaggccccttcgggccccacacgcattaggtgccttcttgatgggtacggagtgaacgcgggcggcggcgggaccgaggcagcgcccagtttgtaaccgccgcgccgcccgtgcccgcgcgcgccacaccccagcgcgcttccggccgggccacgtgaccgcgcgtgcacgtgttccggcctctccgcttcgccgctccgaacctcctcctggtcgtcccggcattcgtccacgcggagccggcttgggcggggcccgggaggcggcggccggagaagccgcggagacgcgagcgccgagcgtcgcgagggagcaggcccgggcaggcaagcggcggcctccgccatgaaccccaggggcctgttccaggacttcaaccccagtaagtttctcatctacacctgcctgctgctcttctcggtgctgctgcccctccgcctggacggcatcatccaatggagctactgggccgtctttgcccccatatggctgtggaagcttctagtcgtcgcaggcgcctccgtgggcgcgggcgtttgggcccgcaaccctcgctaccgcaccgagggagaggcctgtgtggagttcaaagccatgctgatcgctgtgggcatccacctgctgctgctcatgttcgaagtcctggtctgcgacagggtggagaggggcacccacttctggctgctggtcttcatgcctctcttcttcgtgtcccccgtgtccgtggctgcctgcgtctggggctttcgacacgataggtcgctggagctggagatcctgtgctcggtcaacatcctgcagttcatcttcatcgccctaaagctggacaggattattcactggccgtggctggtggtgtttgtgcccctgtggatcctcatgtcgttcctttgcctggtcgtcctctattacatcgtctggtccctcctgttcctgcggtccctggatgtggttgccgagcagcggagaacacacgtgaccatggctatcagttggataacgattgtcgtgcctctgctcacttttgaggtcctgctggttcacagattggatggccacaatacattctcctacgtctccatatttgtccccctttggctttccttactaactttaatggccacaacatttaggcgaaaggggggcaatcattggtggtttggcattcgcagagacttctgtcagtttctgcttgaaattttcccatttttaagagaatatgggaacatttcatatgatctccatcacgaagatagtgaagatgctgaagaaacatcagttccagaagctccgaaaattgctccaatatttggaaagaaggccagagtagttataacccagagccctgggaaatacgttcccccccctcccaagttaaatattgatatgccagattaaactcctagagaggacccaggcacacacagactccacttggccttcgcctcttgttcattcatcccaaacctggaaatggaaacaggcttcaaacactcgtctcacgccgtgtttgagatcaccgcctcatcagtatgcatcatagatggaggtggtttcagtatgtgggtgtgtgtgatgtgtacctgggtaagagacttgctttccaggttcgcactttcaggtgtagctgggggcagtaagtcgaattgttttagtaggtcctcaaaaggaataaccacacagctgtttgtttaaatgctactgtacctatcaaaactattgtttaaaaagtatttttatacactgctaatctaaaattgtatttcagattgtgcctgtcataacaatagcaaatgtaaaaagttctctttcccaccacttgtttataaacctcatagttgatatttttagtgttcctactgttaaaatactctctccttgggctttgctgatactggtctttaatattctgataggtgaatttttctaatggaatgaacccatgcatatatagtatttatatgaatattttagcagtgtaatatgttgaattctagttctctgcattaccattattacgttaaagtattttttaaagcttagg

SEQ ID NO: 193821 - DNA, 1448 bp, Homo sapiens
  Payload ID: 18278
  Gene Name: transmembrane protein 186
  Uniprot ID: Q96B77
  ENST ID: ENST00000333050
  CDS Start-End: 35-676
gtgggatttacttccggcagcaggtggtggggccatggctgcccttctccgagctgtgcgtaggtttcggggaaaagctgtgtgggaaaggcctctccatgggctgtggtgctgcagtgggcaggaggatcctaagaggtgggtgggcagcagttcacccatctcgaaggagaaactaccaaacgcagagactgagaaattctggatgttttaccgttttgatgccatcagaaccttcgggttcctgtcacgactgaagttggcacagactgccctgacagtggtagctttgccaccaggctattacttgtactcccagggcctcctcactctcaacaccgtgtgcctcatgagtgggatatcgggctttgccctgaccatgctgtgctggatgagctatttcttacggagactggttggtatcctgtatctgaatgagtctggcaccatgctgcgggtggcccatctgaacttctggggctggcggcaggacacatactgtcccatggcagatgtgattcccctgacagaaaccaaggaccggcctcaggagatgtttgtgcgtatccagcggtacagtgggaaacagaccttctacgtcaccctgcgctatggacgcatcctggacagagagcgtttcacacaggtgtttggggtacatcagatgctcaagtgaacaactgggacctggacctctgggtaaccctgggtcgcctggattaacaggaaggctgagggtgtgggcaaggctgaagaaaggggactgggtacttggagactttgcctgggcccctgggaacatgtgttttgtggtgaataaattcacaaggcaagagctggtgtacaggtttaggaaaaaggctctaagcaagttcttacagcacttgtttgtgacattcagtcagataatggccagaagtttttgttaagagccagttcttagaagaacctatgccaaggtcacccatagagtccattggtgtgaaagagaaaggcaaagaggtgtggcgggggagcgtaagatttggagtcagaagtctcagttctgtcatttgtcctggagcaggttattgagtctctttgaatcttggttttcacatctgtaaaatggaaagtcctgcttgtttcatgggatgggtgtgggaataaacaataaatgtcaaacgtgtggcagactcaacagcctacagcagatattattaagcatttggtcagaggttttagcagggagaaaggcttcgagcagtcagcagggacttccagagccctgtgctgtgcccctcacatatccagcggcagaagggtctgtcaggatgttaactacacattgacgagcagatgtcgtccaggtaggcacgaaaccccagttgagatttgttcaccacccagaggtctagaggctcttgctttggatggccctgcagtgtaataaagccaaatgcaccgga

SEQ ID NO: 193822 - DNA, 1880 bp, Homo sapiens
  Payload ID: 18279
  Gene Name: transmembrane protein 187
  Uniprot ID: Q14656
  ENST ID: ENST00000369982
  CDS Start-End: 748-1533
ccggggttggcgaacagccactgcagccgcgcctgcggccgggaagcgagcattttcgcgccctgcacacccagcagccgcaggaggcggcccgaggcgcgccgcgggggagccgggggcggggcgacagtgggaggcgacgcagccgagcgccggcgcccgggggtggagcctccgcccgctcccaggctcccaggctgcggggcccgccctcgggcgccaccgcctccgcccgcgccgcagcaaaatgagccgggccgcgcgccccagaccgccgcgcgctcggccgcccccactgccgagaggcccgcagtcgggccggtggcgcacgagccgggcgggcgaccgcgggaggcgtccgcgtcatctcgcgtcacctcgccccgcccgcttcccaggcttcgagtcccgccctgcgcgcaggcgcaccggcgctgctcggatcctcccttttcggagatttgaatttcccccagcgaggcgagtgaggcgaaatacccgtatggtgatagctggccttttcgcgccaatactgaaaaaggcagaacgttcctccgctggcgccagccaatcagcaggactcctgccttccttcggggcaaggtcgcagcatctgcctcggaaatcacgaaatcacggggcttctttctgctggctcagccgggaggcccagagtgttctgcagaggctgcgtattgaaggctgctctctgaagctccctgccccaggtcacgccgccggttccagatgaatccagagtgggggcaggccttcgtgcacgtggccgtggccggtggcctctgtgccgtggctgtgttcacgggcattttcgacagtgtttccgtgcaagtgggctatgagcactacgccgaggcgcccgtggccggcctccctgccttcctggccatgccgttcaactcactcgtgaacatggcctacacgctgctggggctgtcgtggctgcacaggggcggcgcgatggggctgggtccccgctacctgaaggacgtgttcgcagccatggccctgctctatggccccgtgcagtggctgcgcctgtggacgcagtggcgccgtgccgcggtgctggaccagtggctcacactgcccatctttgcatggcccgtggcctggtgcctctacctagaccgcggctggcggccctggctgttcctctctcttgagtgcgtctccctggccagttatggcctcgctctgctgcatccccagggcttcgaggtcgcactgggtgctcacgtggtggccgctgtggggcaggcgctgcgcacccacaggcactatggcagcaccacctcggctacctacttagctttgggggtgctctcttgcctgggctttgtggtcctcaagctgtgtgaccatcagctcgcacggtggcgtctcttccagtgcctcacaggccacttctggtccaaggtctgtgacgtgctccagttccactttgcgtttttgtttctgacgcatttcaacactcacccaagattccatccctctggcgggaagacgcgttgaacccagggaagaacctgctgaaaaccgatgacccccagcattgaaatggactctgagatggcagcgtggtgccagtgtcagacatcctgtgtgtgatgatatgcactgatcacacaagactgccctttcctgagaagctgcgggcttcggtgtggaggggtggagtgctgtgatctcgacaacttactttcaaagacataaagcacagatctccgcacaggggatgtgtgtgttcctgatgtaatttgcataacttttctgtagtttgaaatgtttccaaataaatattggcaaggggagtggaaatgacaccaagaagcccctcatgctcatggttggacagagag

SEQ ID NO: 193823 - DNA, 440 bp, Homo sapiens
  Payload ID: 18279
  Gene Name: transmembrane protein 187
  ENST ID: ENST00000425274
  CDS Start-End: 243-440
actgtaagtgctcaccgcagccctgggaggaaaaaggcagaacgttcctccgctggcgccagccaatcagcaggactcctgccttccttcggggcaaggtcgcagcatctgcctcggaaatcacgaaatcacggggcttctttctgctggctcagccgggaggcccagagtgttctgcagaggctgcgtattgaaggctgctctctgaagctccctgccccaggtcacgccgccggttccagatgaatccagagtgggggcaggccttcgtgcacgtggccgtggccggtggcctctgtgccgtggctgtgttcacgggcattttcgacagtgtttccgtgcaagtgggctatgagcactacgccgaggcgcccgtggccggcctccctgccttcctggccatgccgttcaactcactcgtgaacatggcctacacgctg

SEQ ID NO: 193824 - DNA, 330 bp, Homo sapiens
  Payload ID: 18279
  Gene Name: transmembrane protein 187
  ENST ID: ENST00000431598
  CDS Start-End: 232-330
taagcgattaggtcaaaggaaaaaggcagaacgttcctccgctggcgccagccaatcagcaggactcctgccttccttcggggcaaggtcgcagcatctgcctcggaaatcacgaaatcacggggcttctttctgctggctcagccgggaggcccagagtgttctgcagaggctgcgtattgaaggctgctctctgaagctccctgccccaggtcacgccgccggttccagatgaatccagagtgggggcaggccttcgtgcacgtggccgtggccggtggcctctgtgccgtggctgtgttcacgggcattttcgacagtgtttccgtg

SEQ ID NO: 193825 - DNA, 2222 bp, Homo sapiens
  Payload ID: 18280
  Gene Name: transmembrane protein 189
  Uniprot ID: A5PLL7
  ENST ID: ENST00000371650
  CDS Start-End: 98-901
gctgggcggtcattgggcggcgtgatctcgccgcggttccgcggccctgccgccgccgccgccagcagagcgcaccgggccgatcgggcgagtggccatggcgggcgccgagaactggccgggccagcagctggagctggacgaggacgaggcgtcttgttgccgctggggcgcgcagcacgccggggcccgcgagctggctgcgctctactcgccaggcaagcgcctccaggagtggtgctctgtgatcctgtgcttcagcctcatcgcccacaacctggtccatctcctgctgctggcccgctgggaggacacacccctcgtcatactcggtgttgttgcaggggctctcattgctgacttcttgtctggcctggtacactggggtgctgacacatggggctctgtggagctgcccattgctttcatccgacccttccgggagcaccacattgacccgacagctatcacacggcacgacttcatcgagaccaacggggacaactgcctggtgacactgctgccgctgctaaacatggcctacaagttccgcacccacagccctgaagccctggagcagctatacccctgggagtgcttcgtcttctgcctgatcatcttcggcaccttcaccaaccagatccacaagtggtcgcacacgtactttgggctgccacgctgggtcaccctcctgcaggactggcatgtcatcctgccacgtaaacaccatcgcatccaccacgtctcaccccacgagacctacttctgcatcaccacaggctggctcaactaccctctggagaagataggcttctggcgacgcctggaggacctcatccagggcctgacgggcgagaagcctcgggcagatgacatgaaatgggcccagaagatcaaataacttctccgagcctgctacctggttgccaaccttccctagcccccaaaccgaagccatctgccaaattccagcctctttgagctggcccctccagatggagaggacatctcctgggctgggcccaggtaccccagcccacccctcatgacacagaatacttgagccactgatttttcatttcttttttttttttttcctcggcccctcctcagccacctgagttgctctatctgcaagcctgactctgccagcctcccctggtagagaggaggtttacccactccctgcacgcctgccgtccctgccccgctgggcagcccttcagtgtggctggcgttggggccagtgagttgcctctttccctccttgtctggccccagtggtctggggagcccccaggcacacctaagcgtcgtggagcattgttctgccacagccctgcatactgaccccgggaggctgggcaggtggacagccccagccaccaccttcagcctagcctgtcccccaaggatggtgaagctcagcaggggtctgagggtagccggccagaagaggctggaacctcctgctcaagtctagacccctacttctctgctgcccccaccctgccagagctgatgtttccaataccaagatgtcttcacagggcacagcccctgcagagcatcttggtcatttggaagaggacacggtatcccctctggccagagtatgtcagagaaggaagagtagggcttttttgttttgtttttttttaaaggtgcttgcttgtttaatgtaaataatagaaagccttaatatcttttctgtaacacggagtaatattttaatgtcatgttttggatgtacataatatatttataacaaagcagcaagagtctacttaaccttggctgcctcgtggtgtttcctggctgggtggggtggggggtatcaaggagcctgggacgtgaggccccactctcgccccattcccagctccccccaaccctggcctcaggatgagagctgtcacctgagacagtgaattaatgttgacatctgctccaaagccttttggaggggattgggtgaggacagtggtctttcctgttgatcatgatgataaagtaatgatggctgatccctatttgtgacttccttcagcaaatattcactggcacctggtgtgtgccaggctctgtcctgtacacaggtacagcggtgaaagaaccaacaaagacctatcctggtggagctgacctcctgggaaaagagtcaataaacaaataaatgcacatggaaattcaggtggtgatttgtgaagaaaatcaaacag

SEQ ID NO: 193826 - DNA, 7714 bp, Homo sapiens
  Payload ID: 18280
  Gene Name: transmembrane protein 189
  Uniprot ID: A5PLL7
  ENST ID: ENST00000371652
  CDS Start-End: 98-910
gctgggcggtcattgggcggcgtgatctcgccgcggttccgcggccctgccgccgccgccgccagcagagcgcaccgggccgatcgggcgagtggccatggcgggcgccgagaactggccgggccagcagctggagctggacgaggacgaggcgtcttgttgccgctggggcgcgcagcacgccggggcccgcgagctggctgcgctctactcgccaggcaagcgcctccaggagtggtgctctgtgatcctgtgcttcagcctcatcgcccacaacctggtccatctcctgctgctggcccgctgggaggacacacccctcgtcatactcggtgttgttgcaggggctctcattgctgacttcttgtctggcctggtacactggggtgctgacacatggggctctgtggagctgcccattgtggggaaggctttcatccgacccttccgggagcaccacattgacccgacagctatcacacggcacgacttcatcgagaccaacggggacaactgcctggtgacactgctgccgctgctaaacatggcctacaagttccgcacccacagccctgaagccctggagcagctatacccctgggagtgcttcgtcttctgcctgatcatcttcggcaccttcaccaaccagatccacaagtggtcgcacacgtactttgggctgccacgctgggtcaccctcctgcaggactggcatgtcatcctgccacgtaaacaccatcgcatccaccacgtctcaccccacgagacctacttctgcatcaccacaggctggctcaactaccctctggagaagataggcttctggcgacgcctggaggacctcatccagggcctgacgggcgagaagcctcgggcagatgacatgaaatgggcccagaagatcaaataacttctccgagcctgctacctggttgccaaccttccctagcccccaaaccgaagccatctgccaaattccagcctctttgagctggcccctccagatggagaggacatctcctgggctgggcccaggtaccccagcccacccctcatgacacagaatacttgagccactgatttttcatttcttttttttttttttcctcggcccctcctcagccacctgagttgctctatctgcaagcctgactctgccagcctcccctggtagagaggaggtttacccactccctgcacgcctgccgtccctgccccgctgggcagcccttcagtgtggctggcgttggggccagtgagttgcctctttccctccttgtctggccccagtggtctggggagcccccaggcacacctaagcgtcgtggagcattgttctgccacagccctgcatactgaccccgggaggctgggcaggtggacagccccagccaccaccttcagcctagcctgtcccccaaggatggtgaagctcagcaggggtctgagggtagccggccagaagaggctggaacctcctgctcaagtctagacccctacttctctgctgcccccaccctgccagagctgatgtttccaataccaagatgtcttcacagggcacagcccctgcagagcatcttggtcatttggaagaggacacggtatcccctctggccagagtatgtcagagaaggaagagtagggcttttttgttttgtttttttttaaaggtgcttgcttgtttaatgtaaataatagaaagccttaatatcttttctgtaacacggagtaatattttaatgtcatgttttggatgtacataatatatttataacaaagcagcaagagtctacttaaccttggctgcctcgtggtgtttcctggctgggtggggtggggggtatcaaggagcctgggacgtgaggccccactctcgccccattcccagctccccccaaccctggcctcaggatgagagctgtcacctgagacagtgaattaatgttgacatctgctccaaagccttttggaggggattgggtgaggacagtggtctttcctgttgatcatgatgataaagtaatgatggctgatccctatttgtgacttccttcagcaaatattcactggcacctggtgtgtgccaggctctgtcctgtacacaggtacagcggtgaaagaaccaacaaagacctatcctggtggagctgacctcctgggaaaagagtcaataaacaaataaatgcacatggaaattcaggtggtgatttgtgaagaaaatcaaacaggacagaaccacagcggaaaagcagggtcggtgctgctttggcagggtggtcatgaagggcctctgagctgagacctgggggaggagaggaggtcagacacgaaagaagtgagggaagaggcctcttgatgggacagcaagtacacaggccctgaggcaagaacaagcttggggccacgcacagtggctcacgccagtaatcccagcactttgggaggctgaggcggacagatcacctgaggtcaggagttctagaccagcctggccaacatggtgaaaccctgtctctactaaaatttacaaaaattagccaggcgtggtggcagacgactttatcccagctacttgggaggcagaggcaggagaatcatttgaacccgggaggtgaaggttgcagtgagccgagatcgagccattgcactcaaacctgggggataagagcgagacttcgcttagaaaaaaaaaaaaagaacaagcttgggattttaagagatggtgaggcagccactgtggctggactagagtgagctaaggaaaaatggaagacaaggttgggaaaacatggatttggtatacagagactcataggctgaggtgagtggggacctgctggtcattttatttatttgtatttattactatgtttttagagacagggtcatgctctgtcacccaggctaaagtgcagaggtgaggtgtaatagctcacagcaaccttgaactcctggacacaaacgatcctcatgagtggctgggactagcacatgccgccacacctggcttggctatttttttttttttttaaagaaatggggtctcactatgttgtccaggttggtcttgaactcctggcctcaagtgatccgccttggccttccaaagtgctggaattttaggtatgagccactgcaccgggtcaggacattatagaccaattagtaacttgtttatttgttgaataagtaattataaggcatctcctatgaactaggtactgcgattctgtagtgaacgctacagacatagtcaatagctagtctaggctagatagtttctgcaatattagccagaaaaaagaaagcctgttggggacagggaaatgcctaaaggactccagagcagtcacagataatgacatttctgagtagctgggattacaggcgcccaccaccatgcccggctaattttcgtatttttagtagagatggggtttcagcatgttggccaggctggtctccaactcttgacttcaggtgatccacccaccttggcctcccaaagtgttgggattacaggcatgagccactgcgtccagccatgacatttattttttaaaacgtgacccataatgccattttcctttgccaactagacttttgatttgtgactatgcctgaggggaccacacaaggaagggtgttagaattcgacaactcataaatgacagaaatttaaagtaaacagctaaaataatcgtattagctcataaaacggaaaagtctacaggtgttctgaattaaggtttggcaggacccaggggctcacatgattcatcaaaacgtggtctctctaagctctgtttttctctttgagttgagacttactagaccagctcagcaatctcagtggaaagtgcattcccagtagttgcagtggaagtcccagggcaggctctcattggtctggactgggtcacgtgcccatccctgaaccaatcacattggccagtggggtgaaatgctctggttgcccagggctgaaaaatgtccatctggatttgcagggttgtgatcacctcttcctaaggcattactacaaaaagaagtcaatggtggatgggacaggcagctaaattctttagaggccataggagtagcctcaccactgtggtgttggtttccaggccccaccaatctgtgtcagttcccctggagccgacagaaaaaaaaccctcagcctgagtccagagaggtaaagtgactcccccaaggtcccacaggtagtaagggtagagcagccctcagactcagaccatttcacttctgaattctgggggctggaaaaaaatccttctcaaaaccagaaggtgcgctgcattgggtctgagagtgttggggccacttgtgagatcagggacttgcaaacaagtgcctatgagggccagacaggggaaaatgctacttaatattactgagcacttaactttgcaccagactgtgcagagagctctggcatgggtcctgtcaagcagtccctgcagctctgagaagtgagtactctttgcaccatttgcagatggggaaactgaggcacagaggtcatgtaatatgcccaaggtcacacagctggtaggtggcagaatcaggatttgagccagcgtctgacccaaagcccctgtgctttaacgctcccattgtggagagggaggtgagacaggtggcacgtgagaaatgtgtccactatgaggcaactgcagcatgcctgagaaagggccgctgacgctggggactgggatgacctggagacatcaggcctaaagggcagctgctactcacagcagctggttaaacaggagccagaaatctaaactttaaaaatgctggctccgtgtttaaaacgtactgtgggcaaaacaaaatgagtgcataggccaactgcctgcagcctccctcccagctgctgtgggatggcttggtttcaggtaggcatgtgctgctgtctggtggtggcacagggtagtggcatgcagggcaaacatggatttccagctcaaccgggggagctgtagtgaacttgcatacccctgtgtgctcactgttctttagaaggggcctgggcacatacctttgggcgcctgcccccaactgaaactccatcaccccgccttttttttttcctggagacggggtcttgctctgtcacccaggctggaacacagtggcatgatctgcgctcactgcagactcaacctcccaggctcaagcaatcctcccatttcagcctcttgaatagcgggaacgacagacatgtgccaccacccccagctagtttctttttgtattttttgtagagatggggtttcaccatgttgcccaggctggtctcgaacgcctgagctcaagcgatcggcccacctcagccttcctaagtgttgggattacaggcatgaaccaccgcgcccagccaaccctcctttgataaaccaaaaatatttttcaagctacccacatatatatatgggtatatatatatatatagcaatatatatattgctatataagcaataggtaatgcttgcataggtaaagaataagaatcacgccgggtacagtggctcatatcaaataatataaacagggctagagtatggataagctgaccctggacagtgggccaaatccagccacttgcttttctatagctcagaagcttttgtgggttgtttgtttgtttgtttgtttgtttgttttttagagacagggtcttgctctgttgtccaggctggagtgcagtggcacaatcacagctcactgtaacctcagactcctgggctcaagtgatcctcccacctcagcctcctgagtagctaggactacagatggacaccaccacatccagctaatttttttttttttttagagatggggtctcgctatgttgcccagggtagtctcaaactcctggcctcaagtgatcctcccacctcaacctcctgaagcactgggattacaggtgtgagccaccatgtcagccacgagcattttttaaatggctgggggagggggaacaatatttcctaacacagaaaattcaaattccagtttgtaaagctgaattggcacacagccatgcccctcatttacatattgtccgaggctgcttttgcactgcagtggcagaattgagtcgttgcatcggagaccacgtggtccacacagcctaaaatatttacgatctggccctttacagagaaaagttaccaacctctccctagtctagaatgaagggtaaattgctccccattcatgttccctcaggtactcagttcccctccttagaggccatcattttgacaagacacttgcaatgccttatgtaggcagaggggtatgtctgccccactccttttcacacaatatgtaggatattatgcacacagttctgcaccttgccttttttcacttaatatattttggagatagtgttatcattaatgttcacaaaccattattattttttacagctgcatagtgttccaccttcaggatggaatggacttgacttttttttttttttttttttgagacaaagtcttgctctattacctgggctagagtgcagtggtgcaatcccagctcactacagcctctgcctcctgggctcaagctatcctctctcagcctcccatcccaagtagttgggactacaggtgcatgccaccatgctgagctaatttttttttattatttttagagacgggggtcttgctttgttgcccagactcgtctcaaactcctgtgctcaagcaatcctcctgcctcagactcccaaactgctgggattacaggcttgaaccacgagtgtgttttaaattttgatagtgcataccaaattgtcttccagaggccatgccggtttaagttcacaagttttcagagtccctgtttcctcacacccttgccaacacagcgtgttatcaaatgttttgttctttgccaatctgataggtggttttaatttgcattcctcttactgtatttcattgattctaagatgtcactgattctaagatgcatcctgatttcagaagttcacatgtaaaaatgtggctgggtgtggtagctcacgcctgtaatcccagcactttgggcggatcacgaggtcaggaattcaagaccagcctggccaacatagtgaaaccccgtctctaccaaaaatacaaaagaaataattagctgggtgtggtggcgggtgcctgtaatcccagctacttgggaggctgaggcaggagaattgcttgaacccaggaggcggaggttgcagtgaactgagatcgcgccactgaactccagcctgggcgacacagcgagactctgtctcaaaaaaaaaacaaaaaaaaagtaaaaacgtatagcttcaaatcactgaaatacaatatgttttgtgagattgggtatcttactgtgagtttaaaatgcatttgcatttcctcatctgttcatgtccttttcctatttttcttggaagggagggtagcattggttaagagtgtagggttcaaatcccagttctgccacttacaagcttgtgactttgggcaagttacttaaccgttctgtgtctcagtttcctcacctgcaaaatgggaataataatggtacctacctcataggataggtgtgaagattaaatacattattatatgcaaaataccatgttcctggaatatggcaaatgctcaataaatatttgctgtaactgtca

SEQ ID NO: 193827 - DNA, 1973 bp, Homo sapiens
  Payload ID: 18280
  Gene Name: transmembrane protein 189
  ENST ID: ENST00000371656
  CDS Start-End: 98-685
caagtaacaggcaggaggagtgttaagcctgaggctccatcttcagggaagaaaacatcccaactagagaagaagggacaccttcccctcctaacaaatgaatgagcgggcaattgcaggggctctcattgctgacttcttgtctggcctggtacactggggtgctgacacatggggctctgtggagctgcccattgtggggaaggctttcatccgacccttccgggagcaccacattgacccgacagctatcacacggcacgacttcatcgagaccaacggggacaactgcctggtgacactgctgccgctgctaaacatggcctacaagttccgcacccacagccctgaagccctggagcagctatacccctgggagtgcttcgtcttctgcctgatcatcttcggcaccttcaccaaccagatccacaagtggtcgcacacgtactttgggctgccacgctgggtcaccctcctgcaggactggcatgtcatcctgccacgtaaacaccatcgcatccaccacgtctcaccccacgagacctacttctgcatcaccacaggctggctcaactaccctctggagaagataggcttctggcgacgcctggaggacctcatccagggcctgacgggcgagaagcctcgggcagatgacatgaaatgggcccagaagatcaaataacttctccgagcctgctacctggttgccaaccttccctagcccccaaaccgaagccatctgccaaattccagcctctttgagctggcccctccagatggagaggacatctcctgggctgggcccaggtaccccagcccacccctcatgacacagaatacttgagccactgatttttcatttcttttttttttttttcctcggcccctcctcagccacctgagttgctctatctgcaagcctgactctgccagcctcccctggtagagaggaggtttacccactccctgcacgcctgccgtccctgccccgctgggcagcccttcagtgtggctggcgttggggccagtgagttgcctctttccctccttgtctggccccagtggtctggggagcccccaggcacacctaagcgtcgtggagcattgttctgccacagccctgcatactgaccccgggaggctgggcaggtggacagccccagccaccaccttcagcctagcctgtcccccaaggatggtgaagctcagcaggggtctgagggtagccggccagaagaggctggaacctcctgctcaagtctagacccctacttctctgctgcccccaccctgccagagctgatgtttccaataccaagatgtcttcacagggcacagcccctgcagagcatcttggtcatttggaagaggacacggtatcccctctggccagagtatgtcagagaaggaagagtagggcttttttgttttgtttttttttaaaggtgcttgcttgtttaatgtaaataatagaaagccttaatatcttttctgtaacacggagtaatattttaatgtcatgttttggatgtacataatatatttataacaaagcagcaagagtctacttaaccttggctgcctcgtggtgtttcctggctgggtggggtggggggtatcaaggagcctgggacgtgaggccccactctcgccccattcccagctccccccaaccctggcctcaggatgagagctgtcacctgagacagtgaattaatgttgacatctgctccaaagccttttggaggggattgggtgaggacagtggtctttcctgttgatcatgatgataaagtaatgatggctgatccctatttgtgacttccttcagcaaatattcactggcacctggtgtgtgccaggctctgtcctgtacacaggtacagcggtgaaagaaccaacaaagacctatcctggtggagctgacctcctgggaaaagagtcaataaacaaataaatgcacatggaaa

SEQ ID NO: 193828 - DNA, 813 bp, Homo sapiens
  Payload ID: 18280
  Gene Name: transmembrane protein 189
  ENST ID: ENST00000371658
  CDS Start-End: 4-279
gccatggcgggcgccgagaactggccgggccagcagctggagctggacgaggacgaggcgtcttgttgccgctggggcgcgcagcacgccggggcccgcgagctggctgcgctctactcgccaggcaagcgcctccaggagtggtgctctgtgatcctgtgcttcagcctcatcgcccacaacctggtccatctcctgctgctggcccgctgggaggacacacccctcgtcatactcggtgttggctttcatccgacccttccgggagcaccacattgacccgacagctatcacacggcacgacttcatcgagaccaacggggacaactgcctggtgacactgctgccgctgctaaacatggcctacaagttccgcacccacagccctgaagccctggagcagctatacccctgggagtgcttcgtcttctgcctgatcatcttcggcaccttcaccaaccagatccacaagtggtcgcacacgtactttgggctgccacgctgggtcaccctcctgcaggactggcatgtcatcctgccacgtaaacaccatcgcatccaccacgtctcaccccacgagacctacttctgcatcaccacaggctggctcaactaccctctggagaagataggcttctggcgacgcctggaggacctcatccagggcctgacgggcgagaagcctcgggcagatgacatgaaatgggcccagaagatcaaataacttctccgagcctgctacctggttgccaaccttccctagcccccaaaccgaagccatctgccaaattccagcctctttgagctggcccc

SEQ ID NO: 193829 - DNA, 2028 bp, Homo sapiens
  Payload ID: 18280
  Gene Name: transmembrane protein 189
  ENST ID: ENST00000453505
  CDS Start-End: 98-235
gctgggcggtcattgggcggcgtgatctcgccgcggttccgcggccctgccgccgccgccgccagcagagcgcaccgggccgatcgggcgagtggccatggcgggcgccgagaactggccgggccagcagctggagctggacgaggacgaggcgtcttgttgccgctggggcgcgcagcacgccggggcccgcgagctggctgcgctctactcgccagtgcccttcactctctgaagaacagccatgcctgaatcagagtctgcagacagcctggtgccccaaatctgcaatcaaggccctttatctcctccagacctggaggcaagcgcctccaggagtggtgctctgtgatcctgtgcttcagcctcatcgcccacaacctggtccatctcctgctgctggcccgctgggaggacacacccctcgtcatactcggtgttgttgcaggggctctcattgctgacttcttgtctggcctggtacactggggtgctgacacatggggctctgtggagctgcccattgtggggaaggctttcatccgacccttccgggagcaccacattgacccgacagctatcacacggcacgacttcatcgagaccaacggggacaactgcctggtgacactgctgccgctgctaaacatggcctacaagttccgcacccacagccctgaagccctggagcagctatacccctgggagtgcttcgtcttctgcctgatcatcttcggcaccttcaccaaccagatccacaagtggtcgcacacgtactttgggctgccacgctgggtcaccctcctgcaggactggcatgtcatcctgccacgtaaacaccatcgcatccaccacgtctcaccccacgagacctacttctgcatcaccacaggctggctcaactaccctctggagaagataggcttctggcgacgcctggaggacctcatccagggcctgacgggcgagaagcctcgggcagatgacatgaaatgggcccagaagatcaaataacttctccgagcctgctacctggttgccaaccttccctagcccccaaaccgaagccatctgccaaattccagcctctttgagctggcccctccagatggagaggacatctcctgggctgggcccaggtaccccagcccacccctcatgacacagaatacttgagccactgatttttcatttcttttttttttttttcctcggcccctcctcagccacctgagttgctctatctgcaagcctgactctgccagcctcccctggtagagaggaggtttacccactccctgcacgcctgccgtccctgccccgctgggcagcccttcagtgtggctggcgttggggccagtgagttgcctctttccctccttgtctggccccagtggtctggggagcccccaggcacacctaagcgtcgtggagcattgttctgccacagccctgcatactgaccccgggaggctgggcaggtggacagccccagccaccaccttcagcctagcctgtcccccaaggatggtgaagctcagcaggggtctgagggtagccggccagaagaggctggaacctcctgctcaagtctagacccctacttctctgctgcccccaccctgccagagctgatgtttccaataccaagatgtcttcacagggcacagcccctgcagagcatcttggtcatttggaagaggacacggtatcccctctggccagagtatgtcagagaaggaagagtagggcttttttgttttgtttttttttaaaggtgcttgcttgtttaatgtaaataatagaaagccttaatatcttttctgtaacacggagtaatattttaatgtcatgttttggatgtacataatatatttataacaaagcagcaagagtctacttaaccttggctgcctcgtggtgtttcctggctgggtggggtggggggtatcaaggagcctgggacgtgaggccccactctcgccccattcccagctccccccaaccctggcctcaggatgagagctg

SEQ ID NO: 193830 - DNA, 5656 bp, Homo sapiens
  Payload ID: 18281
  Gene Name: transmembrane protein 19
  Uniprot ID: Q96HH6
  ENST ID: ENST00000266673
  CDS Start-End: 595-1605
cacagcgggcgaggcgctagaggcgggggcgccgggaggcgcgggctttgctcctggggtctcggccttggccggctggacctgaccctagggcggcttgcgcagctgtcgggacgtgactgcgttcagccgcgtcgggcgtgcttcccagacttgcccaagttcgggtgccctagctgcccctttgcagccgctggcctacccggcccgcgggtgagaaggttgcgacgggaggtgggtggaactcgccagcgccgggaccgcggattggctgcctcggctttctcttttccccgtgggctccggcgtgaggcgctgaagcggccggcagccggcgaccggccctcaccgtccgccgggttgcgctctgcttttgcggtgaggcgttgaccacgcccatatgaattggagctctccgccagtaggagtttccggaaggagtttgaatttttgtgatttttatgcttgtttggtcggtggaatatgttgggatttatgtttgcctctgaacaagtgtcttgctcacatcgtaaatgactttctctccgaaacgctaaatattctttcccgcaggagctcatatccttattttccatgacagatcttaacgacaatatatgcaaaagatatataaagatgataactaatatagttatactgagcctgatcatttgcatttcgttagctttctggattatatcaatgactgcaagcacctattatggtaacttacgacctatttctccgtggcgttggctgttttctgttgttgttcctgttctgatcgtctctaatggccttaaaaagaaaagtctagatcacagtggggctctaggagggctagtcgttggatttatcctaaccattgcaaatttcagcttttttacctctttgctgatgtttttcttgtcttcttcgaaactcactaaatggaagggagaagtgaagaagcgtctagattcagaatataaggaaggtgggcaaaggaattgggttcaggtgttctgtaatggagctgtacccacagaactggccctgctgtacatgatagaaaatggccccggggaaatcccagtcgatttttccaagcagtactccgcttcctggatgtgtttgtctctcttggctgcactggcctgctctgctggagacacatgggcttcagaagttggcccagttctgagtaaaagttctccaagactgataacaacctgggagaaagttccagttggtaccaatggaggagttacagtggtgggccttgtctccagtctccttggtggtacctttgtgggcattgcatacttcctcacacagctgatttttgtgaatgatttagacatttctgccccgcagtggccaattattgcatttggtggtttagctggattactaggatcaattgtggactcatacttaggggctacaatgcagtatactgggttggatgaaagcactggcatggtggtcaacagcccaacaaataaggcaaggcacatagcagggaaacccattcttgataacaacgcagtgaatctgttttcttctgttcttattgccctcttgctcccaactgctgcttggggtttttggcccagggggtgaactttatttcatttccacaggttgaaactggtgagtccagctaaatttgcaattccaactttcatcctaagaataataactgtaatggcaaagcggaaatgccagttcctcctgtattccattgagatgggatttcacattttcctctcatcaactcccctgtaatagctagcgtctttctagtgaaagagaagaattcctagaacttatgcatttttttcctgctgaatggaagtcttgagcaatgaagctatattgtccctacatattactatatattgaactgaaagttcttacataatcaatgtcaagttttgtcttattttgttttgtttgtttaaaccagtgtaggaaataaaagtgatgatatttaaaatagttctcagttgaagcagagaaatgccactgtgctagttgcccaaatgttgtatctattttaaatagtttaagctgatgtgtatgggagcctaaacaagtgtagtatcctgaacttctcccattaattgctattcacaattgggaaaagtgtggagattggttcctagtgagttttgtggcctactccacatttgttcttccttcctcagggttagtgatgaaaaaaagtaaatatctttttcatatgtccattagaatgtatgaaaaaaatcattttaactaaaagcaaaagaattttatcttatatctaaaaaatatataacttactatatgtttcagttgctctctgaacaaaaattatcttcaatttaatatgtggaatgtgttttctagctttctttgaattatgtatggcaacctggtttagcactggcatcctgaacagttaagagtcactgggaaattattgtatttctttataaatttactgtcatatcaattgctggaaaatgctatgatttttctattattaccttctaagttgtattctctcttacactgtagcctcaactaaggcaattctgctatgtttgttcttcactatgatttactgtgtgccaaaggagttttgacagggtacagagtattttactaaaagtatttttaaatgtttctcatgtgatttctgtaccttcttcctcctgccccttttgcttttttaaagaaactggggaaggatttatgaatacaccaccaccagagtggataatgcttagaattctttattggtggccctactatggtgatgatctagaactgacttacttcaggacagaagaaaaaacaatcacacccttaacctttaagccagttagatcagggggttgcaacaattgggttaaactttgggtatacattggaagcaccagggcatgtttgctttttttgtttatgtgtttgttttttgagacagagtctcacactgtggcccaggctggactccagcacagtggcatgatctcagctccgcctcctgggttcacgtgattctcatgcctcagcctcccaagtagctgggatcacaggcgtgcaccatcacgcccggctaatttttgtattttcagtagagacagggtttcgccacgttggctaggctggtctcgaactcctgacctcaagtgatctgcccatctcagcctcccaaagatctattacaagatgtgagccactgtgcccagccaccagggcatgtttttaaaaaagtactgatgtctgggtttcacactgcaaaattctgatttatctgatctaaggtacagcctggatattgagactttttaaagctctgactgtacattgaatcatcatgtaaggagtttttaaaacattgttgccagggcccctttctagaccaagttagtcagaatgttggacaatgaggcccatgcatgggtatttttacaaagctctctgggagattctaatgcttaaccaaattgagaagcactgaataagaatatcctgggccgggcgcactggctcatgcctgtaatcccagcattttggaaggccgaggcgggtggatcacttgaggtcaggagttcgagaccagcctggccaacatggtgaaacaccgtctctactaaaaatacaaaaaattaggtgtggtggtgcgtgcctgtattcccagccactcaggaggctgaggcaggagaatcgctggaacctgggatgtggaggttgcagtgagccaagattgcaccactgtactccagcctgggcaacagagggagactccatctagactccatctcaaaaaaaaaaaaaaaaaaaaaaaaaaaaaaaaaaaaaaagaatattctaagcactagaactacataagaatgtcctaaagcactgtatctaagcacttgaaaagaatgggacttttcggttttagggagataactattagcaaccacacaatatgttatctttatggatgaataacttctggtaatgacacagtgtcttacagctacatcatttataaaatcatgtgtcagttttcacacagcctgcacatcgttctgacatgccctttttttccctggagatttatcctcatgacatacaaggggacaaaaatatttattgggactgtctttgaatttagtagaatcactgtatcattaacagtttggggaagtactgctttgcagtcctttatttgaaaacttaggtctagctgtgttttgcatcaaaatttttgagctattcaaaaactaataggatctgtgtaaaatatttcactcaaaactactaaaaaaaagtctgggatggcagctcattatcaaatatactcctatttttgtggtgatttatgaacatccccactaagtataactaaagatcataaagagcctcagatcaagtttggtcaggttttgtcaccaagctttgtaaataaactggttttcatagctttttggagatgagaattgaggataagaaattgtgtctctgtcctttttttttttttttgttaagtcttacatgtattttactgtaacatcttttgaattggatatttaactaattcaacatatttttcctctttgcagaatgggcagttcatgttaaaatcacttttcatggaaagagctctatgtaacagcataataaaactgcctacctagcagcataaaggtgtactgtttcttatcatactgttccatgatagaagagagcagatatatgtggcttggggcagctcctgaagaagacttgcaggagtagcatgttgaaaactcattaaatggagccaccaagagaccaaagaattgatacagcaggtcattctattattagcttttctcattacttgagttatctgtttctcacatatatctttcctgtttctagctgctgtacacataggatgctgcctgcagaaatagcagccccgccccaattagataaaggactagtatagagaaaaagcatgtgaaatgatgttttaaactttgccgcatacctgtgatatgaacagctgctgcctgttaggcacagtgggtatactagggcccaatcatctgatcttcctgaagttttatgtaatgttcccagtgctatcacaatgagaatgatctatactagccaccagatctcaggtgaattgtggtgtgctttaaaaatgaaaacacagccggacgaggtggcttatgcctgtaatcctaacactttgggaggccgaggcgggcagatcacgaggtcaggagttcaagaccagcccggccaacacagtgaaaccccatctcttagccgggcatggtggcgcatgcctgtagtcccagctattcaggaggctgaggcgtgagaatcacttgaacccaggaggcagaggtttcagtaagcagagagcgtgccaccgcactccagcctgggtgacagagcaagactccatcttgaaaaaaaaaggaaaacacaattatgtggcttaattatttaatctcctttatggagtatctgtttttataactccaagtggttcttgatattttaaaaatacttaagcattcaatatgtattcattgaattaagttgtttgactctaatcattgtttcttttaagaatgactggaaggtgataatcagcaccatattcctggaggaaaatacaaaatgaaaaacc

SEQ ID NO: 193831 - DNA, 567 bp, Homo sapiens
  Payload ID: 18281
  Gene Name: transmembrane protein 19
  ENST ID: ENST00000550787
  CDS Start-End: 1-457
agacacatgggcttcagaagttggcccagttctgagtaaaagttctccaagactgataacaacctgggagaaagttccagttggtaccaatggaggagttacagtggtgggccttgtctccagtctccttggtggtacctttgtgggcattgcatacttcctcacacagctgatttttgtgaatgatttagacatttctgccccgcagtggccaattattgcatttggtggtttagctggattactaggatcaattgtggactcatacttaggggctacaatgcagtatactgggttggatgaaagcactggcatggtggtcaacagcccaacaaataaggcaaggcacatagcagggaaacccattcttgataacaacgcagtgaatctgttttcttctgttcttattgccctcttgctcccaactgctgcttggggtttttggcccagggggtgaactttatttcatttccacaggttgaaactgaatgggcagttcatgttaaaatcacttttcatggaaagagctctatgtaacagcataataaaactgcctacctagcagca

SEQ ID NO: 193832 - DNA, 661 bp, Homo sapiens
  Payload ID: 18281
  Gene Name: transmembrane protein 19
  ENST ID: ENST00000546677
  CDS Start-End: 233-661
tgttttctgttgttgttcctgttctgatcgtctctaatggccttaaaaagaaaagtctagatcacagtggggctctaggagagacagggtttcgccatgttgaccaggccggtctcgagctcctggtctcaagtgatcacctgcctgggcctcccaaagtgctgggattacagggctagtcgttggatttatcctaaccattgcaaatttcagcttttttacctctttgctgatgtttttcttgtcttcttcgaaactcactaaatggaagggagaagtgaagaagcgtctagattcagaatataaggaaggtgggcaaaggaattgggttcaggtgttctgtaatggagctgtacccacagaactggccctgctgtacatgatagaaaatggccccggggaaatcccagtcgatttttccaagcagtactccgcttcctggatgtgtttgtctctcttggctgcactggcctgctctgctggagacacatgggcttcagaagttggcccagttctgagtaaaagttctccaagactgataacaacctgggagaaagttccagttggtaccaatggaggagttacagtggtgggccttgtctccagtctccttggtggtacctttgtgggcattgcatacttcctcacacagctgattttt

SEQ ID NO: 193833 - DNA, 739 bp, Homo sapiens
  Payload ID: 18281
  Gene Name: transmembrane protein 19
  ENST ID: ENST00000550524
  CDS Start-End: 229-739
ggcgccgggaggcgcgggctttgctcctggggtctcggccttggccggctggacctgaccctagggcggcttgcgcagctgtcgggacgtgactgcgttcagccgcgtcgggcgtgcttcccagacttgcccaagttcgggtgccctagctgcccctttgcagccgctggcctacccggcccgcgggtgagaaggttgcgacgggaggagctcatatccttattttccatgacagatcttaacgacaatatatgcaaaagatatataaagatgataactaatatagttatactgagcctgatcatttgcatttcgttagctttctggattatatcaatgactgcaagcacctattatggtaacttacgacctatttctccgtggcgttggctgttttctgttgttgttcctgttctgatcgtctctaatggccttaaaaagaaaagtctagatcacagtggggctctaggagggctagtcgttggatttatcctaaccattgcaaatttcagcttttttacctctttgctgatgtttttcttgtcttcttcgaaactcactaaatggaagggagaagtgaagaagcgtctagattcagaatataaggaaggtgggcaaaggaattgggttcaggtgttctgtaatggagctgtacccacagaactggccctgctgtacatgatagaaaatggccccggggaaatcccagtcgatttttccaagcagtactccgcttcct

SEQ ID NO: 193834 - DNA, 1772 bp, Homo sapiens
  Payload ID: 18281
  Gene Name: transmembrane protein 19
  Uniprot ID: Q96HH6
  ENST ID: ENST00000549735
  CDS Start-End: 186-1082
agctctccgccagtaggagtttccggaaggagtttgaatttttgtgatttttatgcttgtttggtcggtggaatatgttgggatttatgtttgcctctgaacaagtgtcttgctcacatcgtaaatgactttctctccgaaacgctaaatattctttcccgcaggagctcatatccttattttccatgacagatcttaacgacaatatatgcaaaagatatataaagatgataactaatatagttatactgagcctgatcatttgcatttcgttagctttctggattatatcaatgactgcaagcacctattatggtaacttacgacctatttctccgtggcgttggctgttttctgttgttgttcctgttctgatcgtctctaatggccttaaaaagaaaagtctagatcacagtggggctctaggagggctagtcgttggatttatcctaaccattgcaaatttcagcttttttacctctttgctgatgtttttcttgtcttcttcgaaactcactaaatggaagggagaagtgaagaagcgtctagattcagaatataaggaaggtgggcaaaggaattgggttcaggtgttctgtaatggagctgtacccacagaactggccctgctgtacatgatagaaaatggccccggggaaatcccagtcgatttttccaagcagtactccgcttcctggatgtgtttgtctctcttggctgcactggcctgctctgctggagacacatgggcttcagaagttggcccagttctgagtaaaagttctccaagactgataacaacctgggagaaagttccagttggtaccaatggaggagttacagtggtgggccttgtctccagtctccttggtggtacctttgtgggcattgcatacttcctcacacagctgatttttgtgaatgatttagacatttctgccccgcagtggccaattattgcatttggtggtttagctggattactaggatcaattgtggactcatacttaggggctacaatgcagtatactggtaagaacattccttcattcttgcaacttattggtatgttaaagaaatagggaaaagaaagaaaaaaatgttaacaatgaaaacaaatccaaagacacagggtgttgagggactagaaatgatagggcaaagtctctttcacaattttggttttcttattcttttgtattaaattaattgaaagagaattagtcccgcgcagcaatgattagaagccatgtggggaagatacaatagtgcagagaacagacgtttttgtgtgagccattacctaatcccagaaaagcaagacgtttgggatcagatcattttaatacaattccttccattcattttcctattccatttgaggagtaattgtacaaatctgactatacacacgacctactttcttactgtggtatcatgcttgctattcttgcccctgagttttttgcttcattaagatatatggtcgatgtctgggcacggtggctcacatctataatcccagcactttgggaggccaaggggggcagatcactggaggtcaggagttcgagactagcctggccaacatggtgaaaccccatctctactaaaaatacaaaaattatctggtgtagtggcgcctgcctataatcccagctacttgggaggctgaggcaggagaattgcatgaacctgggaggcggagattgcagtgagccgagatcatgccactgcactatagcctgggcaacagagcaagactccatctc

SEQ ID NO: 193835 - DNA, 506 bp, Homo sapiens
  Payload ID: 18281
  Gene Name: transmembrane protein 19
  ENST ID: ENST00000546795
  CDS Start-End: 1-501
ggggaaatcccagtcgatttttccaagcagtactccgcttcctggatgtgtttgtctctcttggctgcactggcctgctctgctggagacacatgggcttcagaagttggcccagttctgagtaaaagttctccaagactgataacaacctgggagaaagttccagttggtaccaatggaggagttacagtggtgggccttgtctccagtctccttggtggtacctttgtgggcattgcatacttcctcacacagctgatttttgtgaatgatttagacatttctgccccgcagtggccaattattgcatttggtggtttagctggattactaggatcaattgtggactcatacttaggggctacaatgcagtatactgggttggatgaaagcactggcatggtggtcaacagcccaacaaataagaatgggcagttcatgttaaaatcacttttcatggaaagagctctatgtaacagcataataaaactgcctacctagcagca

SEQ ID NO: 193836 - DNA, 593 bp, Homo sapiens
  Payload ID: 18282
  Gene Name: transmembrane protein 190
  Uniprot ID: Q8WZ59
  ENST ID: ENST00000291934
  CDS Start-End: 19-552
ggggtctggggaggtgacatgttgggctgtgggatcccagcgctgggcctgctcctgctgctgcagggctcggcagacggaaatggaatccagggattcttctacccatggagctgtgagggtgacatatgggaccgggagagctgtgggggccaggcggccatcgatagccccaacctctgcctgcgtctccggtgctgctaccgcaatggggtctgctaccaccagcgtccagacgaaaacgtgcggaggaagcacatgtgggcgctggtctggacgtgcagcggcctcctcctcctgagctgcagcatctgcttgttctggtgggccaagcgccgggacgtgctgcatatgcccggtttcctggcgggtccgtgtgacatgtccaagtccgtctcgctgctctccaagcaccgagggaccaagaagacgccgtccacgggcagcgtgccagtcgccctgtccaaagagtccagggatgtggagggaggcaccgagggggaagggacggaggagggtgaggagacagagggcgaggaagaggaggattaggggagtccccgggggactgctcaatacagatacggtggacg

SEQ ID NO: 193837 - DNA, 366 bp, Homo sapiens
  Payload ID: 18283
  Gene Name: transmembrane protein 191B
  ENST ID: ENST00000613597
  CDS Start-End: 1-366
atggaggctgcggaggagctggacgcctggcagagtggccgggaactgtgtgacgggcagcttcgcggagtgcagtacagcaccgagtcgctcatggaggagatggccagggcggaccgagagacgcggctgttcggcggccctcgcgcgctggccatcaggcggtgcgtgctgggcgcgctgcaggtgctgctgacgctgccgctcctcttcctggggctgtcgctgctctggacggtgctgttggaccccggcgccgtctccgcgtggctctggagcctcacctcggagacgacgctgcgccgcctgcgctacacgctgtccccgctgctggagctgcgcgctaacgggctgctgccaacctaa

SEQ ID NO: 193838 - DNA, 1220 bp, Homo sapiens
  Payload ID: 18283
  Gene Name: transmembrane protein 191B
  Uniprot ID: P0C7N4
  ENST ID: ENST00000612978
  CDS Start-End: 180-1220
gatcagtttgcaagtgccatctgcagtgtgggggaaccaatcttcaacttgcctgcatttggtattagtattttattaacctttcattgatccaattacggctctttgacacaattttcatcagtgatggactaagtgtgatccggcctgacccgcctccggccggcgtgagaaggggcatgtgtcgggctacgctcgggcttcccctgccgcccattgtgatccagcccgctaggcgctccctgccgcccattgtgacgcctgccagccgcaggctgggtccccgaggcgggcggcatttaggctcggtctccacagccatggccgcgacgcaggagctgctgctgcagttgcagaaggataaccgagatggtcgccagcggaagcaggagctagagaagctgatgcgcgggctcgaggccgagagcgagagcctcaaccagcgcctgcaggacctgagcgagcgggagcggagcctgctgcggaggcgaagccaggcagcgcagcctctgcaaggggaggcgcgcgaggcggcgcgggagcgcgcggagcgggtgcgcagaagactggaggaggcggagcgccacaaggaggacttggagcagcacagcaggcagctgcaggagcagtgggaggagctgtcgagtcagctcttctacggaggggaaccgcagagccagaagagcacggagcagcaactcgcagcccaattggtgacgctgcagaatgaactggagctggcggagaccaaatgcgccttgcaggaggagaagctgcagcaggacgcgctgcagacagcggaggcctgggccatattccaggagcagaccgtagtcctgcaggtgcggccccactcagacgccaaggtgcctcccgcctctcctcccccagacctggggcggtgtgacgggcagcttcgcggagtgcagtacagcaccgagtcgctcatggaggagatggccagggcggaccgagagacgcggctgttcggcggccctcgcgcgctggccatcaggcggtgcgtgctgggcgcgctgcaggtgctgctgacgctgccgctcctcttcctggggctgtcgctgctctggacggtgctgttggaccccggcgccgtctccgcgtggctctggagcctcacctcggagacgacgctgcgccgcctgcgctacacgctgtccccgctgctggagctgcgcgctaacgggctgctgccaacctaa

SEQ ID NO: 193839 - DNA, 354 bp, Homo sapiens
  Payload ID: 18283
  Gene Name: transmembrane protein 191B
  ENST ID: ENST00000613577
  CDS Start-End: 1-354
gagccagaagagcacggagcagcaactcgcagcccaattggtgacgctgcagaatgaactggagctggcggagaccaaatgcgccttgcaggaggagaagctgcagcaggacgcgctgcagacagcggaggcctgggccatattccaggagcagaccgtagtcctgcaggtgcggccccactcagacgccaaggaggtgcaggtgaaggtgatggaggctgcggaggagctggacgcctggcagagtggccgggaactgtgtgacgggcagcttcgcggagtgcagtacagcaccgagtcgctcatggaggagatggccagggcggaccgagagacgcggctgttcggcggccc

SEQ ID NO: 193840 - DNA, 10012 bp, Homo sapiens
  Payload ID: 18284
  Gene Name: transmembrane protein 192
  Uniprot ID: Q8IY95
  ENST ID: ENST00000306480
  CDS Start-End: 147-962
agccggaggcggggcggacgcaggagggggtgtgtctggggaggggcctggcaggtcccagaaggtggcgagtttcgcggccagaggcttacaggtccaggtggagaggccgggctggccagggcttcggcctccggcgtcgggaaatggcggcggggggcaggatggaggacggttccttggatatcacccagagtattgaagacgacccacttctggatgcccagcttctcccacaccactcattacaagctcactttagaccccgattccatcctcttcctacagtcatcatagtgaatcttctgtggtttattcatctcgtgtttgttgttttagcatttttaacaggtgtgctttgttcttatcctaatccaaatgaggacaagtgcccaggaaattacacaaacccattgaaagttcagacggttataatccttgggaaagttattttgtggattctccatttactccttgaatgctacatccagtatcaccacagcaaaatcagaaaccgaggctataacttgatctaccgatcaacaaggcatctcaagagacttgcgttgatgatacagtcctctggcaacacagtgcttctcctcatactgtgcatgcagcactccttcccagagcctggcagattgtatcttgacctcattctggccatcttggcactggaactcatctgttccctgatatgtctcctcatttacacagtgaaaatccggagatttaataaagctaaaccagagcctgatatacttgaagaagaaaaaatctatgcttaccccagcaatattacctcggagactggattcagaactatttcaagcctagaagaaattgttgaaaagcaaggagacaccattgaatacctgaagcgacacaatgcgctgctgagtaagcgattgttggctctcacttcctcagacctgggctgtcagccaagtagaacgtgagaggctcacggtcatgacagcaattgcagaggaacccagagtaattgagactgactgaccacctgacaagctgccacggggaactgcagcttttgctgaatagcattttacagtgtttgttggaaacctgaatttggttctgacttctgtggctgtttaaaatatagggcttgtgggtcacttgaaaagtacctgtagaagcccggataacttgaggggaatgtctgtttgtacttttggaaattatttaactgcttggtttatcctaggatcagaggctaaacaactccatagtcaacacttttccacctgacattagaaccctgtaatgatttcattatggataggggaagtctaacaagacaatcgattttaaacagggttttaatcaaataagttcttcccacttttaagctgatgaaagaagtcattatttcttgtgaatattttttcctggagagccttatcatgtattttatatgcttatgtggtgttggatgacatcatggaccatatagcttttatagagaatttttctcaccataggactgaggtctcaccaggtgatctactatgcaaattcctacagttttctattcttaagaaataagggctgggcacggcggatcatgaggtcaggaaattgagaccatcctggctaacacggtgaaaccctgtctctactaaaaatacaaaaaaaattagccgagcatggtggcgggcacctgtagtcccagccacctgggaggctgaggcaggagaatggtgtggacccaggaggcggagcttgcagtgagccgagatcacgccactgcactccagcctgggcgacagagcgagactccgtctcaaaaaaacaaaaaagaaaaagaaaagaaataagatatgatgattgattacttggaccagtgttagaccgacctgtgttagacgaacctgtgttgcctattatattggcagcaccttccattagcaatagctgaaaaattcagagaagaatttagaactttcactttatttttgccattcttcaagaagttgctgtatatttcagtctggttataccttcaattgatcaataacttcaattataggaaaggcatcttctataattttaaattactgtaaaaaaaagataccttttaaagccttggattatacttaaaaattgtaatggaagaaatgcatattaagttatatgcagatattaaacatatctgattctgaagataaaactgaagtatttttcagagcaaatggcattatttctccatttttcctagtatgcccctttaatttgtcagtttgctgttagcactgttatatgctgccttagaaagacttttggttgaaggctgaatatgaggggaggggatatttatgactgtgttaatcttttttgatcattagctgaatattcaatatttgatatgtaaccatatagggatgtgttcgatataactatataggcaagggatatattgatttggccacatctatttgacttatggagggcaaatacctgtttcttttagatacagccattgccggggcattctaaaagttttctactaagataaagatgattgtgtatggctgggagcagttgctcatgcctgtaatcttagtactttgggaggctgaggcaggaggatcactcaaggccaggagtttgagaccagcctgggcaacaatgagacactgtctctcaaaaaaaaaaaaaaaagatcgtgtgtcacctgcacacaacattcacaaactaaagccaaattgtatttttaaaatttcctttctcccttccgtttttttttgttttttgggggtttttttttttgttgttgtttttgagacagagtctcaccctgtcgcccaggctggagtgcaatggcgcctttctttctttctttttttttcagacggagtctcgctctgttgcccaggctggagcgcagtagcatgatctcggctcactgcaacctccgcctcccgggattaagaaattctcctacctcagcctgctgagtagctgggattacaggcacatgccaccatgcctggctaatttttgtatttttagtacaggcggggtttcaccatgctggccaggctggtctcaaactcctgaccttttgatccgccctccttggcctcccaaagtgttgggattacaggcatgagccactgtgcccggccttcctttctttttaataagtgtatgtatctcaaagccattgccttctctagaaatctgtttctctgttctggaagagcctataaactttgccttcagttgtttttcttttcaaaagggaacaccagtggtagatgattaactcttatttatttttaaaatttaatttggatctatagtcagtatctgagatttataggatgaactttggtttacaaggaacagtgtagttaaaaagttagggtgcctatgttcttatgtaatcatcaacatgtttgttgtataatcatcaacatttttctgaatgcaatgatgaacatttcaaacaataaatgaaaatgaaactaagtatcagaagtagcaaaacagctgatgcagtggcttacgcctgtaatcccagcacttcgggaggctgaggcaggtggatcacctgaggttaggagctcaagaccagcctggccaacatagtaaaaccccatctttactaaaaatacaaaataagccaggcatggtggcacgcatctgtaatcccagctactcaggaggctgaggcaggagaatcgcttgaacacaggaggcagaggttgcagtgagctgaaattgcaccactgcattccagcttgggcaacagagctagactcgatctcaaaaaaaaaagaagtaacaaaacagaaaaatgaacaaaacaatttaaatgttaaacattctattcaccaggctggtaattgtgctagcactgaggatacaaaaattaaagactctggttggcagcttacattctaaagagagcgaggaatagatttccagactctgtgctaagtgcagtaatgacagtaggcccaacatgctgtaggagctccacgtcagggggtaccctgggggcaggagggtagagggttttaagaatgtcagacagaacaatgagtaaagtaggaaggcaaatagctacaaaatatcacaagcactgtgtatagctggaaccaaaagtgtgaggcaggacctgggtggagaggtagacagggtcagagcttggagggccttgatactatgctggaagactgcactttatcttgttgataatgggatcctctgaagcatttcaagcaaggaagtgacaatgtcagttttagtttcagcaggatcagatggtagttcaatatggaggaaatatgtgtggcagaaagatatggccctgaactagggcaggtatagtaaaccttttattataagtatgtatgtgtataggtatatagatagatataggtatatatgtatgtatatgtattccaaatgacaacagtatcatgacttattataaagttaaaagctcattttttaaaaaatggcaatatggaaaaatataaagcaaaacaattatttgaaatctcactaccaagggattataccaatgtacactttttttgttttgtttttttttttagtctcatctgtctcccaggctggagtgcagtggtgtgatctgggctcactgcaacctccttctaccgggttcaagcaattctcctgcctcagcctcccaagtagctagtactacagatgcatgccactattttttagtacaaaaatattaaaaatttgggtcgggtgtggtagcttacgcctgtaataccagcactttgggaggccaaggtgggtggatcacaaggtcaggagttagagaccagcctggccaagatggtgaaaccccatctctactaagaatacaaatatcagccaggtgtggtgcagggtgcctgtaatcccagctactctggaggctaaggcaggagaattgcttgaacccagcaggtggaggttgcagtgaggcaagatcacgccactgtactctagcctgggccacagagcaggctccatctcaaaaaaaaaaaaaaatactaaaaattttgtatttcggctgggcacggtggctcacacctgtaatctcagcactttgggaggccgaggcggacagatcacgaggtcagcagatcgaggccatcctggccagcatggtgaaaccctatctctacaaaaaatacaaaaatattagcaacattagctgggtgtggtggtgcgcgcctgtaatcccagctactcaggaggctgaggcaggagaattgcttgagcctgggaggcagagattgcagtgaaccaagatggtgccactgcactccagcctggcgacagagcagagcgagactccatcacaaaaaaaaaaaaagaaagaaaagaaaaaaaattgtatttctagtagagacggggattcaccatgttggccaggctgatcttgaattccttacctcaggtgatccacctgctttggcctcccaaaatgctgggattataggcatgagccagctcacctggtctccatacccttaccaatagtgggtgttaccttatttaagtcttgacccatctgatgagtgtgtcattgtttcaaattgtatttctttggatactaatgaagtgttaaacattttttccaaattatatggtcttttataaatcttttatgacatgtatattcaagtcctttgcttattattgtcccaggatattctttttcttaacaactagaatcttctggttgggcgtggtggctcccgcctgtaatcccagcactttgggaggccaaggcaggcagatcacttgaggtcaggagttcgagaccagcctgaccaacatggagaaaccccatttctactaaaaatacaaaattaaggctgggcgcagtggctcacaccggtaattccagcactttgggaggccgaggcaggcggatcatgaggtcaggagttcgagaccagcctgaccaacatggagaaaccccgtctctactaaaaatacaaaatagccaggtgcagtgaagtgcacctgtaatcccagctactcaggaggctgaggcaggagaattgcttgaacccgggaggtggaggttgcagtgagccgagatcgcaccactgcactccagcctgggtgacagagcgagactctgtctcaataaataaataaataaataaataaatcttgaatacaaaactcacatctggtaaactcttgagttcttgaagaatcaaactttgaatatgtgacaatcacaaatttgagatctcaaaacattctctaggtttcctaaggaaaattgtttcattcgcaaaccagggaagcctatctctaattcttctcccttcctctctatccagtctcacctttcactctactactctactgaaactgttcttggcaaggtcaccaatagcttccttccacattgcttaaattggagatgaatgcatacgtctcctcttttaacttatcagcaacacttggctcagttgattgagggggggtctgcccctccacacctgtgggtatttctcgtcaggtgggacgagagactgagaaaagaaataagacacagagacaaagtataaagaaagaacagtgggcccaggggaccagcacacccagcatgcgaggacctgcaccggcgccggtctcttgagttctgttagtatttattgatcattatttttaatatcttgacgaggggagtgtagcggggcaacaggtggggagaaggtcagcagggaaacgtgagcaaaggaatctgtatcatgaataagttcaaggaaaggtactgtgtccggatgtgcatgtaggctagatttacgtttctctttacacaaacatttcagtgtagcaaagagtaacagagcagtattgctgccagcatatctcgcctccagccacagggcagttttctcctatctcagaatagaacgaatgggaatggtcagctttacaccgagacattccattcccagggacgagcaggagacagaagccttcctcttatctcaactgcaaagaggcctccctctttcactactcctcctcagcacagaccctttacaggtgtcgggctgggggatggtaaggcctttcctttcccacgaggccgtatctcaggctgtctcagtgggaggaaaccttggacaatacccaggctttcttgggcagaggtccctgcggctttccgcagtgcattgtgtccctggttaatcgagaatggagaaaggcgatgacttttaccaagcataccacctgcaaacatattgttaacaaggcacatcctgcacagccctaaatccattaaactgatccaatacagcacatgtttctgtgagcacagggttggggctaaagttataggttaacagcatctcaaagcagaaacaatttttcttagtacagatcaaaatggagtttcttatgtcttctttttctacatagacacagtaacaatctgatctctctcttttccccacagttgatcacttcctccttgactctttatttcagcttggcttccaggacactacattctcctcattttcttctacttcactagcttcttcttttgtctgctttgcaagttgctttttgttggtattctccagggctcaacccctgggcctcttggcttctccatcagcgttcactctcttggtggtctcacacaatctcatgactttgatagaatttatgagctgataatttccaaatgtgaatcttcagccaggccttcctccctgaactccagacttatgtgtccaactgccccttctagatcactacttgggtatataaaaaaacacctcaaacagaacatgtccccagctgagctatctgccacagtctcttccacccctgtaatggcagctcctctttctctcaaaccctatagacagttaatcagcaaatcctgctggcttttcctttaaaacatacccagagtccaaccaattcttggcacccccaatgctacttccccagccactataatcttcacctggactattataatagtctttcggttttttggttttgttttttttttttgggggagggagtctcgctctgttgcccaggctggagtgcagtggcgcgatctgggctcactgcaacctccgcctcccaggttcaagtgattctcttgcttcagcctcctgagtagctgggattaccggcacataccaccacacccagctaatttttttatatttttagtagaaagggggtttcaccatgttagccaggctggtcttgaactccggacctcaggtcatccacccgccttggcctcccaaagtgctgcaattacaggcatgagtcactgtgcctggccctattataatagtgtttttctttttctttttctttctttcttttttcttgagatggagtctcactcgtgtcgcacaggctggagtgcagtggcgcagtctcggctcactacaacctccgctgcccaggttcaagcaattctccttcctcagcctcctgagtagctgggattataggtgtgctttttttatttttagtagagacgaggtttcaccatgctgactaggctggtctggaactcctgacctcatgatcctccctccttggcctcccaaagtactgggattacaggcatgagccaccacacctggcctataagagtcttttaagtgatctttctgcttctcactacctctccaccctgaccccccagccccatgcacacacacaaaaagcagccaacaatatccttctaaaacactactctgatggttccctttttcattcagtaaaagccaaagcctggacagtggccttcagggacctagaaaatctccacttcccaccccaccccacctcctctctcctactcttcctttgtgtaccctgcgtcggtcacactgtggcttttggattgctaagcacattcttacctgaggacctttgcggttgctgttccctctgcctggaaggatcaactcccatatatctttttcaagtctttgttcaaatgtcacttgtggccaggtgtggtggctaacccctgtaatcccagcactttgggaggctgaggtgggtggatcacttgaggtcaggagttgggagaccggcctggccaacacgatgaaaccctgtctctactgaaaatacaaaaattagccaggcgtggtggcacgtgtctgtaatcccagctattcaggaggctgaggcaggagaatcacttgaacctgggaggtggaggttgcagtgagccaagatcgcacagctgtactccagcctgggtgacaagagtgagaatccgtcccccccccaaaaaaaaaaaatcctcccacttcagtcagcctcctgagtagctgggattatagatgtgcaccacaccaccacacgtaacttttattatagtatattgctataattattctattttgttattaatgttgttactctctgtgcctaatttataaatttaactttattgtagttatgtgtggataggaaaaaatatagtgttcgtagggtttagtactatctgtggctccaggcatcacctgaggtcttgcaatgattcccctgcagacctgtggctccaggcatcacctgaggtcttgtaatgtttcccctgtagataaggggaaaatactgcatgtaacttacttgtttactttgtctgtgtctcctgatagaatgtaagctctatcttttgcttactactgtgtccttcatacatagaacagtgtctggcacaaagtaggcactcaatatacgttgatgaattaatgtcactaacttcagtgatttcactactggaattgtagtagaaaaactatgctcacacatgctcaaagcctgttcctgtaatccagctgtaacctgggctctgttttcactttctgtttatgatgtcctgaactgagagattatttttttaaggtcttgtttaaaagtttatgtctaggatacactaaaaaataacaacatatcagaaataaaagagataagactgcta

SEQ ID NO: 193841 - DNA, 789 bp, Homo sapiens
  Payload ID: 18284
  Gene Name: transmembrane protein 192
  ENST ID: ENST00000505095
  CDS Start-End: 536-789
tggcgagtttcgcggccagaggcttacaggtccaggtggagaggccgggctggccagggcttcggcctccggcgtcgggaaatggcggcggggggcaggatggaggacttgagaaaatggaaaattaactgtaagacctggttccttggatatcacccagagtattgaagacgacccacttctggatgcccagcttctcccacaccactcattacaagctcactttagaccccgattccatcctcttcctacagtcatcatagtgaatcttctgtggtttattcatctcgtgtttgttgttttagcatttttaacaggtgtgctttgttcttatcctaatccaaatgaggacaagtgcccaggaaattacacaaacccattgaaagttcagacggttataatccttgggaaagttattttgtggattctccatttactccttgaatgctacatccagtatcaccacagcaaaatcagaaaccgaggctataacttgatctaccgatcaacaaggcatctcaagagacttgcgttgatgatacagtcctctggcaacacagtgcttctcctcatactgtgcatgcagcactccttcccagagcctggcagattgtatcttgacctcattctggccatcttggcactggaactcatctgttccctgatatgtctcctcatttacacagtgaaaatccggagatttaataaagctaaaccagagcctgatatacttgaagaagaaaaaatctatgcttaccccagcaatattacctcggagactggattcag

SEQ ID NO: 193842 - DNA, 2225 bp, Homo sapiens
  Payload ID: 18284
  Gene Name: transmembrane protein 192
  Uniprot ID: Q8IY95
  ENST ID: ENST00000506087
  CDS Start-End: 184-987
accaaagaaaaaagacacctgtgcctggcaggtcgatacgctactaatttgcccgaggtacgaacgaaacagaagatgctgatttctggataaaacgttctgcagtgccaggctgcagtgtgttctactgaatgcatgtaccataatttacttaattatctgggctgattctgaatttctattatgaacaaagccacaggttccttggatatcacccagagtattgaagacgacccacttctggatgcccagcttctcccacaccactcattacaagctcactttagaccccgattccatcctcttcctacagtcatcatagtgaatcttctgtggtttattcatctcgtgtttgttgttttagcatttttaacaggtgtgctttgttcttatcctaatccaaatgaggacaagtgcccaggaaattacacaaacccattgaaagttcagacggttataatccttgggaaagttattttgtggattctccatttactccttgaatgctacatccagtatcaccacagcaaaatcagaaaccgaggctataacttgatctaccgatcaacaaggcatctcaagagacttgcgttgatgatacagtcctctggcaacacagtgcttctcctcatactgtgcatgcagcactccttcccagagcctggcagattgtatcttgacctcattctggccatcttggcactggaactcatctgttccctgatatgtctcctcatttacacagtgaaaatccggagatttaataaagctaaaccagagcctgatatacttgaagaagaaaaaatctatgcttaccccagcaatattacctcggagactggattcagaactatttcaagcctagaagaaattgttgaaaagcaaggagacaccattgaatacctgaagcgacacaatgcgctgctgagtaagcgattgttggctctcacttcctcagacctgggctgtcagccaagtagaacgtgagaggctcacggtcatgacagcaattgcagaggaacccagagtaattgagactgactgaccacctgacaagctgccacggggaactgcagcttttgctgaatagcattttacagtgtttgttggaaacctgaatttggttctgacttctgtggctgtttaaaatatagggcttgtgggtcacttgaaaagtacctgtagaagcccggataacttgaggggaatgtctgtttgtacttttggaaattatttaactgcttggtttatcctaggatcagaggctaaacaactccatagtcaacacttttccacctgacattagaaccctgtaatgatttcattatggataggggaagtctaacaagacaatcgattttaaacagggttttaatcaaataagttcttcccacttttaagctgatgaaagaagtcattatttcttgtgaatattttttcctggagagccttatcatgtattttatatgcttatgtggtgttggatgacatcatggaccatatagcttttatagagaatttttctcaccataggactgaggtctcaccaggtgatctactatgcaaattcctacagttttctattcttaagaaataagggctgggcacggcggatcatgaggtcaggaaattgagaccatcctggctaacacggtgaaaccctgtctctactaaaaatacaaaaaaaattagccgagcatggtggcgggcacctgtagtcccagccacctgggaggctgaggcaggagaatggtgtggacccaggaggcggagcttgcagtgagccgagatcacgccactgcactccagcctgggcgacagagcgagactccgtctcaaaaaaacaaaaaagaaaaagaaaagaaataagatatgatgattgattacttggaccagtgttagaccgacctgtgttagacgaacctgtgttgcctattatattggcagcaccttccattagcaatagctgaaaaattcagagaagaatttagaactttcactttatttttgccattcttcaagaagttgctgtatatttcagtctggttataccttcaattgatcaataacttcaattataggaaaggcatcttctataattttaaattactgtaaaaaaaagataccttttaaagccttggattatacttaaaaattgtaatggaagaaatgcatattaagttatatgcagatattaaacatatctgattctgaagataaaactg

SEQ ID NO: 193843 - DNA, 3975 bp, Homo sapiens
  Payload ID: 18285
  Gene Name: transmembrane protein 196
  Uniprot ID: Q5HYL7
  ENST ID: ENST00000405764
  CDS Start-End: 698-1216
gaggaagaggacgacgacgagggagaagaaacccagacggaaagaggccatcagacaaggtcgctttttctggcgacaaagcaactgcaaggagcgtggtgctgaatatcatccgcccgctctgcctggggacccagagacttgcagaagcacttcgcattgccacgaaaacaaaggagaggtgacgaacgggagagggagagagaaactcggagcggttccctttggatctccgggaagcaaagctcctctcctcggcaataaaacagaagggaccctgtgaaagggtctagtaggctgaggagggcgcgggtttccctgcggagatttgggacgcggcagaactctggacagcgcctggggagcaaggctcggagctccctgggctcctccaggttttccgctgcttaaaagccccggtaccggtgtgcaatcttcgcaccaccgaacccaggaagatccttctacgatccctatctgaacgtgccagggggtggagcagctcctttgcctctggcccagccagggaaggtcttcgtttctggaaatccagcccttgtggataatgcctcgctcttgaagaaagaaaagttttgggatctggtagggggtggaaggggtaaggaggatagtggaagaaaaaaaggtagatggttgatttccctctctgatctggaaggaagatgaccgaggaaggatgtgcaccagcggtcagattattgggagcctcttggtgctctccgtgctggagatagggctgggggtgtccagcgtggccgtgggggcggtcagcttcagcctggccctccgagagcacaagccgcagctcggagactcgtccccgtttcttctttgtggcatttgtggaatattgtgtgccaaaaaaaaatcaggacttgtcatgatcctcttttcagcctgctgtatctgtggacttattgggggcatcctgaattttcagttcctccgggcagtcacaaagaaaacttcctccctatacccactgcaccttgcctccatgtctctcgcgtgcattgggatcgggggctgcactctctcttcctggctcacttgtcgactagccagttatgaacagaggaggatgttctcagaaagggagcattccctgcatcactctcatgaaatggctgagaaagaaataacagacaacatgagcaatggaggaccacagctgatatttaatggaagagtgtaatcaatgttttaaagaattgaacactttttaggattttcatgaggcaatgagacaccaaaggactagaaaataaaacagtttttgcatttgcatttatctctcctgagcatccactaaaattattcttcctaaaaaatatattgcctcactggtttctccacccttttttatggggtaaaaaactttccagaaacattctagtacaataatttcaagaggctttccagattgttctaaagaagacttttcaggaaaaagagataataaaacagaaataaaatgcatattctatacaaacactatttgactagcatgattattatatttgtaatgacatatttcatatgagtaattgaaaagtgcaaatatcaagaaataaaaataacttattgacgtctttgttctgaaagacagatggcttcaaggatgctacaattcaaaacctcagtaatgccttgttataaaaacattgtaattattttcaacttgtgaatgaaatatatttcataatttatttgtaaatgacaaaaaacctcaagcataaaaaagagactttttagagagagagaatactaatctatatggtatttttgcatttttgcacaaagagtgaaaagttatatgtgaatatcatttaagaaaataaacatgttttgatcatactgtgcagattgatctgcatgttcatgaatgagcctaagaataaagtatgtgtgtgaatgtgtgtatacatactgtaaatatagaacatgtatacagcatatattatagcatacatgaatgtaaataggtattagaaaagaaattgtgatgctgtgggggtattattaagattctactccaatagaaatgggaaggcaattgctcaaggcccttctatgcccacaaaatcacatgtttaatttctactaaaattgcccatttttcttcttttaattaggttttgtgtaaatatcattgtgggtgatatttatgaagatgagtgatctgaatagtgtagtatacagatagactacttatttgactatttcactatgattatagtatttatgtatagcaattaaaattaatttataaacgaacatgactttaatgacatacttccgtatttataaagatatcatgacttaaaattattgatgatattgatatttcaaacaccttgcagtccagttaaatgatacaaaagggcagatgatgtaaccccccaacaatgaagttataattacctttgctgtaatctaatttaggtgttttgttttacgattctcatgaaataatataggcagtccatatataagaaagcctatatccaaagatcctgaaagaattctttgaggaaaaagtgaaaagataggctaacatttgtatagctagattcaatcctttcctctaataatggaatgttaaaatagcaaacaagaacaacacatataagtgaaaaaacaacatatatctgaatatatttatcagaatataacctctggcaacagacaaagaaatctatcatttttaaatacataactctcactatattgtatacttttctttttcctcaaatctaatcaattttcaagtcattttttatgagttacttgttgaaccataggtaaattaaaatatttactgttcagtatgagaatataatttataaacaaaacatgagttttaattgtgctaacacagtaatgatcattcaagttaatgaaaatttgaaggtcttttatagcaacatgatcatcgtttaacctatttaaatcagctcacttaaaattctggctgtcatctattcaacagaaataactggactctgcttgtttggtgcactttttgaagtctcccaattcctttggataacttcattgcctagtagattacagaagttgtccataaatgcaacctcatatagtgaatcaacatcataactattcattcaatgccacaaacaggcatgatctttgccaatgaaaatctaaattacatcatgaagatatttgtgtgtgtatggtcctcctgaattcatgcaaggatgtagttttgtactgaaagaataaacactgactctaattttcagtagcatttctctataaacatgcttgttcaatacaaaattataatacatcagaaaaatgttgtaatgccttttgaactgatctataacataacacattaaaggacaaaaggagacatatcactgctttgatgtatagttaaaaagagatgccatcatcacaattattcaaatagtttacagtgtatgtttaaccaagtatagatatatttttaaatatgattatttctacctagtattttcagaattgagtttagaatgatttacttgggatgtgcggcgattcttttttagataagtgggggatgttaggaagacattgttcaagtgcttgaaactttaatttggacaatacattgaaccacatgctggaatgttttaagtgactaccttatagttttagtatgagcctacccttggaagaaagtaaggtgatactaaattagaaaaactatgtgaaactggagtggtggtatactttggaccatatcaaataggtagagtattataagcataaaagaataaaattgggctcgctttggaaattttaaacatatatgtgtatgtgtgtatatatatgcatatacatacacatatgtgtatatacacacacacaatggtttggaagtggaacaggaaatgataactctactgacatgtctataataaaatgatgtgctttgaaact

SEQ ID NO: 193844 - DNA, 4054 bp, Homo sapiens
  Payload ID: 18285
  Gene Name: transmembrane protein 196
  ENST ID: ENST00000405844
  CDS Start-End: 697-1236
aggaagaggacgacgacgagggagaagaaacccagacggaaagaggccatcagacaaggtcgctttttctggcgacaaagcaactgcaaggagcgtggtgctgaatatcatccgcccgctctgcctggggacccagagacttgcagaagcacttcgcattgccacgaaaacaaaggagaggtgacgaacgggagagggagagagaaactcggagcggttccctttggatctccgggaagcaaagctcctctcctcggcaataaaacagaagggaccctgtgaaagggtctagtaggctgaggagggcgcgggtttccctgcggagatttgggacgcggcagaactctggacagcgcctggggagcaaggctcggagctccctgggctcctccaggttttccgctgcttaaaagccccggtaccggtgtgcaatcttcgcaccaccgaacccaggaagatccttctacgatccctatctgaacgtgccagggggtggagcagctcctttgcctctggcccagccagggaaggtcttcgtttctggaaatccagcccttgtggataatgcctcgctcttgaagaaagaaaagttttgggatctggtagggggtggaaggggtaaggaggatagtggaagaaaaaaaggtagatggttgatttccctctctgatctggaaggaagatgaccgaggaaggatgtgcaccagcggtcagattattgggagcctcttggtgctctccgtgctggagatagggctgggggtgtccagcgtggccgtgggggcggtcagcttcagcctggccctccgagagcacaagccgcagctcggagactcgtccccgtttcttctttgtggcatttgtggaatattgtgtgccaaaaaaaaatcaggacttgtcatgatcctcttttcagcctgctgtatctgtggacttattgggggcatcctgaattttcagttcctccgggcagtcacaaagaaaacttcctccctatacccactgcaccttgcctccatgtctctcgcgtgcattgggatcgggggctgcactctctcttcctggctcacttgtcgactagccagttatgaacagaggaggatgttctcagaaagggagcattccctgcatcactctcatgaaatggctgagaaaagattgagggctattgaaataaccgacttgcccagctgcccggtggtgcccccgacaccagagttacctacaaggaaataacagacaacatgagcaatggaggaccacagctgatatttaatggaagagtgtaatcaatgttttaaagaattgaacactttttaggattttcatgaggcaatgagacaccaaaggactagaaaataaaacagtttttgcatttgcatttatctctcctgagcatccactaaaattattcttcctaaaaaatatattgcctcactggtttctccacccttttttatggggtaaaaaactttccagaaacattctagtacaataatttcaagaggctttccagattgttctaaagaagacttttcaggaaaaagagataataaaacagaaataaaatgcatattctatacaaacactatttgactagcatgattattatatttgtaatgacatatttcatatgagtaattgaaaagtgcaaatatcaagaaataaaaataacttattgacgtctttgttctgaaagacagatggcttcaaggatgctacaattcaaaacctcagtaatgccttgttataaaaacattgtaattattttcaacttgtgaatgaaatatatttcataatttatttgtaaatgacaaaaaacctcaagcataaaaaagagactttttagagagagagaatactaatctatatggtatttttgcatttttgcacaaagagtgaaaagttatatgtgaatatcatttaagaaaataaacatgttttgatcatactgtgcagattgatctgcatgttcatgaatgagcctaagaataaagtatgtgtgtgaatgtgtgtatacatactgtaaatatagaacatgtatacagcatatattatagcatacatgaatgtaaataggtattagaaaagaaattgtgatgctgtgggggtattattaagattctactccaatagaaatgggaaggcaattgctcaaggcccttctatgcccacaaaatcacatgtttaatttctactaaaattgcccatttttcttcttttaattaggttttgtgtaaatatcattgtgggtgatatttatgaagatgagtgatctgaatagtgtagtatacagatagactacttatttgactatttcactatgattatagtatttatgtatagcaattaaaattaatttataaacgaacatgactttaatgacatacttccgtatttataaagatatcatgacttaaaattattgatgatattgatatttcaaacaccttgcagtccagttaaatgatacaaaagggcagatgatgtaaccccccaacaatgaagttataattacctttgctgtaatctaatttaggtgttttgttttacgattctcatgaaataatataggcagtccatatataagaaagcctatatccaaagatcctgaaagaattctttgaggaaaaagtgaaaagataggctaacatttgtatagctagattcaatcctttcctctaataatggaatgttaaaatagcaaacaagaacaacacatataagtgaaaaaacaacatatatctgaatatatttatcagaatataacctctggcaacagacaaagaaatctatcatttttaaatacataactctcactatattgtatacttttctttttcctcaaatctaatcaattttcaagtcattttttatgagttacttgttgaaccataggtaaattaaaatatttactgttcagtatgagaatataatttataaacaaaacatgagttttaattgtgctaacacagtaatgatcattcaagttaatgaaaatttgaaggtcttttatagcaacatgatcatcgtttaacctatttaaatcagctcacttaaaattctggctgtcatctattcaacagaaataactggactctgcttgtttggtgcactttttgaagtctcccaattcctttggataacttcattgcctagtagattacagaagttgtccataaatgcaacctcatatagtgaatcaacatcataactattcattcaatgccacaaacaggcatgatctttgccaatgaaaatctaaattacatcatgaagatatttgtgtgtgtatggtcctcctgaattcatgcaaggatgtagttttgtactgaaagaataaacactgactctaattttcagtagcatttctctataaacatgcttgttcaatacaaaattataatacatcagaaaaatgttgtaatgccttttgaactgatctataacataacacattaaaggacaaaaggagacatatcactgctttgatgtatagttaaaaagagatgccatcatcacaattattcaaatagtttacagtgtatgtttaaccaagtatagatatatttttaaatatgattatttctacctagtattttcagaattgagtttagaatgatttacttgggatgtgcggcgattcttttttagataagtgggggatgttaggaagacattgttcaagtgcttgaaactttaatttggacaatacattgaaccacatgctggaatgttttaagtgactaccttatagttttagtatgagcctacccttggaagaaagtaaggtgatactaaattagaaaaactatgtgaaactggagtggtggtatactttggaccatatcaaataggtagagtattataagcataaaagaataaaattgggctcgctttggaaattttaaacatatatgtgtatgtgtgtatatatatgcatatacatacacatatgtgtatatacacacacacaatggtttggaagtggaacaggaaatgataactctactgacatgtctataataaaatgatgtgctttgaaactatatat

SEQ ID NO: 193845 - DNA, 768 bp, Homo sapiens
  Payload ID: 18285
  Gene Name: transmembrane protein 196
  Uniprot ID: Q5HYL7
  ENST ID: ENST00000433641
  CDS Start-End: 90-359
agcccagaaaggagccacggggagaagcggagtttcttctttgtggcatttgtggaatattgtgtgccaaaaaaaaatcaggacttgtcatgatcctcttttcagcctgctgtatctgtggacttattgggggcatcctgaattttcagttcctccgggcagtcacaaagaaaacttcctccctatacccactgcaccttgcctccatgtctctcgcgtgcattgggatcgggggctgcactctctcttcctggctcacttgtcgactagccagttatgaacagaggaggatgttctcagaaagggagcattccctgcatcactctcatgaaatggctgagaaaattgagggctattgaaataaccgacttgcccagctgcccggtggtgcccccgacaccagagttacctacaaggaaataacagacaacatgagcaatggaggaccacagctgatatttaatggaagagtgtaatcaatgttttaaagaattgaacactttttaggattttcatgaggcaatgagacaccaaaggactagaaaataaaacagtttttgcatttgcatttatctctcctgagcatccactaaaattattcttcctaaaaaatatattgcctcactggtttctccacccttttttatggggtaaaaaactttccagaaacattctagtacaataatttcaagaggctttccagattgttctaaagaagacttttcaggaaaaagagataataaaacagaaataaaatgcatattctat

SEQ ID NO: 193846 - DNA, 775 bp, Homo sapiens
  Payload ID: 18285
  Gene Name: transmembrane protein 196
  ENST ID: ENST00000422233
  CDS Start-End: 90-425
agcccagaaaggagccacggggagaagcggagtttcttctttgtggcatttgtggaatattgtgtgccaaaaaaaaatcaggacttgtcatgatcctcttttcagcctgctgtatctgtggacttattgggggcatcctgaattttcagttcctccgggcagtcacaaagaaaacttcctccctatacccactgcaccttgcctccatgtctctcgcgtgcattgggatcgggggctgcactctctcttcctggctcacttgtcgactagccagttatgaacagaggaggatgttctcagaaagggagcattccctgcatcactctcatgaaatggctgagaaaagattgagggctattgaaataaccgacttgcccagctgcccggtggtgcccccgacaccagagttacctacaaggaaataacagacaacatgagcaatggaggaccacagctgatatttaatggaagagtgtaatcaatgttttaaagaattgaacactttttaggattttcatgaggcaatgagacaccaaaggactagaaaataaaacagtttttgcatttgcatttatctctcctgagcatccactaaaattattcttcctaaaaaatatattgcctcactggtttctccacccttttttatggggtaaaaaactttccagaaacattctagtacaataatttcaagaggctttccagattgttctaaagaagacttttcaggaaaaagagataataaaacagaaataaaatgcatattctatacaaa

SEQ ID NO: 193847 - DNA, 687 bp, Homo sapiens
  Payload ID: 18285
  Gene Name: transmembrane protein 196
  Uniprot ID: Q5HYL7
  ENST ID: ENST00000493519
  CDS Start-End: 151-465
agagagaaactcggagcggttccctttggatctccgggaagcaaagctcctctcctcggcaataaaacagaagggaccctgtgaaagggtctatttcttctttgtggcatttgtggaatattgtgtgccaaaaaaaaatcaggacttgtcatgatcctcttttcagcctgctgtatctgtggacttattgggggcatcctgaattttcagttcctccgggcagtcacaaagaaaacttcctccctatacccactgcaccttgcctccatgtctctcgcgtgcattgggatcgggggctgcactctctcttcctggctcacttgtcgactagccagttatgaacagaggaggatgttctcagaaagggagcattccctgcatcactctcatgaaatggctgagaaagaaataacagacaacatgagcaatggaggaccacagctgatatttaatggaagagtgtaatcaatgttttaaagaattgaacactttttaggattttcatgaggcaatgagacaccaaaggactagaaaataaaacagtttttgcatttgcatttatctctcctgagcatccactaaaattattcttcctaaaaaatatattgcctcactggtttctccacccttttttatggggtaaaaaactttccagaaacattctagtacaataatttcaagaggctt

SEQ ID NO: 193848 - DNA, 2393 bp, Homo sapiens
  Payload ID: 18286
  Gene Name: transmembrane protein 198
  Uniprot ID: Q66K66
  ENST ID: ENST00000344458
  CDS Start-End: 586-1668
ctccccgcagagcagagccagcggcccgagccgaatccccggagccgcgcctcgattcccctccagcagctgctctgggctgcgcagggttcttgcgctcggcactggagcctcagccgcggccgcagctgtccgacgtgtcactgcaagggccccgcccccggggtggggtctcgggctctcgctaccggagagggaggagaagggggaggttaaaggggaaggacccccggaagtgccccctcctcagtgcgggagagggagacgccgggggcggagtcccctgcctcccgcggcgtggttggtgcgtcccatgtgacgtcagaagcagcccgcccctgcctggatggcccagcccgagttcccggacgccgcgggactggagtgccagccggtgttggacgtggagcggcgccgccaccgcgccgacaccattctctccggcccagcagcccccttcctcgcacgacggactttccctggaccccagtcagttggagcctctggcgccccgcaaccccggcccctcgggcctctgcacagcctctttcactcagaagctcaggtcgcctccagcccagcactatgccggggactgtggcaacactgcggttccagctgctgccccctgagccagatgatgccttctggggtgcaccttgtgaacagcccctggagcgcaggtaccaggcactgccggccctcgtctgcatcatgtgctgtttgtttggagtcgtctactgcttcttcggttaccgctgcttcaaggcagtgctctttctcactgggttgctgtttggctcggtggtcatcttcctcctctgctaccgagagcgggtgctagagacacagctgagtgctggggcgagcgcgggcatcgctctgggcatcgggctgctctgcgggctggtggccatgctagtgcgcagcgtgggcctcttcctggtggggctgctgctcggcctgctgctcgcagctgctgccctgctgggctccgcaccctactaccagccaggctccgtgtggggtccactggggctgttgctggggggcggcctgctctgtgccctgctcactctgcgctggccccgcccactcaccaccctggccaccgccgtgactggtgctgcgctgatcgccactgccgctgactacttcgccgagctgctactgctggggcgctacgtggtggagcgactccgggctgctcctgtgcccccactctgctggcgaagctgggccctgctggcactctggcccctgctcagcctgatgggcgttctggtgcagtggagggtgacagctgagggggactcccacacggaagtggtcatcagccggcagcgccgacgcgtgcaactgatgcggattcggcagcaggaagatcgcaaggagaaaaggcggaaaaagagacctcctcgggctcccctcagaggtccccgggctcctcccaggcctgggccaccagaccctgcttatcggcgcaggccagtgcccatcaaacgcttcaatggagacgtcctctccccgagctatatccagagcttccgagaccggcagaccgggagctccctgagctccttcatggcctcacccacagatgcggactatgagtatgggtcccggggacctctgacagcctgctcaggccccccagtgcgggtatagccatatctgtctgtctagactctgcagtcaccagctctgccagctcgaggaggcctgctaggctgccactcagcctcctggctttggctgtccctctccccagcctggagagggctggcctggtcactagaagggaggattgtctcaggcgagtcttggcctgagaggaaagccccctcccaagctcccaagaggctcctgaggaactcggggtgtgaaccccattggggtgtgctcagggttgtgagtgtgttgcccgtgtgtctgtgtgtatgtgtgtgggggtgggcaggcttggaggggacgctgggacccttgccttagatttctgactggtagggtttctccaggctcagccccacctcttcactccctgccaaggtcccatgggccacctcctgcatgtctccgcggaggggctaccttccttcccatcgccctgcctcgcagccagactcatctaagggttcttgtccttgtctatggggcaaactgtagcatccctcaccctggtcccctggcctctgtaaagccaccagcctgagggcagtggcaggagatgggggtgggggggtgctgctctgggctgggttgggaagggagttggggaggggtttaaatgcacggtgcatgtctggtgtctgtcatgccaacctagacacctcatgcttctgtctcccccaccccactctgttttacatcttttataaatgtgccaaactgtg

SEQ ID NO: 193849 - DNA, 2218 bp, Homo sapiens
  Payload ID: 18286
  Gene Name: transmembrane protein 198
  Uniprot ID: Q66K66
  ENST ID: ENST00000373883
  CDS Start-End: 395-1477
gtgacgtcaggagcagaggccggagctgtccatcagcaccaaaggccgcgggcgggctcagggcatggggccgcggttctggggcggcccgagccccggctcctgcgccttccccttcctcaggcccagcccgagttcccggacgccgcgggactggagtgccagccggtgttggacgtggagcggcgccgccaccgcgccgacaccattctctccggcccagcagcccccttcctcgcacgacggactttccctggaccccagtcagttggagcctctggcgccccgcaaccccggcccctcgggcctctgcacagcctctttcactcagaagctcaggtcgcctccagcccaggttaacttgggagggtgactcccttctattcccagcactatgccggggactgtggcaacactgcggttccagctgctgccccctgagccagatgatgccttctggggtgcaccttgtgaacagcccctggagcgcaggtaccaggcactgccggccctcgtctgcatcatgtgctgtttgtttggagtcgtctactgcttcttcggttaccgctgcttcaaggcagtgctctttctcactgggttgctgtttggctcggtggtcatcttcctcctctgctaccgagagcgggtgctagagacacagctgagtgctggggcgagcgcgggcatcgctctgggcatcgggctgctctgcgggctggtggccatgctagtgcgcagcgtgggcctcttcctggtggggctgctgctcggcctgctgctcgcagctgctgccctgctgggctccgcaccctactaccagccaggctccgtgtggggtccactggggctgttgctggggggcggcctgctctgtgccctgctcactctgcgctggccccgcccactcaccaccctggccaccgccgtgactggtgctgcgctgatcgccactgccgctgactacttcgccgagctgctactgctggggcgctacgtggtggagcgactccgggctgctcctgtgcccccactctgctggcgaagctgggccctgctggcactctggcccctgctcagcctgatgggcgttctggtgcagtggagggtgacagctgagggggactcccacacggaagtggtcatcagccggcagcgccgacgcgtgcaactgatgcggattcggcagcaggaagatcgcaaggagaaaaggcggaaaaagagacctcctcgggctcccctcagaggtccccgggctcctcccaggcctgggccaccagaccctgcttatcggcgcaggccagtgcccatcaaacgcttcaatggagacgtcctctccccgagctatatccagagcttccgagaccggcagaccgggagctccctgagctccttcatggcctcacccacagatgcggactatgagtatgggtcccggggacctctgacagcctgctcaggccccccagtgcgggtatagccatatctgtctgtctagactctgcagtcaccagctctgccagctcgaggaggcctgctaggctgccactcagcctcctggctttggctgtccctctccccagcctggagagggctggcctggtcactagaagggaggattgtctcaggcgagtcttggcctgagaggaaagccccctcccaagctcccaagaggctcctgaggaactcggggtgtgaaccccattggggtgtgctcagggttgtgagtgtgttgcccgtgtgtctgtgtgtatgtgtgtgggggtgggcaggcttggaggggacgctgggacccttgccttagatttctgactggtagggtttctccaggctcagccccacctcttcactccctgccaaggtcccatgggccacctcctgcatgtctccgcggaggggctaccttccttcccatcgccctgcctcgcagccagactcatctaagggttcttgtccttgtctatggggcaaactgtagcatccctcaccctggtcccctggcctctgtaaagccaccagcctgagggcagtggcaggagatgggggtgggggggtgctgctctgggctgggttgggaagggagttggggaggggtttaaatgcacggtgcatgtctggtgtctgtcatgccaacctagacacctcatgcttctgtctcccccaccccactctgttttacatcttttataaatgtgccaaactgtgtggcctctgccaggaa

SEQ ID NO: 193850 - DNA, 1057 bp, Homo sapiens
  Payload ID: 18286
  Gene Name: transmembrane protein 198
  ENST ID: ENST00000421791
  CDS Start-End: 377-1057
tggatggtgcgccctgagtgacgtcaggagcagaggccggagctgtccatcagcaccaaaggccgcgggcgggctcagggcatggggccgcggttctggggcggcccgagccccggctcctgcgccttccccttcctcaggcccagcccgagttcccggacgccgcgggactggagtgccagccggtgttggacgtggagcggcgccgccaccgcgccgacaccattctctccggcccagcagcccccttcctcgcacgacggactttccctggaccccagtcagttggagcctctggcgccccgcaaccccggcccctcgggcctctgcacagcctctttcactcagaagctcaggtcgcctccagcccagcactatgccggggactgtggcaacactgcggttccagctgctgccccctgagccagatgatgccttctggggtgcaccttgtgaacagcccctggagcgcaggtaccaggcactgccggccctcgtctgcatcatgtgctgtttgtttggagtcgtctactgcttcttcggttaccgctgcttcaaggcagtgctctttctcactgggttgctgtttggctcggtggtcatcttcctcctctgctaccgagagcgggtgctagagacacagctgagtgctggggcgagcgcgggcatcgctctgggcatcgggctgctctgcgggctggtggccatgctagtgcgcagcgtgggcctcttcctggtggggctgctgctcggcctgctgctcgcagctgctgccctgctgggctccgcaccctactaccagccaggctccgtgtggggtccactggggctgttgctggggggcggcctgctctgtgccctgctcactctgcgctggccccgcccactcaccaccctggccaccgccgtgactggtgctgcgctgatcgccactgccgctgactacttcgccgagctgctactgctggggcgctacgtggtggagcgactccgggctgctcctgtgcccccactctgctggcgaagctgggccctgctggcactctggcccctgctc

SEQ ID NO: 193851 - DNA, 505 bp, Homo sapiens
  Payload ID: 18286
  Gene Name: transmembrane protein 198
  ENST ID: ENST00000451952
  CDS Start-End: 38-505
gtccatcagcaccaaaggccgcgggcgggctcagggcatggggccgcggttctggggcggcccgagccccggctcctgcgccttccccttcctcaggcccagcccgagttcccggacgccgcgggactggagtgccagccggtgttggacgtggagcggcgccgccaccgcgccgacaccattctctccggcccagcagcccccttcctcgcacgacggactttccctggaccccagtcagttggagcctctggcgccccgcaaccccggcccctcgggcctctgcacagcctctttcactcagaagctcaggtcgcctccagcccagctgctgccccctgagccagatgatgccttctggggtgcaccttgtgaacagcccctggagcgcaggtaccaggcactgccggccctcgtctgcatcatgtgctgtttgtttggagtcgtctactgcttcttcggttaccgctgcttcaaggcagtgctctttctcactgggttgctg

SEQ ID NO: 193852 - DNA, 3148 bp, Homo sapiens
  Payload ID: 18287
  Gene Name: transmembrane protein 199
  Uniprot ID: Q8N511
  ENST ID: ENST00000292114
  CDS Start-End: 91-717
agagcaacttccggtgcgcttagcgttacttccggcgcgcggcgggcggaagtccgggttggggtcacctgaccggagagccggctagatatggcgtcctctttgcttgcgggcgagcgattggtgcgtgctttgggccccggcggggagctggagccagagcggctaccccgaaagctgcgggccgagcttgaggccgcgctggggaagaagcacaagggcggtgatagctccagtggcccccaacgcttggtttctttccgtctcatccgggatctgcaccagcatctgagagaaagggattccaaactatacctccatgagctcctagaaggcagtgaaatctatctcccagaggttgtgaagcctccacggaacccagaactagttgcccggctggagaagattaagatacagctggccaatgaggaatataaacggatcacccgcaacgtcacttgtcaggatacaagacatggtgggactctcagcgacctgggaaagcaagtgagatcattgaaggctctggtcatcaccatcttcaatttcattgtcacggtggttgctgccttcgtctgcacttaccttggaagccaatatatcttcacagaaatggcctcgcgggtgctagctgcattgatcgtcgcctctgtggtgggtctggccgagctgtatgtcatggtgcgggcaatggaaggcgagctgggagaactgtaactggtgcttcatcatcaagtctagagaagactttgggggcttcaggctccaattggcagtcaccgactcagtcaacccatcagactttttgtattcagctccagttagtcagaagaccagcccaggccagctgctgtttctgtggggagccctaatcttctgtgaatttccaaagggagcattggaggagattgagataacacatctttaaaacagaaagaactggtcttggtctatcagtacctcttcctgaatctggtacccatctgccttctccagttcattctaaacactgctgggactagggtttttccatcaggagcaaatggaatccaggccttcccagaagtagaccatactgccttgaacttgtccatatgtacaaactgatcaccagctttctccatacatttttaatgcagacctgtaattgagttcagaagcctccaagaaaacagaaaggatcccctttctccagtttgtgctggaagaggagctgatcagagacatcaaataagagaaagatgggttgctagaggatggtagaactggaagcaaggcagctacctttttgcaaaaggaaatggtgttaggccccttttccagaagataagacagactcatagagattaaatgatcactatggtccttcttctgttaaatggagccaaagacgcctatgttgttctgaagtcttgtaatgtttaacttctgagaacttagattagtggtgtgatgatagagtctgtataacgcattgaaaagggtatcaggcttagttatttatccaataaatatttattgtatgcagggtattcctattttaactcctgtgacaacacaaagcatagcgatttccatagttctaactgttcagggtctgctcctcctggtacactctttttggttcactgtatgtactcctgttgtctttttttttttttccaaagcacttttctgttttcataaattatatactcattcactcagtggacacttcctctacaatgtttgccagtttctgttagttgggagaagtgtcagctgtgaaaagaaaaagtaggtggcattttacagtgtttccagtaacctgagctatataaaatttgtgttaaaaagctacactgggccaggtgaggtggctcacacctgtaatcgtagcattttgggaggctgaggcaggcggatcacttgaggttgggagtttaagaccagcatggccaatatagcgaaaccccatctttactaaaaatacaaaaaaattagccaggcgtggtggtacatgcctgtaatcccagcactttgggagaccaaggtgggaggatgcttgagttcaggagtttgagaccagcctgggcaacatggcaaaagcccatctctacaaaaaaacgcagaaattagctgacatggtagcgcacgcctgtagtcccagctactcaggaggctaaggtgggaggatcacttgagcctgggaggcagaggttgcagtaagctgagtaagccaagatcatgctattgcactctagcctggatgacagagtgagaccttgtctcaatgaaaaagcagggggcactgggaggggagaaccaaatgccctatcctccagttctcagcatatagaagggagctctctcatctgctagccactcctgcctcactgtgccatgctttctgtaatgcactctgggtccagggactgcttggcaggaggtgggaagaacaagaagtttagggccttcccagtttcttagggcctgtctggagagggaactagcgtttactgagtttttacgatgtgttacacaccatgtaaagccctttacctacattatttcttataccccaaacagagagcaaataagtatccccattttttagtcacatagagttccagagttgccacagttacatcgcaaagtcaggatttgaatccagtgcagaccgcaaacaccatggttttctctccaaagcagagcagctccagaggtggaggtgactggaatgtcctagattcagtgggaccaggagctgggggtgctagcagaggctctcatctccccagggtcttgtcagtcagagtcctaaacccttcaattaactatccctctaatcccagctgaagcctgggtaatacctcccaccaagaggtatctgtgtggaacctggccctatttagggattaggtgatggagataaatttccatggcaaacggccctcgtccccgttcgtttgcagagcacaacaatccagattaaggtacagagtttgggttttatttggagattagttggtattacaggtgatggtgataccaaaacccaatgctgctatacctgcctccatcccagatctgtcaggttgtctccacagccccacatcagagggcatccaatctgatctttgtgaaaattaaatcaacataagcccca

SEQ ID NO: 193853 - DNA, 578 bp, Homo sapiens
  Payload ID: 18287
  Gene Name: transmembrane protein 199
  ENST ID: ENST00000580868
  CDS Start-End: 25-294
acctgaccggagagccggctagatatggcgtcctctttgcttgcgggcgagcgattggtgcgtgctttgggccccggcggggagctggagccagagcggctaccccgaaagctgcgggccgagcttgaggccgcgctggggaagaagcacaagggcggtgatagctccagtggcccccaacgcttggtttctttccgtctcatccgggatctgcaccagcatctgagagaaaggggtgagccccagtctccagtccgggaacccagaactagttgcccggctggagaagattaagatacagctggccaatgaggaatataaacggatcacccgcaacgtcacttgtcaggatacaagacatggtgggactctcagcgacctgggaaagcaagtgagatcattgaaggctctggtcatcaccatcttcaatttcattgtcacggtggttgctgccttcgtctgcacttaccttggaagccaatatatcttcacagaaatggcctcgcgggtgctagctgcattgatcgtcgcctctgtggtgggtctggccgagctgtatgtcatggtgcgggcaatgg

SEQ ID NO: 193854 - DNA, 674 bp, Homo sapiens
  Payload ID: 18287
  Gene Name: transmembrane protein 199
  ENST ID: ENST00000555264
  CDS Start-End: 30-407
gggtcacctgaccggagagccggctagatatggcgtcctctttgcttgcgggcgagcgattggtgcgtgctttgggccccggcggggagctggagccagagcggctaccccgaaagctgcgggccgagcttgaggccgcgctggggaagaagcacaagggcggtgatagctccagtggcccccaacgcttggtttctttccgtctcatccgggatctgcaccagcatctgagagaaagggattccaaactatacctccatgagctcctagaaggcagtgaaatctatctcccagaggttgtgaagcctccacggaacccagaactagttgcccggctggagaagattaagatacagctggccaatgaggaatataaacggatcacccgcaacgtcacttgtcagtagagaccacgttggccaggctggtcttgaactcccagcctcaaggtgatcctcctgcctcggcctcccaaagtgctgggattacaaggatacaagacatggtgggactctcagcgacctgggaaagcaaggtgagtgagatcattgaaggctctggtcatcaccatcttcaatttcattgtcacggtggttgctgccttcgtctgcacttaccttggaagccaatatatcttcacagaaatggcctcgcgggtgctagctgcattgatc

SEQ ID NO: 193855 - DNA, 971 bp, Homo sapiens
  Payload ID: 18287
  Gene Name: transmembrane protein 199
  ENST ID: ENST00000395404
  CDS Start-End: 664-768
gaatttctcgtggatgacaaatttgcttgtgcagtttctgctcttttgagagccccctcttcacttccaggcacacctaggcccaattcacccttgagaaagtctaggtttttaccaaatacaaatatcacaggttttgtctcttctttttctccactttaggaatcagcttagcatagtgagcttgtaggaatccggatttctttccacctcaaaagcaagagtggtgaaatctgatactttgttttgtttgtttgtttttttaatataggatggcaaaagctgtgttgaaagatctggcctgagagtagcatgtgagttccagtcctagctctgtcactaatcctttgaaggagtcatttctcctcgctgggcctcagttcccttatgtgtaaagggaaggaacaggacaaactagcacataagaacccagaactagttgcccggctggagaagattaagatacagctggccaatgaggaatataaacggatcacccgcaacgtcacttgtcaggatacaagacatggtgggactctcagcgacctgggaaagcaagtgagatcattgaaggctctggtcatcaccatcttcaatttcattgtcacggtggttgctgccttcgtctgcacttaccttggaagccaatatatcttcacagaaatggcctcgcgggtgctagctgcattgatcgtcgcctctgtggtgggtctggccgagctgtatgtcatggtgcgggcaatggaaggcgagctgggagaactgtaactggtgcttcatcatcaagtctagagaagactttgggggcttcaggctccaattggcagtcaccgactcagtcaacccatcagactttttgtattcagctccagttagtcagaagaccagcccaggccagctgctgtttctgtggggagccctaatcttctgtgaatttccaaagggagcattggaggagattgagataacac

SEQ ID NO: 193856 - DNA, 675 bp, Homo sapiens
  Payload ID: 18288
  Gene Name: transmembrane protein 2
  ENST ID: ENST00000377043
  CDS Start-End: 1-531
ggcttcctcatgaagaattcctggcagataacccccaggaataatatctccctcgtgaagtttggtccacatgtctctctgaatgtcttttttggaaagcctggtccctggtttgaagattgtgagatggatggtgataagaactccatattccatgacattgatggctctgtgacaggatacaaggatgcttatgtgggaagaatggacaactacctgatccgccatccaagctgtgtaaatgtgtctaagtggaatgcagtgatctgcagtgggacctatgcacaggtctatgtacagacatggagcactcagaatctttctatgaccattacacgagatgagtatccgtccaaccctatggtgctccgaggtattaatcagaaggctgcctttccacagtaccagcctgtcgtcatgctggagaagggttataccatccactggaatgggccggcaccacggactacatttctatacctcgtcaacttcaacaagtatgtttctgttactgttatttcaaatagttgagcaagtagtaatttagtggagaaaaagaataacttatgtctcctttgcagcaagcaaagaaagccaattttacatactttgcttctcttgtggggaggctgtatattttgtgttgatggaattaaagagattatacaaattgaa

SEQ ID NO: 193857 - DNA, 6523 bp, Homo sapiens
  Payload ID: 18288
  Gene Name: transmembrane protein 2
  Uniprot ID: Q9UHN6
  ENST ID: ENST00000377044
  CDS Start-End: 541-4692
cggcccagccgagccgggctgcttgtctggccggcggaggctgagcgcgaccctagcaagccgcggcgcccgccgaccagggacaagagcgactcctgggaccccactctgccccgcgccgccgcctcctcccctgttgtcgcggggacgctcaggcccgcgccgcccgggccacgattctcctcctctttctcccggaggggaaggaacggagaaagccgagcggcggctccgggagagagcgagccgaggcccctgcccccgaggctcggggcaggaggaggaggaggaggaggaggcggaggcggagggaagtgcgcgtcactctcgggaggagagtatttcacctccaggcagaggctgcggctgccagttgagtacgagcggcagctgcgggcgccggcaatcgagtggcttcctggccatggagaggagatctggacccgaggacgccagggactcctctccgtctccctggaccgctgtgtaggcacctgagttaacggacgctaagcggggtaggggaagtaacagtgtatcatgtatgccactgattccaggggacactcccctgctttcctccaacctcagaatggaaatagtcgtcacccatctggctatgttccagggaaggttgtcccattgcgtccccctcctcctccaaagagtcaagcttcagccaaatttacctccatcagacgagaagaccgggcaaccttcgcattctcacctgaagaacagcaagcccagagagaaagtcaaaagcaaaagagacacaaaaatactttcatttgttttgctattactagtttctcattttttattgcacttgcaatcattttaggaatatcctcaaaatatgctccagatgaaaattgcccagatcaaaatcctcgtctcaggaattgggatccaggacaagattctgcaaagcaagttgttatcaaggagggagatatgctccgtctgacctcagacgccaccgtgcattctatagtcattcaggatggaggactgcttgtatttggggacaataaagatggatccagaaatattactttgaggactcattacatcctgatccaggatggtggggcgcttcatattggagcagaaaaatgccgctataaatccaaagcgacaattaccttgtatggcaagtcagatgaaggtgaaagtatgccaacatttggcaaaaagtttattggtgtggaagctggcgggacactggagttacatggggcacggaaggcatcgtggacgttgttggcaaggaccctgaattcctcaggcttgccctttgggtcctatacctttgaaaaggacttttcccggggcctcaatgtgagggtcattgaccaagacacggccaaaattttggaaagtgagagatttgatacccatgaataccgcaatgagagcaggcggcttcaggagtttctgagattccaggatccaggtcggattgttgccatagctgtcggggattcagccgctaaaagtctcttacaaggaaccatccagatgatccaggaacggttgggaagtgaactgatccaaggactgggctacaggcaagcttgggctttagttggtgtcattgatggtggaagcacttcttgcaatgaatccgtgagaaactatgaaaatcatagcagtggcgggaaggctcttgcccaaagagaattttatactgtggatggccagaagttctctgtgacagcttatagtgaatggattgaaggcgtttctctttcaggattccgggtagaggttgtagatggagtgaagctaaatttgctagatgatgttagtagttggaaacctggagaccagattgtggtcgcaagcacagactattccatgtaccaagcagaggagttcactcttcttccctgttctgaatgcagccattttcaggtcaaagtcaaagaaacccctcagttcctgcacatgggtgagatcatagacggtgtagacatgagagctgaggttggaattcttacccggaatattgtgatccaaggagaagtggaggactcatgctacgcagaaaatcagtgccaattttttgattatgatacctttgggggacacattatgataatgaaaaattttacttcagtccatctttcttatgtggaattgaaacacatgggtcagcagcagatggggcgataccctgttcattttcacctgtgtggtgacgtggattataaaggaggatacagacatgcaacatttgtggacggcctgtctattcatcacagcttctcaaggtgcatcactgtgcatgggacaaatggcttgctaataaaagacaccattgggtttgacacactaggtcattgtttctttttggaagatggtattgaacagaggaatactttgttccacaatctgggactcctcaccaagccgggtactctcctgcccaccgataggaacaactccatgtgtaccaccatgcgagataaagtgtttggaaattacattcctgtgcctgctactgactgtatggctgtttcaactttctggattgctcatcccaacaataatctgattaataatgcagctgcaggctcacaggatgctggaatatggtatttattccacaaggaaccaactggggaatccagtggattgcagctcttggcaaaaccagaactcactccattgggtatattttataacaacagggtccattcaaattttaaggctggcttatttattgacaaaggtgtcaaaacaaccaactctagtgctgctgacccaagggaatacctctgtttggacaatagtgcaagatttcgacctcatcaggatgcaaaccccgaaaaaccacgtgttgctgctctaattgacaggctcattgcttttaaaaataatgataatggagcttgggtcagaggaggagatattatcgttcaaaattcagcatttgcagataatggaataggactgacctttgccagtgatggaagcttcccaagtgatgaaggttccagccaagaggtatctgaatctctctttgttggggagagcaggaattacggctttcagggtggtcagaacaagtatgtaggcactggaggaatagaccagaagcctcgaacattacccaggaacaggacgttcccaattagaggctttcagatttatgatgggcccattcatctcacaaggagcactttcaaaaaatatgtgccaactccagataggtacagcagtgcaattggcttcctcatgaagaattcctggcagataacccccaggaataatatctccctcgtgaagtttggtccacatgtctctctgaatgtcttttttggaaagcctggtccctggtttgaagattgtgagatggatggtgataagaactccatattccatgacattgatggctctgtgacaggatacaaggatgcttatgtgggaagaatggacaactacctgatccgccatccaagctgtgtaaatgtgtctaagtggaatgcagtgatctgcagtgggacctatgcacaggtctatgtacagacatggagcactcagaatctttctatgaccattacacgagatgagtatccgtccaaccctatggtgctccgaggtattaatcagaaggctgcctttccacagtaccagcctgtcgtcatgctggagaagggttataccatccactggaatgggccggcaccacggactacatttctatacctcgtcaacttcaacaagaatgactggattcgagttggcctttgctatccatcaaacacaagttttcaagttacctttggctatttgcagcggcagaatggctcattatccaaaatcgaagaatatgagcctgtgcattcactggaagaactgcaaagaaagcaatccgagaggaaattctattttgactccagcacggggttactgtttttgtatctcaaagccaaaagccacaggcatggccacagttactgttcatctcagggatgtgaaagagtcaagatccaagcagccacagactcaaaggacatcagtaactgcatggccaaagcatacccacagtactacagaaagccgtcagtggtcaagcggatgccggccatgctcactggactctgtcaaggctgtggcactcggcaggtggtgtttactagtgatcctcataaaagttacctccctgtgcaattccagtcacctgataaagcagaaacccagcgtggagacccgtctgttatttctgtcaatggcactgactttaccttccgaagtgcaggcgtcctcctccttgttgtggatccgtgcagcgttccattccgcttgacggaaaaaacggtttttcctcttgctgatgtcagtcgcattgaagagtatttaaaaacaggcatccctccaaggtccattgttctgttgagcacaagaggagaaataaagcagttaaacatttcacacttactagtacctctgggattagccaaaccagctcatctttatgacaaagggagtaccatatttttgggattcagtggaaactttaaaccatcatggactaagctatttaccagtcctgctggacagggccttggggtgcttgaacaattcatacctttgcagctggacgaatatggttgtcccagagccaccactgtccgcagaagagacctggaactgctaaagcaagcttcaaaagcacattagagactaactgtaacttaagtgctgggggaaaaaaaatgtgaactaacttatttaatttatggcattttaaaatgacactgttaacccaacggaaccattttccagtttgatacagaatggggagaaaagaaagcgtttgaaattattgcttggataccagcttcatgcaccttctagttgtacaaaatgttaaagacgttgtttgtatttgtaaggctggtgtattcagagagcagatctcttattcctcactttccacccccgtattttgtaatgaccatgagcaatgtttttactttttgtataatggggtggggtggagtgggggcttctgagagtcagcctgaggtctttagaggaccagctattgtagcaccttggatacttgaagtttaatgctcagttgggtcgggtggcagttgacttggtggctggcatgttcagcagtgcctggggccctgtttctgggcagcctttgaggattttctatgatattgaatgacagttttaagtggcaactcaggcccagctcatgcccttttttgcctggacatgtgctatttttattcacttatatatcaattacttgtaagggttaaactttcaaacaggaagtatattgggacaaaagggctcttggggattagatatccctttaatctgtgaccattgggcaaaaaattttcctgcagcaaaagtctgaggctgttgggaccatttttgcagctttaatccttagcctcttttgactgtatatttgtgtttaaaatgcagagctcaactgaatatttccttttttgttttgttttgttttgttttaagaagtaggttgttttcctgaaccgtaaacttgtatcattttaacttgcacaaaggaagtctgttcttggtattgctcttgcacttgggttttttgttattgttttgtgtggattttttaaagcttttctgttcaccctcctgccaggaaaatcccagaaagcttaatgataccccaaaatgattacacccagggaggaaaaaaaggagcgctttctagggtcagaatcgtggagagaatactcagaaatgaacctctttaaagccttgcaggaatgagtcactcttacttaatgaaatgttaaagccaattaaaaagcatgctgtgatgcccagcttccctttccacagggtgcatgcgtctcctgctggtgaatcacatgcggcaagaggcaactggctccacagcctgggatgctgccgtaccaagaggaaagaagcagcaaaatgcctttacgttgttctaaacccccgacgcataaagtgtagaggagggatggccaagggtgggtggtagaaagtgtgttcaggctgacactggcaatgagtacagataatttcactttcctcttctaggggcaaaggctgatggcctctacctttgtatccaggagaaactgcagagcagccctgtgactttacaaaatatgctacctcaaagtgctaccgataaacctttctaattgtaagtgcccttactaagggcacatgtcttaatcaaagttagttttttgttttctggtttgttttttttttttgtatattgatgaatgagatcttacctattaaatatattattggattatggttcctgaaggtcattagagtgtgtgtgtgtgtgtgtgtgtgtgtgtgtgttttatgacttaaatatctttacgtgtgttttttagagcttggttctttaaagatttggagaagatatgtaaattaccaaggcacttggtttttctgttttatatactaataatcagggcctaagttaaataaaaatatgtgtgcatgtatttta

SEQ ID NO: 193858 - DNA, 722 bp, Homo sapiens
  Payload ID: 18288
  Gene Name: transmembrane protein 2
  ENST ID: ENST00000377055
  CDS Start-End: 1-537
ctgatccgccatccaagctgtgtaaatgtgtctaagtggaatgcagtgatctgcagtgggacctatgcacaggtctatgtacagacatggagcactcagaatctttctatgaccattacacgagatgagtatccgtccaaccctatggtgctccgaggtattaatcagaaggctgcctttccacagtaccagcctgtcgtcatgctggagaagggttataccatccactggaatgggccggcaccacggactacatttctatacctcgtcaacttcaacaagaatgactggattcgagttggcctttgctatccatcaaacacaagttttcaagttacctttggctatttgcagcggcagaatggctcattatccaaaatcgaagaatatgagcctgtgcattcactggaagaactgcaaagaaagcaatccgagaggaaattctattttgactccagcacgggagacggtgtatccctatgttgcccaggctggagtgcagttcacaggcatagttgtggtacactacagccttgatctcctgggctcaagtgatcctcccacctcagcctcacaagtagctgctgccaccacacccagcattgattttcaatttttgtttagacttaaacaactacctggactttcattctgtagatgatagaacttccagattcccacttgattttccacaagaataaaaagaatatccacatttggaa

SEQ ID NO: 193859 - DNA, 5217 bp, Homo sapiens
  Payload ID: 18288
  Gene Name: transmembrane protein 2
  Uniprot ID: Q9UHN6
  ENST ID: ENST00000377066
  CDS Start-End: 43-4005
gttaacggacgctaagcggggtaggggaagtaacagtgtatcatgtatgccactgattccaggggacactcccctgctttcctccaacctcagaatggaaatagtcgtcacccatctggctatgttccagggaaggttgtcccattgcgtccccctcctcctccaaagagtcaagcttcagccaaatttacctccatcagacgagaagaccgggcaaccttcgcattctcacctgaagaacagcaagcccagagagaaagtcaaaagcaaaagagacacaaaaatactttcatttgttttgctattactagtttctcattttttattgcacttgcaatcattttaggaatatcctcaaaatatgctccagatgaaaattgcccagatcaaaatcctcgtctcaggaattgggatccaggacaagattctgcaaagcaagttgttatcaaggagggagatatgctccgtctgacctcagacgccaccgtgcattctatagtcattcaggatggaggactgcttgtatttggggacaataaagatggatccagaaatattactttgaggactcattacatcctgatccaggatggtggggcgcttcatattggagcagaaaaatgccgctataaatccaaagcgacaattaccttgtatggcaagtcagatgaaggtgaaagtatgccaacatttggcaaaaagtttattggtgtggaagctggcgggacactggagttacatggggcacggaaggcatcgtggacgttgttggcaaggaccctgaattcctcaggcttgccctttgggtcctatacctttgaaaaggacttttcccggggcctcaatgtgagggtcattgaccaagacacggccaaaattttggaaagtgagagatttgatacccatgaataccgcaatgagagcaggcggcttcaggagtttctgagattccaggatccaggtcggattgttgccatagctgtcggggattcagccgctaaaagtctcttacaaggaaccatccagatgatccaggaacggttgggaagtgaactgatccaaggactgggctacaggcaagcttgggctttagttggtgtcattgatggtggaagcacttcttgcaatgaatccgtgagaaactatgaaaatcatagcagtggcgggaaggctcttgcccaaagagaattttatactgtggatggccagaagttctctgtgacagcttatagtgaatggattgaagaaacccctcagttcctgcacatgggtgagatcatagacggtgtagacatgagagctgaggttggaattcttacccggaatattgtgatccaaggagaagtggaggactcatgctacgcagaaaatcagtgccaattttttgattatgatacctttgggggacacattatgataatgaaaaattttacttcagtccatctttcttatgtggaattgaaacacatgggtcagcagcagatggggcgataccctgttcattttcacctgtgtggtgacgtggattataaaggaggatacagacatgcaacatttgtggacggcctgtctattcatcacagcttctcaaggtgcatcactgtgcatgggacaaatggcttgctaataaaagacaccattgggtttgacacactaggtcattgtttctttttggaagatggtattgaacagaggaatactttgttccacaatctgggactcctcaccaagccgggtactctcctgcccaccgataggaacaactccatgtgtaccaccatgcgagataaagtgtttggaaattacattcctgtgcctgctactgactgtatggctgtttcaactttctggattgctcatcccaacaataatctgattaataatgcagctgcaggctcacaggatgctggaatatggtatttattccacaaggaaccaactggggaatccagtggattgcagctcttggcaaaaccagaactcactccattgggtatattttataacaacagggtccattcaaattttaaggctggcttatttattgacaaaggtgtcaaaacaaccaactctagtgctgctgacccaagggaatacctctgtttggacaatagtgcaagatttcgacctcatcaggatgcaaaccccgaaaaaccacgtgttgctgctctaattgacaggctcattgcttttaaaaataatgataatggagcttgggtcagaggaggagatattatcgttcaaaattcagcatttgcagataatggaataggactgacctttgccagtgatggaagcttcccaagtgatgaaggttccagccaagaggtatctgaatctctctttgttggggagagcaggaattacggctttcagggtggtcagaacaagtatgtaggcactggaggaatagaccagaagcctcgaacattacccaggaacaggacgttcccaattagaggctttcagatttatgatgggcccattcatctcacaaggagcactttcaaaaaatatgtgccaactccagataggtacagcagtgcaattggcttcctcatgaagaattcctggcagataacccccaggaataatatctccctcgtgaagtttggtccacatgtctctctgaatgtcttttttggaaagcctggtccctggtttgaagattgtgagatggatggtgataagaactccatattccatgacattgatggctctgtgacaggatacaaggatgcttatgtgggaagaatggacaactacctgatccgccatccaagctgtgtaaatgtgtctaagtggaatgcagtgatctgcagtgggacctatgcacaggtctatgtacagacatggagcactcagaatctttctatgaccattacacgagatgagtatccgtccaaccctatggtgctccgaggtattaatcagaaggctgcctttccacagtaccagcctgtcgtcatgctggagaagggttataccatccactggaatgggccggcaccacggactacatttctatacctcgtcaacttcaacaagaatgactggattcgagttggcctttgctatccatcaaacacaagttttcaagttacctttggctatttgcagcggcagaatggctcattatccaaaatcgaagaatatgagcctgtgcattcactggaagaactgcaaagaaagcaatccgagaggaaattctattttgactccagcacggggttactgtttttgtatctcaaagccaaaagccacaggcatggccacagttactgttcatctcagggatgtgaaagagtcaagatccaagcagccacagactcaaaggacatcagtaactgcatggccaaagcatacccacagtactacagaaagccgtcagtggtcaagcggatgccggccatgctcactggactctgtcaaggctgtggcactcggcaggtggtgtttactagtgatcctcataaaagttacctccctgtgcaattccagtcacctgataaagcagaaacccagcgtggagacccgtctgttatttctgtcaatggcactgactttaccttccgaagtgcaggcgtcctcctccttgttgtggatccgtgcagcgttccattccgcttgacggaaaaaacggtttttcctcttgctgatgtcagtcgcattgaagagtatttaaaaacaggcatccctccaaggtccattgttctgttgagcacaagaggagaaataaagcagttaaacatttcacacttactagtacctctgggattagccaaaccagctcatctttatgacaaagggagtaccatatttttgggattcagtggaaactttaaaccatcatggactaagctatttaccagtcctgctggacagggccttggggtgcttgaacaattcatacctttgcagctggacgaatatggttgtcccagagccaccactgtccgcagaagagacctggaactgctaaagcaagcttcaaaagcacattagagactaactgtaacttaagtgctgggggaaaaaaaatgtgaactaacttatttaatttatggcattttaaaatgacactgttaacccaacggaaccattttccagtttgatacagaatggggagaaaagaaagcgtttgaaattattgcttggataccagcttcatgcaccttctagttgtacaaaatgttaaagacgttgtttgtatttgtaaggctggtgtattcagagagcagatctcttattcctcactttccacccccgtattttgtaatgaccatgagcaatgtttttactttttgtataatggggtggggtggagtgggggcttctgagagtcagcctgaggtctttagaggaccagctattgtagcaccttggatacttgaagtttaatgctcagttgggtcgggtggcagttgacttggtggctggcatgttcagcagtgcctggggccctgtttctgggcagcctttgaggattttctatgatattgaatgacagttttaagtggcaactcaggcccagctcatgcccttttttgcctggacatgtgctatttttattcacttatatatcaattacttgtaagggttaaactttcaaacaggaagtatattgggacaaaagggctcttggggattagatatccctttaatctgtgaccattgggcaaaaaattttcctgcagcaaaagtctgaggctgttgggaccatttttgcagctttaatccttagcctcttttgactgtatatttgtgtttaaaatgcagagctcaactgaatatttccttttttgttttgttttgttttgttttaagaagtaggttgttttcctgaaccgtaaacttgtatcattttaacttgcacaaaggaagtctgttcttggtattgctcttgcacttgggttttttgttattgttttgtgtggattttttaaagcttttctgttcaccctcctgccaggaaaatcccagaaagcttaatgataccccaaaatgattacacccagggaggaaaaaaaggagcgctttctagggtcagaatcgtggagagaatactcagaaatgaacctctttaaagccttgcaggaatgagtcactcttacttaatgaaatgttaaagccaattaaaaagcatgctgtgatgcccagcttccctttccacagggtgcatgcgtctcctgctggtgaatcacatgcggcaagagg

SEQ ID NO: 193860 - DNA, 1437 bp, Homo sapiens
  Payload ID: 18288
  Gene Name: transmembrane protein 2
  ENST ID: ENST00000396272
  CDS Start-End: 166-1296
cacttagtctggcacagatcacagaatctcccttttcaaagttgagacacttgactttgtgctgaaaatgtctttttagctgtttaaattttcattctcttccctttacttcttgattattttttcaaggtctatgtacagacatggagcactcagaatctttctatgaccattacacgagatgagtatccgtccaaccctatggtgctccgaggtattaatcagaaggctgcctttccacagtaccagcctgtcgtcatgctggagaagggttataccatccactggaatgggccggcaccacggactacatttctatacctcgtcaacttcaacaagaatgactggattcgagttggcctttgctatccatcaaacacaagttttcaagttacctttggctatttgcagcggcagaatggctcattatccaaaatcgaagaatatgagcctgtgcattcactggaagaactgcaaagaaagcaatccgagaggaaattctattttgactccagcacggggttactgtttttgtatctcaaagccaaaagccacaggcatggccacagttactgttcatctcagggatgtgaaagagtcaagatccaagcagccacagactcaaaggacatcagtaactgcatggccaaagcatacccacagtactacagaaagccgtcagtggtcaagcggatgccggccatgctcactggactctgtcaaggctgtggcactcggcaggtggtgtttactagtgatcctcataaaagttacctccctgtgcaattccagtcacctgataaagcagaaacccagcgtggagacccgtctgttatttctgtcaatggcactgactttaccttccgaagtgcaggcgtcctcctccttgttgtggatccgtgcagcgttccattccgcttgacggaaaaaacggtttttcctcttgctgatgtcagtcgcattgaagagtatttaaaaacaggcatccctccaaggtccattgttctgttgagcacaagaggagaaataaagcagttaaacatttcacacttactagtacctctgggattagccaaaccagctcatctttatgacaaagggagtaccatatttttgggattcagtggaaactttaaaccatcatggactaagctatttaccagtcctgctggacagggccttggggtgcttgaacaattcatacctttgcagctggacgaatatggttgtcccagagccaccactgtccgcagaagagacctggaactgctaaagcaagcttcaaaagcacattagagactaactgtaacttaagtgctgggggaaaaaaaatgtgaactaacttatttaatttatggcattttaaaatgacactgttaacccaacggaaccattttccagtttgatacagaatggggagaaaagaaagcgtttgaa

SEQ ID NO: 193861 - DNA, 5372 bp, Homo sapiens
  Payload ID: 18288
  Gene Name: transmembrane protein 2
  ENST ID: ENST00000542935
  CDS Start-End: 43-1785
gttaacggacgctaagcggggtaggggaagtaacagtgtatcatgtatgccactgattccaggggacactcccctgctttcctccaacctcagaatggaaatagtcgtcacccatctggctatgttccagggaaggttgtcccattgcgtccccctcctcctccaaagagtcaagcttcagccaaatttacctccatcagacgagaagaccgggcaaccttcgcattctcacctgaagaacagcaagcccagagagaaagtcaaaagcaaaagagacacaaaaatactttcatttgttttgctattactagtttctcattttttattgcacttgcaatcattttaggaatatcctcaaaatatgctccagatgaaaattgcccagatcaaaatcctcgtctcaggaattgggatccaggacaagattctgcaaagcaagttgttatcaaggagggagatatgctccgtctgacctcagacgccaccgtgcattctatagtcattcaggatggaggactgcttgtatttggggacaataaagatggatccagaaatattactttgaggactcattacatcctgatccaggatggtggggcgcttcatattggagcagaaaaatgccgctataaatccaaagcgacaattaccttgtatggcaagtcagatgaaggtgaaagtatgccaacatttggcaaaaagtttattggtgtggaagctggcgggacactggagttacatggggcacggaaggcatcgtggacgttgttggcaaggaccctgaattcctcaggcttgccctttgggtcctatacctttgaaaaggacttttcccggggcctcaatgtgagggtcattgaccaagacacggccaaaattttggaaagtgagagatttgatacccatgaataccgcaatgagagcaggcggcttcaggagtttctgagattccaggatccaggtcggattgttgccatagctgtcggggattcagccgctaaaagtctcttacaaggaaccatccagatgatccaggaacggttgggaagtgaactgatccaaggactgggctacaggcaagcttgggctttagttggtgtcattgatggtggaagcacttcttgcaatgaatccgtgagaaactatgaaaatcatagcagtggcgggaaggctcttgcccaaagagaattttatactgtggatggccagaagttctctgtgacagcttatagtgaatggattgaaggcgtttctctttcaggattccgggtagaggttgtagatggagtgaagctaaatttgctagatgatgttagtagttggaaacctggagaccagattgtggtcgcaagcacagactattccatgtaccaagcagaggagttcactcttcttccctgttctgaatgcagccattttcaggtcaaagtcaaagaaacccctcagttcctgcacatgggtgagatcatagacggtgtagacatgagagctgaggttggaattcttacccggaatattgtgatccaaggagaagtggaggactcatgctacgcagaaaatcagtgccaattttttgattatgatacctttgggggacacattatgataatgaaaaattttacttcagtccatctttcttatgtggaattgaaacacatgggtcagcagcagatggggcgataccctgttcattttcacctgtgtggtgacgtggattataaaggaggatacagacatgcaacatttgtggacggcctgtctattcatcacagcttctcaagataaaagacaccattgggtttgacacactaggtcattgtttctttttggaagatggtattgaacagaggaatactttgttccacaatctgggactcctcaccaagccgggtactctcctgcccaccgataggaacaactccatgtgtaccaccatgcgagataaagtgtttggaaattacattcctgtgcctgctactgactgtatggctgtttcaactttctggattgctcatcccaacaataatctgattaataatgcagctgcaggctcacaggatgctggaatatggtatttattccacaaggaaccaactggggaatccagtggattgcagctcttggcaaaaccagaactcactccattgggtatattttataacaacagggtccattcaaattttaaggctggcttatttattgacaaaggtgtcaaaacaaccaactctagtgctgctgacccaagggaatacctctgtttggacaatagtgcaagatttcgacctcatcaggatgcaaaccccgaaaaaccacgtgttgctgctctaattgacaggctcattgcttttaaaaataatgataatggagcttgggtcagaggaggagatattatcgttcaaaattcagcatttgcagataatggaataggactgacctttgccagtgatggaagcttcccaagtgatgaaggttccagccaagaggtatctgaatctctctttgttggggagagcaggaattacggctttcagggtggtcagaacaagtatgtaggcactggaggaatagaccagaagcctcgaacattacccaggaacaggacgttcccaattagaggctttcagatttatgatgggcccattcatctcacaaggagcactttcaaaaaatatgtgccaactccagataggtacagcagtgcaattggcttcctcatgaagaattcctggcagataacccccaggaataatatctccctcgtgaagtttggtccacatgtctctctgaatgtcttttttggaaagcctggtccctggtttgaagattgtgagatggatggtgataagaactccatattccatgacattgatggctctgtgacaggatacaaggatgcttatgtgggaagaatggacaactacctgatccgccatccaagctgtgtaaatgtgtctaagtggaatgcagtgatctgcagtgggacctatgcacaggtctatgtacagacatggagcactcagaatctttctatgaccattacacgagatgagtatccgtccaaccctatggtgctccgaggtattaatcagaaggctgcctttccacagtaccagcctgtcgtcatgctggagaagggttataccatccactggaatgggccggcaccacggactacatttctatacctcgtcaacttcaacaagaatgactggattcgagttggcctttgctatccatcaaacacaagttttcaagttacctttggctatttgcagcggcagaatggctcattatccaaaatcgaagaatatgagcctgtgcattcactggaagaactgcaaagaaagcaatccgagaggaaattctattttgactccagcacggggttactgtttttgtatctcaaagccaaaagccacaggcatggccacagttactgttcatctcagggatgtgaaagagtcaagatccaagcagccacagactcaaaggacatcagtaactgcatggccaaagcatacccacagtactacagaaagccgtcagtggtcaagcggatgccggccatgctcactggactctgtcaaggctgtggcactcggcaggtggtgtttactagtgatcctcataaaagttacctccctgtgcaattccagtcacctgataaagcagaaacccagcgtggagacccgtctgttatttctgtcaatggcactgactttaccttccgaagtgcaggcgtcctcctccttgttgtggatccgtgcagcgttccattccgcttgacggaaaaaacggtttttcctcttgctgatgtcagtcgcattgaagagtatttaaaaacaggcatccctccaaggtccattgttctgttgagcacaagaggagaaataaagcagttaaacatttcacacttactagtacctctgggattagccaaaccagctcatctttatgacaaagggagtaccatatttttgggattcagtggaaactttaaaccatcatggactaagctatttaccagtcctgctggacagggccttggggtgcttgaacaattcatacctttgcagctggacgaatatggttgtcccagagccaccactgtccgcagaagagacctggaactgctaaagcaagcttcaaaagcacattagagactaactgtaacttaagtgctgggggaaaaaaaatgtgaactaacttatttaatttatggcattttaaaatgacactgttaacccaacggaaccattttccagtttgatacagaatggggagaaaagaaagcgtttgaaattattgcttggataccagcttcatgcaccttctagttgtacaaaatgttaaagacgttgtttgtatttgtaaggctggtgtattcagagagcagatctcttattcctcactttccacccccgtattttgtaatgaccatgagcaatgtttttactttttgtataatggggtggggtggagtgggggcttctgagagtcagcctgaggtctttagaggaccagctattgtagcaccttggatacttgaagtttaatgctcagttgggtcgggtggcagttgacttggtggctggcatgttcagcagtgcctggggccctgtttctgggcagcctttgaggattttctatgatattgaatgacagttttaagtggcaactcaggcccagctcatgcccttttttgcctggacatgtgctatttttattcacttatatatcaattacttgtaagggttaaactttcaaacaggaagtatattgggacaaaagggctcttggggattagatatccctttaatctgtgaccattgggcaaaaaattttcctgcagcaaaagtctgaggctgttgggaccatttttgcagctttaatccttagcctcttttgactgtatatttgtgtttaaaatgcagagctcaactgaatatttccttttttgttttgttttgttttgttttaagaagtaggttgttttcctgaaccgtaaacttgtatcattttaacttgcacaaaggaagtctgttcttggtattgctcttgcacttgggttttttgttattgttttgtgtggattttttaaagcttttctgttcaccctcctgccaggaaaatcccagaaagcttaatgataccccaaaatgattacacccagggaggaaaaaaaggagcgctttctagggtcagaatcgtggagagaatactcagaaatgaacctctttaaagccttgcaggaatgagtcactcttacttaatgaaatgttaaagccaattaaaaagcatgctgtgatgcccagcttccctttccacagggtgcatgcgtctcctgctggtgaatcacatgcggcaagagg

SEQ ID NO: 193862 - DNA, 533 bp, Homo sapiens
  Payload ID: 18288
  Gene Name: transmembrane protein 2
  ENST ID: ENST00000545719
  CDS Start-End: 479-533
accacttcacttgtgtgtgaacataagaagtatgactctgaaatgaatgcttcatgacagcaaggatcatgtctttctttcttgttcaacaccctatgtccagtgccttgaacagttcctgacccatgattttctgaaaactttactcctttgctgcacttcaagtctgcaaaattgacaaatgaaagtgtcggggcagttggggagaaagaggccttcagatatactctataaatcatcaaaatatgatgtgctatatattctcggcataaactggaaatgaaaaaaacttgctacaaataggagtgactcctttgggcttaaattggattggcagcaacacagattctgctgtggattgaagtcattttctacctcggcactactcagtccatggggaatggtgaagttatgattttgcagcaagattctgggagcaggccagcatctacatctgttctaaacttaacagtgtatcatgtatgccactgattccaggggacactcccctgctttcctccaacctcagaatg

SEQ ID NO: 193863 - DNA, 3512 bp, Homo sapiens
  Payload ID: 18289
  Gene Name: transmembrane protein 200A
  Uniprot ID: Q86VY9
  ENST ID: ENST00000296978
  CDS Start-End: 872-2347
ccaaagatgggttttgtctgcgggtgatttgggctctcgaagtgcaactttgtggccgggacgcggatcggccggcctgggctcctgcagagcagatcctgtctgcgtcctccaggaggagtgggtggcaggactggggtttcccacaggttttggggcggcggcgagattggcacggtccggggtcgcaggcgcgcagccacgcccctggaagtccgccccggcccccgcccccaacccgcctcttcggggctttatggcgtgaggtttggggctgggatccatctggagccgagcagaaaacttttcccctcccgttcccggtcccttttgtctttcttggacgcggtggcggcgccgcctgagcggcgactccctctcccctgcccggcttgctgcgcccggtgccctccgagggcaggcgcgcctggactctgcgcccggatggcggcggccctctgtgagcaccggcagcggcgcatcccctgccccgaggcctccggtgcccccccggcgcgggcataggggcgcccccaccctccgtccgcttgcaccccttgccacccgccccctcgcctgactcatccgcccgcggtggccgcccgagccctgggatggggagggagaccgcggctgcccgcggcggccgagattcccgctgacgcccccgaccctgccgccttcttcgtccgcctccagaggcgcccgacgtcccgacagctcctggagtgagaccaggactgagaacagggagaggcgacccgacccccagggcccggtgctcaggacagcacacagagccgctgaaaacgactgaagagagcaagggatttcctgggacatctggctctggagagtaaaaggccaagctatgatagcaactggtggagtgataactggcctggccgccttgaaaaggcaagactctgccagatcacagcagcatgtcaacctcagcccgtctcctgctacccaagagaagaagcccatcaggcgccggccccgggcagatgttgtggttgttcgtggcaaaatccggctttattccccatctggtttttttcttattttaggagtgctcatctccattataggaattgctatggccgttcttggatattggccccaaaaagaacattttattgatgctgaaacaacactgtcaacaaatgaaactcaggtcattcggaatgaaggcggtgtggtggttcgcttctttgagcagcatttgcattctgataagatgaaaatgcttggcccattcaccatggggattggcattttcattttcatttgtgctaatgccattcttcatgaaaaccgtgacaaagagaccaaaatcatacacatgagggatatctattccacagtcattgacattcacacgctaagaatcaaggagcaaaggcaaatgaacggcatgtacactggtttgatgggagaaacagaagtaaaacagaatgggagctcctgtgcctcgagattggcagcaaatacgatcgcctctttctcgggttttcggagcagttttcgaatggacagctccgtggaggaggatgaacttatgttaaatgaaggtaagagttctgggcatcttatgccccctttgctctctgacagctctgtgtctgtctttggcctctatccacctccttccaagacaactgatgataagaccagcggctctaagaaatgtgaaaccaagtcaattgtgtcatcgtccatcagtgcttttacattgcctgtgatcaaacttaataactgtgttattgatgagcccagtatagataacatcactgaagatgctgacaacctcaaaagtaggtcaaggaatttgtcaatggattcccttgtggttcctttgcccaacaccagtgaatccttccagcccgtcagcacagtgctaccaaggaataattccattggggagtcgttgtcgagtcagtacaagtcatctatggctctcggacctggggctggacagctcttgtctcctggggctgccagaagacagtttgggtccaatacatccttgcatttgctctcgtcacactcaaagtccttggacttagaccggggtccctccactctaactgttcaggcagaacaacggaaacatccaagttggcctaggttggatcggaacaacagcaagggatatatgaaactagagaacaaagaagacccgatggataggttgcttgtgccccaagttgccatcaaaaaggactttaccaataaggagaagcttcttatgatttcaagatctcacaataatttgagttttgaacatgatgagtttttgagtaacaacctaaagaggggaacttctgaaacaaggttttaatgttaaaagaatatatcattttacaagggtatatattttaaaacgattttcactggtgtttccttcttaaagtattggctgtaagcctttttaatcaaatggtttgtagtgtattagaattggctgcttagttctgtaatgaagatggttgtatgtttgggttacttgtgactgcagtactctatgttaccacacatgattttatttttctcttcctttgaaagcatgatctcttttattaatatgaatgcaaaatgcttgcatccaaattaaagcttattttctttacttttaagttctttgattgccctattcataaaatgaaatgtccagtatggaaaacatagggtaccaaagtgtggaccaggagtacaaattcagtcccaatactcaatacgtattatagatgactatgagtgcaaaccttaggatgtgattttctgaataattgttctttgtaggatttggttacattatttaaaatgaaaaagatctagttttagtgtgagctcagtaatgttaattggttaagttcattgtgaatcttgagttttagataagtagttatttttttcaatatcacttctgtttttagtgatattatatcaagaaacaacgtattcaagagccatggctgacagtgccagatatacttagggataaacatcaaaatgcaattatagttgctataacgttagatactcggaatcaaaatttatttgcaagctgacttgataaactaaatgaaccaataaaatttgtagaaatgctatcctgaaataattatatacatgaagacaatgttgactaatgaattaagatacattatatactagttaatgctaactagtctcagtacctgtttttagccatctgttactgtccaatagcacctcattcccacattctattttcccccggtattctttagatcctagtatttggaaaacaatcggctaaccttgacatttctttttaccttcatatgccactatctcggtagttcaaaaaaatttagttcttgataaattgccttgaagtttaccttgtgctggagagccttatgataactccaaagactttcttacggtataatacatgttgtttaggattgtgtttcttagtcactgaagataataaatattaaaatggatgttttcatcag

SEQ ID NO: 193864 - DNA, 5017 bp, Homo sapiens
  Payload ID: 18289
  Gene Name: transmembrane protein 200A
  Uniprot ID: Q86VY9
  ENST ID: ENST00000392429
  CDS Start-End: 2379-3854
gcaagcatttaggaatagcatttgccaactcccaagacttggctgtccctctcgctctggccttacttacctaactgacctcctgtagtactgagttgtgtgctggccaagttcctattcctggactgctttctttcccttgaccttccttgaaatactgctaacctgacttttgactgtgatctatgtgctatctcctgtgtgaagcctaatgaaaggtccttctctaatggaaactttcattctaggagttacctcattctgttttatgtggatctgttagctccttcattaggtttcaagctgtttgaaacagtgattgaatttgctcacctttgctttcctctcagggtctacattgggaccctgagtgataatagagccttctgtagtattgaattgctttaaacagaattaaaggacattggcaccaaatgtgattttgccaatccttgggagtcttggtgcctctgtctgggcttgaccagggtagaatggctgaagaaaatgtgattcctccacccattaaattctttatttctcaactactctggaagtttttgcctctttttgtttctatccattttcatacttttaagatacccttttttactttaagataccttttttcttcctaacgtttctttacatgctcacatgcaagcccagtcatccatctctctttttcacctttctgtcctcatatatttttcttaaaatatcttttctcatctaatctcctttcctctatcaatcagcctcctaagcgaaaatggtagtgctaatgttttaaaaagtgggggaggactagaaatctgtatggaatgtaattcacttttattgcttttaaattaaatgaaacgtttttgcccttgtttccattctactcagaaggatttcagactaaatccttaagcctgccatatggaaataactgggctagagggctgctatctaatctaagcatttaattcaaacatttgaaatggtttttgcttcaagaaaacataggttgacactaagctttattttagcaaaggtttgggaaaggttctaatctgcagtatgtacactttgataaatttcatagactagagcaacagattacaatttagtttgttcttccaacataaaactattttaatcctagttataatttcactgaaggctggatttactcactggcttgttaaaactgtagataacaaccacaagcctgttatttaaacacaattcagaaatcataaatagaaattcaaaaggagagctcaatgctgcaagatgagatttgatgccctgaagaaactctctctgaaatttgccaaagaccttgtggaacttaaaatatcttcttgtttcctaccagctagatatggcagcttgagaactatttattatgaatcaagatagatattttaccaactcagaaaatgttgctttttgtttggatattaatcttgtttgttcatatttttaactaggaaagttagtacagtaatatggtggtcatccaacagaccacaagaagagaatttgtccctcattcagcattttagcaaatatttcttgaacactagccatgtgcaaggtattacagtgagtgtttctgctaataaaaatatgaattaaatttgatgtttgatcataagtagaagaactgtgatactataatattgtaagtgccatagaaaacttgctattataaaatgctgtaaggagttaatgcttgcatagggtgcagtgggtcagctagagaaggctttataaagaaagtggaatatgagctttgatgcctagccagatgtgggtatgtgaagaacagggcagggcagtggggagtgggtggattctggacagctgaaacattgttaacaaaatctcagaaatggtacaaaatggaatatgaatgagaaatacagaacatttgttaggttttatttttatgcaaattaaagagaagagttagagacaaagttaaagtcaatgggtctagaatttcagctaaaactttggtaggtagtggagaatattttatcattattctgctctttaaacaacttcagagatgattgattaatcttgattgtaaaggaagagaaattctttggaagaccagttagggggttatcatatggtctagtaaaagttaataagatctgcacaaggctgggaagagtaggattagaacagaggggtggaattaaaggacatcgtatattggaaatttctaggatttagaacctgattggaagaggaagaagaaagggaggagttaaaaataactgtaaagagccaaatctgagaactgaccctgctaaaaaagtcagacaagtcaagtggtgcagctggtgtgtgctagaagagtaaaaggccaagctatgatagcaactggtggagtgataactggcctggccgccttgaaaaggcaagactctgccagatcacagcagcatgtcaacctcagcccgtctcctgctacccaagagaagaagcccatcaggcgccggccccgggcagatgttgtggttgttcgtggcaaaatccggctttattccccatctggtttttttcttattttaggagtgctcatctccattataggaattgctatggccgttcttggatattggccccaaaaagaacattttattgatgctgaaacaacactgtcaacaaatgaaactcaggtcattcggaatgaaggcggtgtggtggttcgcttctttgagcagcatttgcattctgataagatgaaaatgcttggcccattcaccatggggattggcattttcattttcatttgtgctaatgccattcttcatgaaaaccgtgacaaagagaccaaaatcatacacatgagggatatctattccacagtcattgacattcacacgctaagaatcaaggagcaaaggcaaatgaacggcatgtacactggtttgatgggagaaacagaagtaaaacagaatgggagctcctgtgcctcgagattggcagcaaatacgatcgcctctttctcgggttttcggagcagttttcgaatggacagctccgtggaggaggatgaacttatgttaaatgaaggtaagagttctgggcatcttatgccccctttgctctctgacagctctgtgtctgtctttggcctctatccacctccttccaagacaactgatgataagaccagcggctctaagaaatgtgaaaccaagtcaattgtgtcatcgtccatcagtgcttttacattgcctgtgatcaaacttaataactgtgttattgatgagcccagtatagataacatcactgaagatgctgacaacctcaaaagtaggtcaaggaatttgtcaatggattcccttgtggttcctttgcccaacaccagtgaatccttccagcccgtcagcacagtgctaccaaggaataattccattggggagtcgttgtcgagtcagtacaagtcatctatggctctcggacctggggctggacagctcttgtctcctggggctgccagaagacagtttgggtccaatacatccttgcatttgctctcgtcacactcaaagtccttggacttagaccggggtccctccactctaactgttcaggcagaacaacggaaacatccaagttggcctaggttggatcggaacaacagcaagggatatatgaaactagagaacaaagaagacccgatggataggttgcttgtgccccaagttgccatcaaaaaggactttaccaataaggagaagcttcttatgatttcaagatctcacaataatttgagttttgaacatgatgagtttttgagtaacaacctaaagaggggaacttctgaaacaaggttttaatgttaaaagaatatatcattttacaagggtatatattttaaaacgattttcactggtgtttccttcttaaagtattggctgtaagcctttttaatcaaatggtttgtagtgtattagaattggctgcttagttctgtaatgaagatggttgtatgtttgggttacttgtgactgcagtactctatgttaccacacatgattttatttttctcttcctttgaaagcatgatctcttttattaatatgaatgcaaaatgcttgcatccaaattaaagcttattttctttacttttaagttctttgattgccctattcataaaatgaaatgtccagtatggaaaacatagggtaccaaagtgtggaccaggagtacaaattcagtcccaatactcaatacgtattatagatgactatgagtgcaaaccttaggatgtgattttctgaataattgttctttgtaggatttggttacattatttaaaatgaaaaagatctagttttagtgtgagctcagtaatgttaattggttaagttcattgtgaatcttgagttttagataagtagttatttttttcaatatcacttctgtttttagtgatattatatcaagaaacaacgtattcaagagccatggctgacagtgccagatatacttagggataaacatcaaaatgcaattatagttgctataacgttagatactcggaatcaaaatttatttgcaagctgacttgataaactaaatgaaccaataaaatttgtagaaatgctatcctgaaataattatatacatgaagacaatgttgactaatgaattaagatacattatatactagttaatgctaactagtctcagtacctgtttttagccatctgttactgtccaatagcacctcattcccacattctattttcccccggtattctttagatcctagtatttggaaaacaatcggctaaccttgacatttctttttaccttcatatgccactatctcggtagttcaaaaaaatttagttcttgataaattgccttgaagtttaccttgtgctggagagccttatgataactccaaagactttcttacggtataatacatgttgtttaggattgtgtttcttagtcactgaagataataaatattaaaatggatgttttcatc

SEQ ID NO: 193865 - DNA, 2918 bp, Homo sapiens
  Payload ID: 18289
  Gene Name: transmembrane protein 200A
  Uniprot ID: Q86VY9
  ENST ID: ENST00000545622
  CDS Start-End: 280-1755
cagctcagtggctctcaaacctcagcaggcatcagaatcacctggaggacttatgaaaccagtttgctgggcccgcttggtccagcgcttctgattcagtagggagaagtggaaccatgaatttgcattcccgacaagctcacaggttataccagtgttgctggcccgaggattgtattttgggcagcattactccatctgaactcttcttgttctcttacctccttacgtcccaagactcgcggatgttagtttattctcagagtaaaaggccaagctatgatagcaactggtggagtgataactggcctggccgccttgaaaaggcaagactctgccagatcacagcagcatgtcaacctcagcccgtctcctgctacccaagagaagaagcccatcaggcgccggccccgggcagatgttgtggttgttcgtggcaaaatccggctttattccccatctggtttttttcttattttaggagtgctcatctccattataggaattgctatggccgttcttggatattggccccaaaaagaacattttattgatgctgaaacaacactgtcaacaaatgaaactcaggtcattcggaatgaaggcggtgtggtggttcgcttctttgagcagcatttgcattctgataagatgaaaatgcttggcccattcaccatggggattggcattttcattttcatttgtgctaatgccattcttcatgaaaaccgtgacaaagagaccaaaatcatacacatgagggatatctattccacagtcattgacattcacacgctaagaatcaaggagcaaaggcaaatgaacggcatgtacactggtttgatgggagaaacagaagtaaaacagaatgggagctcctgtgcctcgagattggcagcaaatacgatcgcctctttctcgggttttcggagcagttttcgaatggacagctccgtggaggaggatgaacttatgttaaatgaaggtaagagttctgggcatcttatgccccctttgctctctgacagctctgtgtctgtctttggcctctatccacctccttccaagacaactgatgataagaccagcggctctaagaaatgtgaaaccaagtcaattgtgtcatcgtccatcagtgcttttacattgcctgtgatcaaacttaataactgtgttattgatgagcccagtatagataacatcactgaagatgctgacaacctcaaaagtaggtcaaggaatttgtcaatggattcccttgtggttcctttgcccaacaccagtgaatccttccagcccgtcagcacagtgctaccaaggaataattccattggggagtcgttgtcgagtcagtacaagtcatctatggctctcggacctggggctggacagctcttgtctcctggggctgccagaagacagtttgggtccaatacatccttgcatttgctctcgtcacactcaaagtccttggacttagaccggggtccctccactctaactgttcaggcagaacaacggaaacatccaagttggcctaggttggatcggaacaacagcaagggatatatgaaactagagaacaaagaagacccgatggataggttgcttgtgccccaagttgccatcaaaaaggactttaccaataaggagaagcttcttatgatttcaagatctcacaataatttgagttttgaacatgatgagtttttgagtaacaacctaaagaggggaacttctgaaacaaggttttaatgttaaaagaatatatcattttacaagggtatatattttaaaacgattttcactggtgtttccttcttaaagtattggctgtaagcctttttaatcaaatggtttgtagtgtattagaattggctgcttagttctgtaatgaagatggttgtatgtttgggttacttgtgactgcagtactctatgttaccacacatgattttatttttctcttcctttgaaagcatgatctcttttattaatatgaatgcaaaatgcttgcatccaaattaaagcttattttctttacttttaagttctttgattgccctattcataaaatgaaatgtccagtatggaaaacatagggtaccaaagtgtggaccaggagtacaaattcagtcccaatactcaatacgtattatagatgactatgagtgcaaaccttaggatgtgattttctgaataattgttctttgtaggatttggttacattatttaaaatgaaaaagatctagttttagtgtgagctcagtaatgttaattggttaagttcattgtgaatcttgagttttagataagtagttatttttttcaatatcacttctgtttttagtgatattatatcaagaaacaacgtattcaagagccatggctgacagtgccagatatacttagggataaacatcaaaatgcaattatagttgctataacgttagatactcggaatcaaaatttatttgcaagctgacttgataaactaaatgaaccaataaaatttgtagaaatgctatcctgaaataattatatacatgaagacaatgttgactaatgaattaagatacattatatactagttaatgctaactagtctcagtacctgtttttagccatctgttactgtccaatagcacctcattcccacattctattttcccccggtattctttagatcctagtatttggaaaacaatcggctaaccttgacatttctttttaccttcatatgccactatctcggtagttcaaaaaaatttagttcttgataaattgccttgaagtttaccttgtgctggagagccttatgataactccaaagactttcttacggtataatacatgttgtttaggattgtgtttcttagtcactgaagataataaatattaaaatggatgttttcatc

SEQ ID NO: 193866 - DNA, 2899 bp, Homo sapiens
  Payload ID: 18289
  Gene Name: transmembrane protein 200A
  Uniprot ID: Q86VY9
  ENST ID: ENST00000617887
  CDS Start-End: 261-1736
cttgcaccccttgccacccgccccctcgcctgactcatccgcccgcggtggccgcccgagccctgggatggggagggagaccgcggctgcccgcggcggccgagattcccgctgacgcccccgaccctgccgccttcttcgtccgcctccagaggcgcccgacgtcccgacagctcctggagtgagaccaggactgagaacagggagaggcgacccgacccccagggcccggtgctcaggacagagtaaaaggccaagctatgatagcaactggtggagtgataactggcctggccgccttgaaaaggcaagactctgccagatcacagcagcatgtcaacctcagcccgtctcctgctacccaagagaagaagcccatcaggcgccggccccgggcagatgttgtggttgttcgtggcaaaatccggctttattccccatctggtttttttcttattttaggagtgctcatctccattataggaattgctatggccgttcttggatattggccccaaaaagaacattttattgatgctgaaacaacactgtcaacaaatgaaactcaggtcattcggaatgaaggcggtgtggtggttcgcttctttgagcagcatttgcattctgataagatgaaaatgcttggcccattcaccatggggattggcattttcattttcatttgtgctaatgccattcttcatgaaaaccgtgacaaagagaccaaaatcatacacatgagggatatctattccacagtcattgacattcacacgctaagaatcaaggagcaaaggcaaatgaacggcatgtacactggtttgatgggagaaacagaagtaaaacagaatgggagctcctgtgcctcgagattggcagcaaatacgatcgcctctttctcgggttttcggagcagttttcgaatggacagctccgtggaggaggatgaacttatgttaaatgaaggtaagagttctgggcatcttatgccccctttgctctctgacagctctgtgtctgtctttggcctctatccacctccttccaagacaactgatgataagaccagcggctctaagaaatgtgaaaccaagtcaattgtgtcatcgtccatcagtgcttttacattgcctgtgatcaaacttaataactgtgttattgatgagcccagtatagataacatcactgaagatgctgacaacctcaaaagtaggtcaaggaatttgtcaatggattcccttgtggttcctttgcccaacaccagtgaatccttccagcccgtcagcacagtgctaccaaggaataattccattggggagtcgttgtcgagtcagtacaagtcatctatggctctcggacctggggctggacagctcttgtctcctggggctgccagaagacagtttgggtccaatacatccttgcatttgctctcgtcacactcaaagtccttggacttagaccggggtccctccactctaactgttcaggcagaacaacggaaacatccaagttggcctaggttggatcggaacaacagcaagggatatatgaaactagagaacaaagaagacccgatggataggttgcttgtgccccaagttgccatcaaaaaggactttaccaataaggagaagcttcttatgatttcaagatctcacaataatttgagttttgaacatgatgagtttttgagtaacaacctaaagaggggaacttctgaaacaaggttttaatgttaaaagaatatatcattttacaagggtatatattttaaaacgattttcactggtgtttccttcttaaagtattggctgtaagcctttttaatcaaatggtttgtagtgtattagaattggctgcttagttctgtaatgaagatggttgtatgtttgggttacttgtgactgcagtactctatgttaccacacatgattttatttttctcttcctttgaaagcatgatctcttttattaatatgaatgcaaaatgcttgcatccaaattaaagcttattttctttacttttaagttctttgattgccctattcataaaatgaaatgtccagtatggaaaacatagggtaccaaagtgtggaccaggagtacaaattcagtcccaatactcaatacgtattatagatgactatgagtgcaaaccttaggatgtgattttctgaataattgttctttgtaggatttggttacattatttaaaatgaaaaagatctagttttagtgtgagctcagtaatgttaattggttaagttcattgtgaatcttgagttttagataagtagttatttttttcaatatcacttctgtttttagtgatattatatcaagaaacaacgtattcaagagccatggctgacagtgccagatatacttagggataaacatcaaaatgcaattatagttgctataacgttagatactcggaatcaaaatttatttgcaagctgacttgataaactaaatgaaccaataaaatttgtagaaatgctatcctgaaataattatatacatgaagacaatgttgactaatgaattaagatacattatatactagttaatgctaactagtctcagtacctgtttttagccatctgttactgtccaatagcacctcattcccacattctattttcccccggtattctttagatcctagtatttggaaaacaatcggctaaccttgacatttctttttaccttcatatgccactatctcggtagttcaaaaaaatttagttcttgataaattgccttgaagtttaccttgtgctggagagccttatgataactccaaagactttcttacggtataatacatgttgtttaggattgtgtttcttagtcactgaagataataaatattaaaatggatgttttcatc

SEQ ID NO: 193867 - DNA, 2501 bp, Homo sapiens
  Payload ID: 18290
  Gene Name: transmembrane protein 200B
  Uniprot ID: Q69YZ2
  ENST ID: ENST00000521452
  CDS Start-End: 101-1024
ccgggccgtggagacccgggcggctctggagcctccgcgcgcggactgggacccggacccgcgcggcgctgcggcgccagagcgcccagacgacggcgagatgacggccgggagccccgaagaatgcggggaggtgcggaggagccccgagggccgcgtctctcgcttgggccgccgcctgggccgccgccggcgcccgcgctccccgcccgagcctctgcgggtgcgggcgcggctgcggctgcgctcgccgtcgggggcgttcgcggcgctgggggcgctcgtggtactggtgggtatgggcattgcagtggccggctactggccgcaccgggccggggccccagggtcccgggccgccaatgccagctcgccccagatgagcgagctgcgacgcgagggtcgcggcgggggccgggctcacggcccgcacgagcggctgcggctcctcgggccggtgatcatgggcgtcggcctgttcgtgttcatctgcgccaacacactgctgtatgagaaccgagacttggagacgcgacggctccgccagggggtgctgcgggcccaggcgctccggccccccgacggcccgggctgggactgcgccctccttcccagccccggccctaggagtccccgagccgtaggctgcgcagagccagaaatctgggacccgtccccgcgtcggggtacttcacccgtcccgtcagtgcggagtctgcgttcagagcccgctaatcctcgcttggggttacctgccttgctcaacagctacccgctgaagggccccgggctgcccccaccctggggtccacggacgcagactggccatgtgatcatcaccgtgcagccgtctggctcctgcattgaacattccaagtctctggatctgggccttggggagctcctccttggggccccagcagctcgggactgtgctcaccgaagctggccacggctggaccgcctcagtcttgggggctatgccaaattgggaggaggaggggacttgggggcccgggtctgaagagaggggagacagcctgctctgaggctgcagcatggaccatgctaataggaccaaaggaccaggagtcccaacgtctaatagatgtttcagtcacatcccaggctggggatggatgctctgaccacagcagctgtgaagggcatcctgacctgcatgcgggcagagaaatgccagctgcaccagggctcagtgagctggagagggtgcgtttcactgtggggtgtggaggactcgcctcaggaatttcttcagcctctgtaagtggccttagccctaacagggctggaggtccaggccagggtgactgggagatgtacccagtgtcttggcaaacccaagaaagtggtgggcaagggcccctaagactgggaggtaggttgggatgttacaggctggggcaggctccctccaaggcggcactggtgatggagtgtggggcctctgggaagatggaccacgggatgagactctccactgccatctgggacggggactgagccttgaactcctaccacctcaatccctttcttccctcagccatctggggtatatccctctagagctacactactgccaatgccttcatactgagttctgggcccttctgcaaataagtctgagaagccccttctctccttcctttatcgtggcctatgctgcagaatctcactgcagctggcaaaaggcattggccagctctcagaaatccctttactcaacgttgaagctgcattttggtcaatgtgggtaacttactttagaaaatgacttgagtttaggtctcccccacccatatttaatttttcccaagttgctggtagaagagaaatttaaaagtggatcaatcctcacagagagagttctttttgttgttgtttattgaaaaaaatgcaatacaagaagcaagaccaaacagatatctaaacactacaaccacttctactacgaaaggccaaaacagcagacttgattattgcctgtgtagtctaaagattctgccaatctgattctgctgcccgagttcctattttttcaagaaatgtaaacaactacttgatatgattcataattttaaaaaaaatttacaaagctccttcatttttgtcaccaaaataatacatttgagagagatttgtagaaacaaccagcctggggctgagatcctgggcagaaatttcccgtgagcatcaaaaggcgtcagtcaggccgcagctctggctccagttcccgaggtttgttgtctcctcacccccagctgccaagcatccccccaacacacactgatgggcccagcggtggaggggggggtggggacggggatgggtcacggggccctgacgggtcccgcagttaggctccctgagccctcggcttataaatacaggtcttgctttgtgggtgggtgccagagtcctcatgtggcttggaggaaatctttatttctcaaattaaaataaaattgcagcgagagttg

SEQ ID NO: 193868 - DNA, 2553 bp, Homo sapiens
  Payload ID: 18290
  Gene Name: transmembrane protein 200B
  Uniprot ID: Q69YZ2
  ENST ID: ENST00000420504
  CDS Start-End: 159-1082
gtcttgatccgagcggtcttcccggtgtctagctcaagtcgctcctgctgcagcttcgctgcgggcggaggaggtctggaaggagggggcgggcagggagaggctggagccggtgacgccccctcctcccgcgctgcgagcgcccagacgacggcgagatgacggccgggagccccgaagaatgcggggaggtgcggaggagccccgagggccgcgtctctcgcttgggccgccgcctgggccgccgccggcgcccgcgctccccgcccgagcctctgcgggtgcgggcgcggctgcggctgcgctcgccgtcgggggcgttcgcggcgctgggggcgctcgtggtactggtgggtatgggcattgcagtggccggctactggccgcaccgggccggggccccagggtcccgggccgccaatgccagctcgccccagatgagcgagctgcgacgcgagggtcgcggcgggggccgggctcacggcccgcacgagcggctgcggctcctcgggccggtgatcatgggcgtcggcctgttcgtgttcatctgcgccaacacactgctgtatgagaaccgagacttggagacgcgacggctccgccagggggtgctgcgggcccaggcgctccggccccccgacggcccgggctgggactgcgccctccttcccagccccggccctaggagtccccgagccgtaggctgcgcagagccagaaatctgggacccgtccccgcgtcggggtacttcacccgtcccgtcagtgcggagtctgcgttcagagcccgctaatcctcgcttggggttacctgccttgctcaacagctacccgctgaagggccccgggctgcccccaccctggggtccacggacgcagactggccatgtgatcatcaccgtgcagccgtctggctcctgcattgaacattccaagtctctggatctgggccttggggagctcctccttggggccccagcagctcgggactgtgctcaccgaagctggccacggctggaccgcctcagtcttgggggctatgccaaattgggaggaggaggggacttgggggcccgggtctgaagagaggggagacagcctgctctgaggctgcagcatggaccatgctaataggaccaaaggaccaggagtcccaacgtctaatagatgtttcagtcacatcccaggctggggatggatgctctgaccacagcagctgtgaagggcatcctgacctgcatgcgggcagagaaatgccagctgcaccagggctcagtgagctggagagggtgcgtttcactgtggggtgtggaggactcgcctcaggaatttcttcagcctctgtaagtggccttagccctaacagggctggaggtccaggccagggtgactgggagatgtacccagtgtcttggcaaacccaagaaagtggtgggcaagggcccctaagactgggaggtaggttgggatgttacaggctggggcaggctccctccaaggcggcactggtgatggagtgtggggcctctgggaagatggaccacgggatgagactctccactgccatctgggacggggactgagccttgaactcctaccacctcaatccctttcttccctcagccatctggggtatatccctctagagctacactactgccaatgccttcatactgagttctgggcccttctgcaaataagtctgagaagccccttctctccttcctttatcgtggcctatgctgcagaatctcactgcagctggcaaaaggcattggccagctctcagaaatccctttactcaacgttgaagctgcattttggtcaatgtgggtaacttactttagaaaatgacttgagtttaggtctcccccacccatatttaatttttcccaagttgctggtagaagagaaatttaaaagtggatcaatcctcacagagagagttctttttgttgttgtttattgaaaaaaatgcaatacaagaagcaagaccaaacagatatctaaacactacaaccacttctactacgaaaggccaaaacagcagacttgattattgcctgtgtagtctaaagattctgccaatctgattctgctgcccgagttcctattttttcaagaaatgtaaacaactacttgatatgattcataattttaaaaaaaatttacaaagctccttcatttttgtcaccaaaataatacatttgagagagatttgtagaaacaaccagcctggggctgagatcctgggcagaaatttcccgtgagcatcaaaaggcgtcagtcaggccgcagctctggctccagttcccgaggtttgttgtctcctcacccccagctgccaagcatccccccaacacacactgatgggcccagcggtggaggggggggtggggacggggatgggtcacggggccctgacgggtcccgcagttaggctccctgagccctcggcttataaatacaggtcttgctttgtgggtgggtgccagagtcctcatgtggcttggaggaaatctttatttctcaaattaaaataaaattgcagcga

SEQ ID NO: 193869 - DNA, 1920 bp, Homo sapiens
  Payload ID: 18291
  Gene Name: transmembrane protein 200C
  Uniprot ID: A6NKL6
  ENST ID: ENST00000383490
  CDS Start-End: 42-1907
cctccatcccagaggctagtcctgcactccaggagctcgccatgatcgccaccggcggcctgctaaggatttccgccagaaagcaggatccactccgccccccaagccagatacccaagcgcaagcggaaagccaagaagaggcgcaagaacgacgtggtggtggtgaaaggcaagctgaagctgtgctccatctcagggctcatcgccctctgtgggatcctggtgctgctggtgggcatagccatggcggtggtgggctactggcccaaggccaccgggaccaatcgggaggggggtaagcagctgccgcctgcgggcagcagccaccgggtcccaaccacggccaacagcagtagcagtggcagcaaaaaccggtccaggagccaccctagggctccagggggtgtcaactccagttccgcgggcgcgcccaggagcacgcctccagcacgagccgcctccccgtcctcctcctccacgtccgtgggcttcttcttccgcatcttctctggctacctgcactctgacaagctcaaggtcttcgggcccctcatcatgggcatcggcatcttcctcttcatctgcgcaaacgcggtcctccacgagaaccgggacaagaagaccaaaatcatcaacctgcgggacctctactccaccgtcatcgacgtgcacagcctccgcgccaaagacctggcggccgccgcggccgccgccgcggccgccgccgcctcttcgtcgtcgtctgcccccgccgcggcgccccccggggccataccgctcaacggcttcctcagctacgtgcagtcgcggggcctggagctgaagcccgggggctgcggtggctccggggacgccttcggagcggcggcgatgctggccaagggctcgtggcctcctcaccccgcggcgccgagcggcggccgccctcggggcgccgcgtccccgccggacctggcctcttccccgcgctgtccgcgggagcccccgagcctggccgaggccgtgtacagcgtctaccgcgagcgctcgggcgtggcaggcagtcgccgggccgccgctgccaccgccgccgcagccgctagcagctgcagcagtccggcgccctgcagcccacccgagagctgggggcgccagagcacggccagctccttcgtggactcctcgctgagcgccttcgcgctgctgcccttgcaagggggccgcgataggggcggggacgcggagggcgcgagctgcagctggcagaggcctccgggggaacgcggctcccaggagatcccgaggggcgagctcgacctgagcatgaccaacctccgcggcgcagagggcagcatgcgcggggcgcgccgggagccggaggagcccgagggcgcggtagcggcgcgcgccgccagggggcagggcggccgcctgcccaggaccggcaggtacgcggccttgcggcgccgcagcaccagcgggctcccggactaccgggcgccgccgtcccccgagcccccgccctccccggggagtgcggacccggactccagccctctggccaaggccgcctccccctcgccacccctgcggctggagggctcgccccccaccaggcgggactccgggagctcccagtcggatgacccatccagcagcaataagggctacacacccctgcgggaggccggcacctccaccgagtcggtcttggacgcagtagctggtcaaacgcgagactctgctgtggccgcccccgttctgggtgcggagcagagctcgccggagggtgccagccaggagccacccacggccgagcaacctcagccggtgcagaggcagtttacaaacaaggagaaactcatcatgatttccaggtctcatgccataggggtagaagaagaactggaaagcacaggcatttagagaaaggggtggg

SEQ ID NO: 193870 - DNA, 10638 bp, Homo sapiens
  Payload ID: 18291
  Gene Name: transmembrane protein 200C
  Uniprot ID: A6NKL6
  ENST ID: ENST00000581347
  CDS Start-End: 647-2512
gcggactctggcccctagctccccgagagcgcccctcggatgctgctggggagaccctccgggcctctctttggggcctctggggcccgcggctcagacagcaacagccgccagtccggccgccccgagccgccgccgcgggctcaactccacccggcggagcccggcgcgccgcagccacacaaaagaggcgcgagggccggcggcgcggccgcaggggcccgcccgggagcgccgcgctaggggacgccgggagctggaggatgagcggcggagaggagggctccgaggcgggatgcgggatgcgggatgcggaggacctgacacttcttggaaactcttggaaatggctcccgccacagcgccggcggggactgcgagcctggggcgggcgctcgcccccgcggggctgctgagtcgcgctcggatgcggggccccggggcgctgtccctgcgctccgccgtcggctcgggctgaaaaagtttctccatggttcctttgtgtcgcccgagcgcccgttcgccggccccgacctccctcggtctccctggcaggaggaggtggctgagcagctagtgggcagttggcgccctccctgtgcaagcctccatcccagaggctagtcctgcactccaggagctcgccatgatcgccaccggcggcctgctaaggatttccgccagaaagcaggatccactccgccccccaagccagatacccaagcgcaagcggaaagccaagaagaggcgcaagaacgacgtggtggtggtgaaaggcaagctgaagctgtgctccatctcagggctcatcgccctctgtgggatcctggtgctgctggtgggcatagccatggcggtggtgggctactggcccaaggccaccgggaccaatcgggaggggggtaagcagctgccgcctgcgggcagcagccaccgggtcccaaccacggccaacagcagtagcagtggcagcaaaaaccggtccaggagccaccctagggctccagggggtgtcaactccagttccgcgggcgcgcccaggagcacgcctccagcacgagccgcctccccgtcctcctcctccacgtccgtgggcttcttcttccgcatcttctctggctacctgcactctgacaagctcaaggtcttcgggcccctcatcatgggcatcggcatcttcctcttcatctgcgcaaacgcggtcctccacgagaaccgggacaagaagaccaaaatcatcaacctgcgggacctctactccaccgtcatcgacgtgcacagcctccgcgccaaagacctggcggccgccgcggccgccgccgcggccgccgccgcctcttcgtcgtcgtctgcccccgccgcggcgccccccggggccataccgctcaacggcttcctcagctacgtgcagtcgcggggcctggagctgaagcccgggggctgcggtggctccggggacgccttcggagcggcggcgatgctggccaagggctcgtggcctcctcaccccgcggcgccgagcggcggccgccctcggggcgccgcgtccccgccggacctggcctcttccccgcgctgtccgcgggagcccccgagcctggccgaggccgtgtacagcgtctaccgcgagcgctcgggcgtggcaggcagtcgccgggccgccgctgccaccgccgccgcagccgctagcagctgcagcagtccggcgccctgcagcccacccgagagctgggggcgccagagcacggccagctccttcgtggactcctcgctgagcgccttcgcgctgctgcccttgcaagggggccgcgataggggcggggacgcggagggcgcgagctgcagctggcagaggcctccgggggaacgcggctcccaggagatcccgaggggcgagctcgacctgagcatgaccaacctccgcggcgcagagggcagcatgcgcggggcgcgccgggagccggaggagcccgagggcgcggtagcggcgcgcgccgccagggggcagggcggccgcctgcccaggaccggcaggtacgcggccttgcggcgccgcagcaccagcgggctcccggactaccgggcgccgccgtcccccgagcccccgccctccccggggagtgcggacccggactccagccctctggccaaggccgcctccccctcgccacccctgcggctggagggctcgccccccaccaggcgggactccgggagctcccagtcggatgacccatccagcagcaataagggctacacacccctgcgggaggccggcacctccaccgagtcggtcttggacgcagtagctggtcaaacgcgagactctgctgtggccgcccccgttctgggtgcggagcagagctcgccggagggtgccagccaggagccacccacggccgagcaacctcagccggtgcagaggcagtttacaaacaaggagaaactcatcatgatttccaggtctcatgccataggggtagaagaagaactggaaagcacaggcatttagagaaaggggtgggttggggaggaggaaagagaaaatgggagaaacgcccacttgaatcagtgcattaacaggtccctgtttcttttgtggactgatccgaggacatcattcaatatccaaagagctgcagaatgttatccttgaattgcgtccacaagattcctgtagataactccaaggatttttttttttaagcaaactagtctttttatgtccgatggtgattgtatgttcaatgaaaaccaaatgtattaaaaggtcagcaatctagtccattagataaaatcttttaattttcttaggatcaaaataatatatttttgacagtaactgtgcactttactccgacttttttttttaatccctcatttcccgacccctgtactctgcgctggttttgcccacagctgcttgcgaatggcaggcttttttctccattcctttgcggaacatagaagagtttgtctcagttctcttagaattgatgttactaactgaagtcaaagccaaaagcatgaataattcaggaacgagcactttccttgccccaccccactgtgctcacccaatgcccaaaagcttcttcatttttaaacgggtgtgtacgttttgctactaggctatgtggtggagactggaggggaccaggaactagatggactgttacattccgaaatttatatcaagtacaccatgctttattgagtgttatcacacctgtattgaaaatagcattaatatttaaaatcttttttaataaaagaagtttccgaacaaacagttaaacataatattgcctcatttgccttggagctagctcatctggtacctctgaaatattttgctgtgacactgctaccaggactgttgtgatcttcccccaaagtactcagcaccattgtcgcatgtccagcgtatttttaagcttaaaatgtagggtagtatttaacatttgggaatttctctttcaaatagaatgaaacgttaagtaaatagtaatatgcctatgatacttctcatttacctgcaagtattaatttgcagagcaccaggcttaatattctcttcccatcctcttggctatcactgattataagttaatggtcttgatccatggcctacatagacaaaaagataatgttttaataatttggtagattgtttacacttgatgtcattaaaagtgaattagttaattttcaagaccaggagacaagatgtcttcattttggtctccttgggcaaagcgctagtcctgtagacagagtgcagattccgagctgagattggacccagctgttggcatctcctagctgtgaggccttgtacaagtcacaaactctgagtctcagtcatctttctgtaaaatgaagagaaccagacatatctcatggagctatgagaggaatagaacagggtcagggtcagaggagggtttatatgtgtggagtttaccagaacccttggcccacaggatgtattcaatagatgggggttattgtaattattattaccattgtaatatattgctgaatgcatagtgtagaagaatggaccttccttgaacttgagctcaagaaagtctagtctgaaatctgggatatccacctattatctgtataaccttagacaaatcacttaatccctctgggcctctggtagatgatataatctctatgatcttcagctctaaaagccttacttaaattcaggctcttgtcctggatgtaatcatatcacatttgtacctacaacttggcaaagagtgaatatacgtcgtcaattaccattagctcaacattctgtaatacactttaaaagggcctaatttattctcagattggatctgcattaaaccggtaactcactttaaggctgtagattaatatattgggctcttctataaagcaaaagtgagtttgcactaaggagtgacatgcaagtgtaataagacctcaaggtagtgttaaatttcaacagtctcaattgctttatcacacttccaaagtaaatgtcaaacttccttaggttttcttctccattaccttgggtactgggtaatttatatactgagatagcgtgttacttcaaggggaaaacaggttctggtgttctacaatactgtttccagtcctcggagaatgcactgtaaatgttacatttatcaaatgctaagtgacatttagcaaataataaagctaatacctcttagcttaactaaggaggggtggacagaatactgtttatatctcacaaacttagttccatatcagataatatctaacttaaccattgaacaatttaactagattttttttctgaagatagacaaagatgagctcaattttccaaatcttgggaggagcctgtgatttctttagacttcagaggaagtgtataagtgtagtaattcacaatcgtaactttcataggagcagaaatctgcaataatgctaattttcactcagtacttactgtgggttcagtactattgtaggagcttggtacacatgatctcagtgaatcctcacagcaactctattgaagtaggatcattcttaccgctgttttgcagagaaagacactgaggtcagaaagatggaattgttgtccagggttacacagctggtaaatggtggatccaggatttacacagagtttggaagattaggtagacctgtcggcagatgctgagttgaaatgggcatttctggagaccatcaaaatactttatatattctttatttcctgccagatccctttccagaccattcttagagaaatgcagaaaattgtcagaatgcacagtcagataaaaagctggagttcgtaaatcttcagacgggcatgaacaagtttttttgtaagtgacttttcaggggtttttgtacacaataaataagagtatttgaaagggccttatagatgatagaatccccccacctttaatttataaatgaggtttctaagatttagaaagatggaacaatttattctgagacaaacagcagtggcaggactcgaatgttaaattaaaataattgcaacaattggtgtgatggtattttttccctgaatttctgtcatgtaccagctgggtgaccatggacaagttacatagtctctctgtgtctcaatttccttttccacactataggaataataatgtccctatcttacaggactggagtaaagattaaatgaactaatatttgtgtaaagtgcttataatgggcttggaacatagagagtattatacaaaggtttgttccttttatttaaaatagaatcaactgctaaacaattacttcatatgaccttcctttttattaatagaataattttaggcttaaaaatctaaagtataaggcaacatagcatagtggctcaaagtgtgacttagggggttatataacattataactgggtcttcacatctagtaaatggagataataaatggaatttggcacatagaattaattatttaaatgaggactaaataaactaatataattaaaggacttagaacaactcctggcacataaaaatattcagtaaatgttaactactattattaaggcaaaatacagaaaagcaattagtaggctaaatttactactcagtagttagggacaaccataaacttaatgtactaaaaagtctttaaaatttaggtatatcagaaagaaaagttagaccttaaaacatgagggcttatgctgctgcaatgcctcctggtagaacatagaactatcaagagctagacatatgctccttatggtcccaggatcataatattatataacaatgaatgaacgcccaaactggcacacttggctatatttagccacaattattgcatttccatttattgaggctagccgtatcagaaaggccagtgaagtccttgaggtctcagccccctattaggcttcaagtaaagatcaggtgctctattgagttatttaaattgtctagacaaaagttttttctatattaatttttttcttcagtaattttgagttctttaagatgcagttttgatttttttttgagctagagaacttaagaaaaaccctctgacacataaaattagtacagactaagtatatggacttgtatttggattaggatagtatttttgccacgatataaaaatacattttataaataagatcttcttgtattaagggttgcagtttaagatggatatttttcttacttataacaaagaataggttgatgtttacggagtttgttttccataaacccagactattttaaaatttttattgctatttggaagggaggaataaaactcattgggtgaatatttagactaaatttttgaatgactaactctgaaaaacaatctaagacaccccaccctaccccagggaagttatctttggggttttttcttcaaaaaggaatgagattcttctttaaattgataagaaaattcaatgttttatctattaagccaccaccagttaaggagtccaactttagtcaaactacctgcaactctgccaagacctgagaagctccttactttctgtatgccatccgttcatctatgacatcagaaaagcactgtgctagtgctgagcccacatgggtgtgaactacagtaggagttacaaatgccagccatcctaaggacttagccttcatcccagagccagaagcatttcaggatttccaccacctggaaagatattgttattccacttgaaatgggctcttagctgttgcccctttaataatgccagctatgacatggacatgggctgattcgttagtaagataacatactgtcattgctggtgaaaagaccgaaaaagattatgcagattctcctggagtgttacaaagtatgggcctgtctcaataacctgtgctttctgatcctacattgtgaccaagtcccacgaaggctgactgtcaataacaagggaggaaaataggcaggcccaggggtggaagaaaaagagcatcctgccgaaagaaaaaaaaagataggccagaatcactagggaagctttttgtttcataaaggagcatttggttactcttgtttacagatcattttgtatgtaaagtgtcttaaaaattgcaataacttttattccttagcaaatattctttttgcaaatgcatggctagacattaattcatatattttttaatatttaagaaattcaacacaacattgtattattgatgcaaacccacttgatactagtaaatgctaaacacctaataatatttaataattgaaaataaatttatgggcaaatttatgaacaatttattttaagttgagaaactccagtatctttaaactatgtctatatgtctaaagaaaaaaaaatctaaaagttattaatgactgatataactaggtcagtcgaagcaaaccggatcagaaaatgactttgtctcagtggaggacttttgctattgttttatgtggctaattgccttttcactcccttttgtatagacacaacctaaaaaacacctgatttcacctgtatagtaagcagctgtgtttcaagcttctgcccttttggtaaactacacaaattgctttcagatgagtttcagatatattatactctgcctatcatgagtcagataggcactgtggtaggtagaaaggacaaaaatatcctttttgtgtctgtgaaagacacaatttctgaccacagaatcttgtaatagtattgtttctgagacaggcacataaaccataattttactataatgtgaatattacaagagagttatgatacaaatcttccagctgagtcttgagaaatgaagaaaatgtcagataggtacaaaaagctgggaaaggtgtgttggccagtggggccagcatgagcaaatgcagaacacaaaacacaatttaaaaagccagatgttcataaggtaattgatatttaattattacctagtatctccatagcatagaggtgtttattttggaaaaaaacaacaaaaacaaaacaaactatatatctctgatctatagatatagataaatagatgtctcctttataagtagcagaaggatattcgaaattaaaattacgatggtttggcattaaaatgctcaaaatatatatacctacattctatatttaatgattcatttttaactgaccttcactagcagggcttcttaactgagaagtatcagtacatagaactaacaaactaaattcttattggacctaagctatctttatgagcaagaatgatttttgctgaattatacattgctttaaaattaccattaaatttgaaatttcagattctggaaatcatttccctagacgtgtgtataaggagataaaactgagaggagaatctgtcacttggcaacactgtttgcatcatggatcaagtgtgttgatccatgtaccgtaaagactggagacagcataaacttgggggttgttctatcaagccacaggtcatttttcagaatctacacatgataactgaatatatttctacagatttctacatcaattttgcagcagcatttatatcaggaaacataaataatttatctttgttaataataaacatccgtttttttgttcctcacgtatgcgttcatagcaaaaggaaaggttaagacccagacatactgtcgcaaatgtgtatgagtattgtttgtggactggcaccaaaaacactatgccttttgatttttaaacagccagtcattttgagatagtcactgaaaacagatttggccagaatagcaaagtatagatgcagcttaatactttgtttatgcacaaagctgcaaacaaaaagatacaggcaaaaaacctgcttttcaaaacaaatattctattaaagtaaaaaaaaaataattttattaacaaaagtataattttgttagtttgaattcctcacataattacttgatttcttcaaaatctttttagtgcataaacacagtcaaggcaaacatataaaatgtgttttctaatccatgaaagtgagaattctgcaaaaccactttgcattatagataaaatttaatagatatcatcagttatggtttattgtcagagccactaataattcttccataaggttatatctattggtaagaagattaaaaattggaaatgctggtagataaagtgctgtggttaatatgtcatggtaaatgatatcaggaagcacatagaattcttgataaagagcaagaaaattcaaaagactaatttggtgacctaaatactaatccttctgcttatgtaaccattgcaggttaatgtgtttggagcactaaatacgacttgagtgcttgctcatttgattgtacaatttattctctttgtatttctagttttatttcagcttcatgcctgagaacatctcttgatttattaatcttgcttgggattactactttaaaaaattgaatgcatttatagtgatagtaatagtaataataataatagtcttaaaaaagaccgaaaagtaatttgagcactaataataagtaattgtttgcgtcccaattttttatatcttctcaaatagagagtaaattgactgatatcttctggaaacatgtgccactgaaaagccaaaacacaattgaagtgcatgtttgcaatctcctcgttcctcaaatcccatggatgtccaaaactagaacctttctttgattcatgtaggatattctgactaagtcagagagatgctggtgaatgctttccaagatttcttttattataaagtgaatggaaaggacatttaataatgctatacctgcctgaaaaaaatgccagctttcattaagtcagtggcaattaaatgcaacacttggcaaataaattgaacaaagcatctggctagcctgtaagtatgaatcatcttcaatggaagtaccaaattatagcaaaaaaaaataaagggatataaaaaggaaaataaaattcagacatgattagggccatgagtaaaaataatccaagttgatatgtggcaacttgtaatgcagcataattttagaaaattatttagtgaatgtataaatgtgacatgcctgaaaaatgttaattaaactggtttacgcaatggt

SEQ ID NO: 193871 - DNA, 3776 bp, Homo sapiens
  Payload ID: 18292
  Gene Name: transmembrane protein 201
  Uniprot ID: Q5SNT2
  ENST ID: ENST00000340381
  CDS Start-End: 10-2010
cggagagccatggagggagtgagcgcgctgctggcccgctgccccacggccggcctggccggcggcctgggggtcacggcgtgcgccgcggccggcgtgttgctctaccggatcgcgcggaggatgaagccaacgcacacgatggtcaactgctggttctgcaaccaggatacgctggtgccctatgggaaccgcaactgctgggactgtccccactgcgagcagtacaacggcttccaggagaacggcgactacaacaagccgatccccgcccagtacttggagcacctgaaccacgtggtgagcagcgcgcccagcctgcgcgacccttcgcagccgcagcagtgggtgagcagccaagtcctgctgtgcaagaggtgcaaccaccaccagaccaccaagatcaagcagctggccgccttcgctccccgcgaggagggcaggtatgacgaggaggtcgaggtgtaccggcatcacctggagcagatgtacaagctgtgccggccgtgccaagcggctgtggagtactacatcaagcaccagaaccgccagctgcgcgccctgttgctcagccaccagttcaagcgccgggaggccgaccagacccacgcacagaacttctcctccgccgtgaagtccccggtccaggtcatcctgctccgtgccctcgccttcctggcctgcgccttcctactgaccaccgcgctgtatggggccagcggacacttcgccccaggcaccactgtgcccctggccctgccacctggtggcaatggctcagccacacctgacaatggcaccacccctggggccgagggctggcggcagttgctgggcctactccccgagcacatggcggagaagctgtgtgaggcctgggcctttgggcagagccaccagacgggcgtcgtggcactgggcctactcacctgcctgctggcaatgctgctggctggccgcatcaggctccggaggatcgatgccttctgcacctgcctgtgggccctgctgctggggctgcacctggctgagcagcacctgcaggccgcctcgcctagctggctagacacgctcaagttcagcaccacatctttgtgctgcctggttggcttcacggcggctgtggccacaaggaaggcaacgggcccacggaggttccggccccgaaggttcttcccaggagactctgccggccttttccccaccagccccagcttggccatccctcacccgagtgtcggaggctctccagcgtctctgttcatccccagcccgcccagcttcctgcccctcgccaaccagcagctcttccggtctcctcgacggacctcaccctcctcattgcctggccgcctcagccgggccctctctctgggaaccataccctctctgactcgagcagactccggctatctgttcagcggtagccgcccaccatctcaggtgtctcgatctggggagtttcctgtttcagattacttctctcttctgtcggggagctgcccctcctccccactcccttccccagcgccttccgtggccggctcggtggcctccagctccggctctctgcgccaccgcaggcccctcatcagccctgcccggctcaacctgaagggacagaagctgctgctgttcccgtcaccccctggagaggcccccaccacgcccagcagctccgatgagcactcgcctcacaacggcagcctcttcaccatggagccgccccatgttccccggaagccgcccctgcaggacgtgaagcacgccctggacctgagatccaagctggaaagaggcagtgcctgcagcaaccgctccatcaagaaagaggacgactcttcccagtcatctacctgtgtggtggacaccaccaccaggggctgctcggaggaggccgccacctggagaggtcgtttcggcccttccctggtccggggcctcctggccgtgagcttggccgccaacgccctgttcacctcggtgtttctgtaccagagcctgcgctgacccaccgttggagcccctcggaggggagcaacccggtgcctgctgcttcaccactgccggcctcaggaccctccctggaggggctgccacctctgccctcatctccagggccttgacctcactggactgtgactgtcctcaggacacctgcccctcctcacctaacggactgcagggctgagcatgtgtctgaggtcacactctctgcccactcacctccttggctgacatcggttgtgtttggtgctgacactctgatcccgaagccagggagccccaaggggctgcatgaccctggggtgccccacacagttcagccctgcctggcagggacgccagtactactgtaactgcagcaggagctgcccggcctgccttctggccccacgcccacaggcgtagtcacatctttgtactgtactcccctgtctcacctggggcaacctcagagccccactaagctgaaggccccctgggggagggggaagcatggtccttatcatctgccctatcttgccccttcctgtggagtgggcagaagggctcccgggatcctcagagctcccaggtctgagcagccaaaggcccagctgggcctccaggaccagcgcgagcccctgccccaccctcccctgccccatgtgccctgctttgtgacctctgttgaccttcctggaagcagccccattaccctgagaatgcggagcgccctggcccacctcgccctgtgtttccaggcctgcacgtctggtccttcagctgcacatggaactgcagggcaggctggcggggggccttcagatctcagatgagactgcaccccttcgaccaccctactgggcacctgcctccagcccctgagaactccatcttcccctagttctgcccaggagcccctgagaaccccatcttcccctggttctcttgcccactcccctgctggggctccttcctggcactgaggaggggcgctcccaatgctgtgaggcagcggggagggaccgtgcacccgtggctatcagagcccctccgctgtcccaccctgggcctgggacacgggcctggggcagtgtgtgtctgctggtcatgtgctggtgccagttggggaggaatcagctgtctcggtggattctgagactcactgtggggcgggaagaagggtcttcactctgccattcagggataaagtttaattttatttttctacacattttgccaggtcaggcattttgctagtaagcaggatgcccccaactctccctgccatggaggattcttttttttaagctttgggtgcttttttaatacttttttttttaatgtggggaaggagcttgctctgacgtcaccctcctctcccctgactcctgtcctgagagctgtggatgccgcctcctgccctgcctacccctgaaacgtggggaatgggggccccaggacagcatcaggacttttgagtccagctgccagcaatggttccaactcggaggcagcgcctcttggtccccatttctgtatagcaggcgtgtgtgtgtgtgtcgaggttttttattttttgcttaatcaaactccattcccaaatgcactccatctctggctctgagggcgctccctcctctcagccgggcagcctggcctctcctgcccagacctgcggtcccagcatcccccagagccagggaacaggcccagcgggagggggttttatgttttgtttcaaacagaaaacacaaccttatttttctttacaaaagcaaaaaaggaaa

SEQ ID NO: 193872 - DNA, 3851 bp, Homo sapiens
  Payload ID: 18292
  Gene Name: transmembrane protein 201
  Uniprot ID: Q5SNT2
  ENST ID: ENST00000340305
  CDS Start-End: 10-1188
cggagagccatggagggagtgagcgcgctgctggcccgctgccccacggccggcctggccggcggcctgggggtcacggcgtgcgccgcggccggcgtgttgctctaccggatcgcgcggaggatgaagccaacgcacacgatggtcaactgctggttctgcaaccaggatacgctggtgccctatgggaaccgcaactgctgggactgtccccactgcgagcagtacaacggcttccaggagaacggcgactacaacaagccgatccccgcccagtacttggagcacctgaaccacgtggtgagcagcgcgcccagcctgcgcgacccttcgcagccgcagcagtgggtgagcagccaagtcctgctgtgcaagaggtgcaaccaccaccagaccaccaagatcaagcagctggccgccttcgctccccgcgaggagggcaggtatgacgaggaggtcgaggtgtaccggcatcacctggagcagatgtacaagctgtgccggccgtgccaagcggctgtggagtactacatcaagcaccagaaccgccagctgcgcgccctgttgctcagccaccagttcaagcgccgggaggccgaccagacccacgcacagaacttctcctccgccgtgaagtccccggtccaggtcatcctgctccgtgccctcgccttcctggcctgcgccttcctactgaccaccgcgctgtatggggccagcggacacttcgccccaggcaccactgtgcccctggccctgccacctggtggcaatggctcagccacacctgacaatggcaccacccctggggccgagggctggcggcagttgctgggcctactccccgagcacatggcggagaagctgtgtgaggcctgggcctttgggcagagccaccagacgggcgtcgtggcactgggcctactcacctgcctgctggcaatgctgctggctggccgcatcaggctccggaggatcgatgccttctgcacctgcctgtgggccctgctgctggggctgcacctggctgagcagcacctgcaggccgcctcgcctagctggctagacacgctcaagttcagcaccacatctttgtgctgcctggttggcttcacggcggctgtggccacaaggaaggcaacgggcccacggaggttccggccccgaaggtcagagaagcagccatgactgcggggggaggacacacggatgctcaggcccaggctttgccaggtccgaagcgggcccctctctgtcctgcctcttttcacctgctcacgccctcccacccccaccctacagccccaggtcctggcccagtccctccactgcctcgaagagtcagtctgccctgccttttcctttcgggcaccaccagccatccccgagtgccctgtagccactcaccactgctgccacctctctggccaatggccctttcactggcctggtgactggaatgtgggcagcgcccacacaggctctggcccatggcttcctactggcagctccaggcacccccctctcaccacgccgtttgctggctctgacactgttgggtgagggtcctggtcctgctgtcttcccttctggcctctgcacaggggtggtgacagtggctacaggctgggcccctggcgtgccctgaccgtgcagcagagtgaggctggggcagcagagagccccagcctcacccctgaggagcacctgtggtctgtccccttggtcctgcttatggctggaccggccctgcaggaggtggtggagccgtgaaggaggccgagctgcagctctggctgctgcttggcctcctgctccaagaccctcccgagtccccggaaatggagagtgcagttcttgggcccagcctggccttcgccatgagtttggggagcgagaccccacctgagacaggcagtaggagcctgtgctgaccttggggaatctgagcttttccaagggtaaggggcccagggtatgcaggccttcagtgacatcaggtcgttgtcatcctttccctccctgacctgtcacgagcctctgcaggtgcctgctcaccatggcccagcgccactctgtcctccgactcaggtgagggggcagcccacagacctgctcctcagtagcagggcctggccaggcccctgctgttctcagcctcagtttgccatctatgaaatgaggtggacccctctccatagcccttgggtgccagctcagtgggtgtggggatcacatgaggtggctcatgaggacacactctggaagtcgaggggctgccacgtgcagaggaagttcccggcctgggggctttatccaggggtcccagtcgagagtggcccgaggccgtccctcaccgggcatgttccctctggctgcccactccctcagggcccacatgtcctgccactcgccactctgagcacgagttcaccttccagatgtggccagggtgtgccagctcctctctcctgtgcgttggaaccccgggggaggcaagagcagatcacaggtgcatgagggttacacccgtcacctgggtctgccgggatgggttgggggggcaggtgccaggcctcactgctgtgaatctgccacgcctgggggtcctagaggctgccccaccccagtgattgggtagcagctcacatcccacccagcttcacaagtgaggaacccaggtgcatcgggagaccctcgggggcttctgtggcctctgtgcccgatgacctgcgtggcttcagacaaggccccagcgttactgggctcagcttgttgttctgtgtggagcgtgaggtgagaaaacccctctgaaaagatgtggtcggggccacgcttcccactggttctgcagtgaggagttggggcgggtgagccaaagcggccccccatggtgtctacctgaggggcagggaaccgcctgcctgtgcactcacgccaccccccagcccacaaagagcccatctgagagaaggacgtggtggagccaggacgggaaagcgtcctgtcggctggccatgctgttgcttgcgtctcgaatcttcggttctcgaggaagtgttgacagtgtgatgctaatgtctgcttttcttggcgttgggtagaagcaggacatctgtgtgtatgtgcgtatttaaattagattatttataataaccagagccagccctcgcgctggccaggatcctcctgccgagctgatgtcgctcctgccctctgccggggtccggaagcgacatctcaggaggtagctctcagcagagtgaggattcctgcctttcgtagagttttgtgtgactttttaaattattcatgtgtcccttaaaagtttcactacgtggagaaaattccagcaccaagtgttgtggcaacagctgagagagtgcaggcaccactgtgttgtggcttgttgaccgggaatgtgtcacccctgccagggaactcttctcctcgcgggggacttgggatggccatcagaccttctagggtctggctggggtcatcctaggtatgggtgaccgtccctgagacataagcgaggtagattcagccatcctcaccctcagacttgaggtccccacccaggccaagccggccccccgtaccccttgcctgggagcaaaccgccaggacgcagcctccacgccgcacctgccacattcagccctgcccaggaaggaacacatgacccttctgtctgtgactgttgctgagtctctgtctcatgtcgtagaattgtggataattgtctagtgaccctctcatcactgtaaccatcgcgcctggcctagatgtcgtgttttggatgctgtgttttcaataaatgcctctggggccctgcttttacccgc

SEQ ID NO: 193873 - DNA, 3447 bp, Homo sapiens
  Payload ID: 18292
  Gene Name: transmembrane protein 201
  ENST ID: ENST00000416541
  CDS Start-End: 1-1657
ggagcacctgaaccacgtggtgagcagcgcgcccagcctgcgcgacccttcgcagccgcagcagtgggtgagcagccaagtcctgctgtgcaagaggtgcaaccaccaccagaccaccaagatcaagcagctggccgccttcgctccccgcgaggagggcaggtatgacgaggaggtcgaggtgtaccggcatcacctggagcagatgtacaagctgtgccggccgtgccaagcggctgtggagtactacatcaagcaccagaaccgccagctgcgcgccctgttgctcagccaccagttcaagcgccgggaggccgaccagacccacgcacagaacttctcctccgccgtgaagtccccggtccaggtcatcctgctccgtgccctcgccttcctggcctgcgccttcctactgaccaccgcgctgtatggggccagcggacacttcgccccaggcaccactgtgcccctggccctgccacctggtggcaatggctcagccacacctgacaatggcaccacccctggggccgagggctggcggcagttgctgggcctactccccgagcacatggcggagaagctgtgtgaggcctgggcctttgggcagagccaccagacgggcgtcgtggcactgggcctactcacctgcctgctggcaatgctgctggctggccgcatcaggctccggaggatcgatgccttctgcacctgcctgtgggccctgctgctggggctgcacctggctgagcagcacctgcaggccgcctcgcctagctggctagacacgctcaagttcagcaccacatctttgtgctgcctggttggcttcacggcggctgtggccacaaggaaggcaacgggcccacggaggttccggccccgaaggttcttcccaggagactctgccggccttttccccaccagccccagcttggccatccctcacccgagtgtcggaggctctccagcgtctctgttcatccccagcccgcccagcttcctgcccctcgccaaccagcagctcttccggtctcctcgacggacctcaccctcctcattgcctggccgcctcagccgggccctctctctgggaaccataccctctctgactcgagcagattacttctctcttctgtcggggagctgcccctcctccccactcccttccccagcgccttccgtggccggctcggtggcctccagctccggctctctgcgccaccgcaggcccctcatcagccctgcccggctcaacctgaagggacagaagctgctgctgttcccgtcaccccctggagaggcccccaccacgcccagcagctccgatgagcactcgcctcacaacggcagcctcttcaccatggagccgccccatgttccccggaagccgcccctgcaggacgtgaagcacgccctggacctgagatccaagctggaaagaggcagtgcctgcagcaaccgctccatcaagaaagaggacgactcttcccagtcatctacctgtgtggtggacaccaccaccaggggctgctcggaggaggccgccacctggagaggtcgtttcggcccttccctggtccggggcctcctggccgtgagcttggccgccaacgccctgttcacctcggtgtttctgtaccagagcctgcgctgacccaccgttggagcccctcggaggggagcaacccggtgcctgctgcttcaccactgccggcctcaggaccctccctggaggggctgccacctctgccctcatctccagggccttgacctcactggactgtgactgtcctcaggacacctgcccctcctcacctaacggactgcagggctgagcatgtgtctgaggtcacactctctgcccactcacctccttggctgacatcggttgtgtttggtgctgacactctgatcccgaagccagggagccccaaggggctgcatgaccctggggtgccccacacagttcagccctgcctggcagggacgccagtactactgtaactgcagcaggagctgcccggcctgccttctggccccacgcccacaggcgtagtcacatctttgtactgtactcccctgtctcacctggggcaacctcagagccccactaagctgaaggccccctgggggagggggaagcatggtccttatcatctgccctatcttgccccttcctgtggagtgggcagaagggctcccgggatcctcagagctcccaggtctgagcagccaaaggcccagctgggcctccaggaccagcgcgagcccctgccccaccctcccctgccccatgtgccctgctttgtgacctctgttgaccttcctggaagcagccccattaccctgagaatgcggagcgccctggcccacctcgccctgtgtttccaggcctgcacgtctggtccttcagctgcacatggaactgcagggcaggctggcggggggccttcagatctcagatgagactgcaccccttcgaccaccctactgggcacctgcctccagcccctgagaactccatcttcccctagttctgcccaggagcccctgagaaccccatcttcccctggttctcttgcccactcccctgctggggctccttcctggcactgaggaggggcgctcccaatgctgtgaggcagcggggagggaccgtgcacccgtggctatcagagcccctccgctgtcccaccctgggcctgggacacgggcctggggcagtgtgtgtctgctggtcatgtgctggtgccagttggggaggaatcagctgtctcggtggattctgagactcactgtggggcgggaagaagggtcttcactctgccattcagggataaagtttaattttatttttctacacattttgccaggtcaggcattttgctagtaagcaggatgcccccaactctccctgccatggaggattcttttttttaagctttgggtgcttttttaatacttttttttttaatgtggggaaggagcttgctctgacgtcaccctcctctcccctgactcctgtcctgagagctgtggatgccgcctcctgccctgcctacccctgaaacgtggggaatgggggccccaggacagcatcaggacttttgagtccagctgccagcaatggttccaactcggaggcagcgcctcttggtccccatttctgtatagcaggcgtgtgtgtgtgtgtcgaggttttttattttttgcttaatcaaactccattcccaaatgcactccatctctggctctgagggcgctccctcctctcagccgggcagcctggcctctcctgcccagacctgcggtcccagcatcccccagagccagggaacaggcccagcgggagggggttttatgttttgtttcaaacagaaaacacaaccttatttttctttacaaaagcaaaaaaggaaaccaaaaaagatacagcctttgaat

SEQ ID NO: 193874 - DNA, 893 bp, Homo sapiens
  Payload ID: 18292
  Gene Name: transmembrane protein 201
  ENST ID: ENST00000508400
  CDS Start-End: 1-499
attgcctggccgcctcagccgggccctctctctgggaaccataccctctctgactcgagcagactccggctatctgttcagcggtagccgcccaccatctcaggtgtctcgatctggggagtttcctgtttcagattacttctctcttctgtcggggagctgcccctcctccccactcccttccccagcgccttccgtggccggctcggtggcctccagctccggctctctgcgccaccgcaggcccctcatcagccctgcccggctcaacctgaagggacagaagctgctgctgttcccgtcaccccctggagaggcccccaccacgcccagcagctccgatgagcactcgcctcacaacggcagcctcttcaccatggagccgccccatgttccccggaagccgcccctgcaggacgtgaagcacgccctggttgaccttcagggtcctctgtttcttggaactgatcgaaaacacatcacgcattgccagacctgagatccaagctggaaagaggcagtgcctgcagcaaccgctccatcaagaaagaggacgactcttcccagtcatctacctgtgtggtggacaccaccaccaggggctgctcggaggaggccgccacctggagaggtcgtttcggcccttccctggtccggggcctcctggccgtgagcttggccgccaacgccctgttcacctcggtgtttctgtaccagagcctgcgctgacccaccgttggagcccctcggaggggagcaacccggtgcctgctgcttcaccactgccggcctcaggaccctccctggaggggctgccacctctgccctcatctccagggccttgacctcactggactgtgactgtcctcaggacacctgcccctcctcaccta

SEQ ID NO: 193875 - DNA, 1012 bp, Homo sapiens
  Payload ID: 18293
  Gene Name: transmembrane protein 202
  Uniprot ID: A6NGA9
  ENST ID: ENST00000341689
  CDS Start-End: 55-876
gtgtgaggagatgcagagacaaattccgtggcagttagagaactaactgccaagatggagcgaagggaacatttaaccttgactttccacagtcctgaggttcccaaaataaaggggaaccggaaataccaaaggcctaccgtccctgccaagaaacatccaagtgcctcgatgtcatgccaaaggcagcagcagcttatggatcaggcacacatctacatccgaacgctctgtggcagcctctgtagttttagcctcctaatgctgatcgccatgtccccactgaactgggtacagtttctggtgatcaagaatggccttgagctctacgcaggactctggaccttatgcaaccatgagctgtgctggagccacacacccaagccaccctattatctccaatattccagggccttctttctcatctctgtctttaccatacttactggccttggctggctcttcagctcttggatccttaatcgaggaagcatgaccaccaacttggatctgaaggtatccatgctcagcttcatctcagctacctgcttgctcctctgcctcaacctgtttgtggcacaggttcactggcatactagggatgccatggagtcagatctcctatggacctattatcttaactggtgcagtgacatcttttacatgtttgctgggatcatctctcttctcaactacttaacttccagatcgcctgcctgtgatgaaaacgtcactgtgattccaacagagagatcaaggctgggggttggtccggtgactacagtatcacctgctaaagatgaagggccaaggtctgagatggaatctctaagtgtgagagagaaaaatttaccaaagtcaggactgtggtggtgataggaaaacctaactatagcttgtcttaaaagcaggggagaagctgagttgggaatggtcacataaattctgggaaactctcctaatatcatgtccatattacttgaggagacagcattaaagctgatgaaatgtc

SEQ ID NO: 193876 - DNA, 588 bp, Homo sapiens
  Payload ID: 18293
  Gene Name: transmembrane protein 202
  ENST ID: ENST00000567679
  CDS Start-End: 19-204
agagaactaactgccaagatggagcgaagggaacatttaaccttgactttccacagtcctgaggttcccaaaataaaggggaaccggaaataccaaaggattatctccaatattccagggccttctttctcatctctgtctttaccatacttactggccttggctggctcttcagctcttggatccttaatcgaggaagcatgaccaccaacttggatctgaaggtatccatgctcagcttcatctcagggatcatctctcttctcaactacttaacttccagatcgcctgcctgtgatgaaaacgtcactgtgattccaacagagagatcaaggctgggggttggtccggtgactacagtatcacctgctaaagatgaagggccaaggtctgagatggaatctctaagtgtgagagagaaaaatttaccaaagtcaggactgtggtggtgataggaaaacctaactatagcttgtcttaaaagcaggggagaagctgagttgggaatggtcacataaattctgggaaactctcctaatatcatgtccatattacttgaggagacagcattaaagctgatgaaatgtc

SEQ ID NO: 193877 - DNA, 724 bp, Homo sapiens
  Payload ID: 18293
  Gene Name: transmembrane protein 202
  ENST ID: ENST00000568167
  CDS Start-End: 23-208
agttagagaactaactgccaagatggagcgaagggaacatttaaccttgactttccacagtcctgaggttcccaaaataaaggggaaccggaaataccaaaggattatctccaatattccagggccttctttctcatctctgtctttaccatacttactggccttggctggctcttcagctcttggatccttaatcgaggaagcatgaccaccaacttggatctgaaggtatccatgctcagcttcatctcagctacctgcttgctcctctgcctcaacctgtttgtggcacaggttcactggcatactagggatgccatggagtcagatctcctatggacctattatcttaactggtgcagtgacatcttttacatgtttgctgggatcatctctcttctcaactacttaacttccagatcgcctgcctgtgatgaaaacgtcactgtgattccaacagagagatcaaggctgggggttggtccggtgactacagtatcacctgctaaagatgaagggccaaggtctgagatggaatctctaagtgtgagagagaaaaatttaccaaagtcaggactgtggtggtgataggaaaacctaactatagcttgtcttaaaagcaggggagaagctgagttgggaatggtcacataaattctgggaaactctcctaatatcatgtccatattacttgaggagacagcattaaagctgatgaaatgtc

SEQ ID NO: 193878 - DNA, 1557 bp, Homo sapiens
  Payload ID: 18294
  Gene Name: transmembrane protein 203
  Uniprot ID: Q969S6
  ENST ID: ENST00000343666
  CDS Start-End: 225-635
ggcgtccgatcgaggcgggcgttcacgggcggccagggttgagtcccgggtcggggccgggggattgccggcgcatcagggccgagggctggggctggcggggccgctcgctgcctctcgctcgcagcagcggcggcaggcgcgggcgagggccacggggagaggagacgcagccccgcgggtggcacgctcggccgggccccggcccgcgctcaacgggcgcgatgctcttctcgctccgggagctggtgcagtggctaggcttcgccaccttcgagatcttcgtgcacctgctggccctgttggtgttctctgtgctgctggcactgcgtgtggatggcctggtcccgggcctctcctggtggaacgtgttcgtgcctttcttcgccgctgacgggctcagcacctacttcaccaccatcgtgtccgtgcgcctcttccaggatggagagaagcggctggcggtgctccgccttttctgggtacttacggtcctgagtctcaagttcgtcttcgagatgctgttgtgccagaagctggcggagcagactcgggagctctggttcggcctcattacgtccccgctcttcattctcctgcagctgctcatgatccgcgcctgtcgggtcaactagcctcaccgaggtgccggagagggagcgctggacaactagaatgttgacctcgagccgaggccctacttgcagcgcaccggaggagaggctctctagtctgaaggcaccgccggcttgcgccgagctgagtgccgggtttccctattccaatcctgtttgaaatggtttcttcagcagggcttaaaagagcagccttcatcctgaaaatgtatttccttttgtttaatgctttgagtagataatcctgaattgaggtcatgaggaggccccccaggccagacagtcctgaacccctctgacacttggaaactgaatataagtaaaatgtccaggtggactctgagtatttcctgtggatcctgggaaagtactgttgcacaaaggctgcaaagctggactcaggaatgtcctccaaccagcagcgctgacctaagagctccctgtgccgtctatccagaccagacttcggtagatgcctttgttagatctatcacatgtaaacgagcttgtatctccttccctgtgccacgagagagattggctttttattccagtctaggcagagacagaagaatgttgaataagagcacgattagagtcctgtctggttatctgttgcccaagaaaagaactctgctgtccaggcactgcttggcttactatcccagcaaagactgcagttttgtggacttttgaccaccttgggctggcactcttagcacacctgagacagatttaagcctccctaagagactgaagagaggaacaggtgtcagatactcataggcactgagatctacaaatgggaagcttgtgagtggcccatctttgttggcctacgaactttggtttgatgccagtcaggtgccacatgagaacctttgctgagatgcaaataaagtaagagaatgttttcctgaaa

SEQ ID NO: 193879 - DNA, 1686 bp, Homo sapiens
  Payload ID: 18295
  Gene Name: transmembrane protein 204
  Uniprot ID: Q9BSN7
  ENST ID: ENST00000253934
  CDS Start-End: 452-1132
acagtcttagcagggcagcagccctgcagcctccccgctggcacggtcacaggccgctctgaggactggagggaccagccgcccacagagccccgagcccgtggtcccggcgagaagaggcacgcgcggcacaggccggcctccgcttcccgggaagacggcgcactcctggccctgggttcttgctgctgcccaccctctgctccctgggatgggccccgaggcgagcagcttcagcacaggcctggccctgctccaggtgcaggaaggaggataaggccgggccgagaggcggcacacctggaccatcccatgggcctccgcccgcgccgccccgaggatgagtggtgatgtcctctagccacccctagcagcgtcggctctccctggacgtgcggccgcggactgggacttggctttctccggataagcggcggcaccggcgtcagcgatgaccgtgcagagactcgtggccgcggccgtgctggtggccctggtctcactcatcctcaacaacgtggcggccttcacctccaactgggtgtgccagacgctggaggatgggcgcaggcgcagcgtggggctgtggaggtcctgctggctggtggacaggacccggggagggccgagccctggggccagagccggccaggtggacgcacatgactgtgaggcgctgggctggggctccgaggcagccggcttccaggagtcccgaggcaccgtcaaactgcagttcgacatgatgcgcgcctgcaacctggtggccacggccgcgctcaccgcaggccagctcaccttcctcctggggctggtgggcctgcccctgctgtcacccgacgccccgtgctgggaggaggccatggccgctgcattccaactggcgagttttgtcctggtcatcgggctcgtgactttctacagaattggcccatacaccaacctgtcctggtcctgctacctgaacattggcgcctgccttctggccacgctggcggcagccatgctcatctggaacattctccacaagagggaggactgcatggccccccgggtgattgtcatcagccgctccctgacagcgcgctttcgccgtgggctggacaatgactacgtggagtcaccatgctgagtcgcccttctcagcgctccatcaacgcacacctgctatcgtggaacagcctagaaaccaagggactccaccaccaagtcacttcccctgctcgtgcagaggcacgggatgagtctgggtgacctctgcgccatgcgtgcgagacacgtgtgcgtttactgttatgtcggtcatatgtctgtacgtgtcgtgggccaacctcgttctgcctccagctttcctggttagcgcaacgcggctccacgaccacacgcacttcagggtggaagctggaagctgagacacaggttaggtggcgcgaggctgccctgcgctccgctttgctttgggattaatttattctgcatctgctgagaggggcaccccagccatatcttacactttggtaaagcagaaaaccaggaaaattttcttaaaatatccacaatattccttgagtgagtcagaatctatagccggttagtgatggtttcagacagaatcgtgttcgtgtctgttttgctcgattcttttcctaagttaaataaatgcaagcctctgaactctgtctataa

SEQ ID NO: 193880 - DNA, 1938 bp, Homo sapiens
  Payload ID: 18295
  Gene Name: transmembrane protein 204
  Uniprot ID: Q9BSN7
  ENST ID: ENST00000566264
  CDS Start-End: 704-1384
acatcctgttggtgtctggctgccgcggcagggccgctatttgttgcggttggctacgccttccagctcaccaaaaacagtctcaaaaacaaccatttcctctctgctgagagccagggaaggcgagctctgcgcacacgggcgtccctgcagcagccactctgctttccaggaccggccaactgccctggaggcatccacacaggggcccaggcagcacagaggagctgtgaacccgctccacaccggccaccctgcccggagcctggcactcacagcaggccggtgctaaggagtgtggcgcgggctcgactcccactgctgccggcctcccgagtgactctgttttccactgctgcaggcgagaagaggcacgcgcggcacaggccggcctccgcttcccgggaagacggcgcactcctggccctgggttcttgctgctgcccaccctctgctccctgggatgggccccgaggcgagcagcttcagcacaggcctggccctgctccaggtgcaggaaggaggataaggccgggccgagaggcggcacacctggaccatcccatgggcctccgcccgcgccgccccgaggatgagtggtgatgtcctctagccacccctagcagcgtcggctctccctggacgtgcggccgcggactgggacttggctttctccggataagcggcggcaccggcgtcagcgatgaccgtgcagagactcgtggccgcggccgtgctggtggccctggtctcactcatcctcaacaacgtggcggccttcacctccaactgggtgtgccagacgctggaggatgggcgcaggcgcagcgtggggctgtggaggtcctgctggctggtggacaggacccggggagggccgagccctggggccagagccggccaggtggacgcacatgactgtgaggcgctgggctggggctccgaggcagccggcttccaggagtcccgaggcaccgtcaaactgcagttcgacatgatgcgcgcctgcaacctggtggccacggccgcgctcaccgcaggccagctcaccttcctcctggggctggtgggcctgcccctgctgtcacccgacgccccgtgctgggaggaggccatggccgctgcattccaactggcgagttttgtcctggtcatcgggctcgtgactttctacagaattggcccatacaccaacctgtcctggtcctgctacctgaacattggcgcctgccttctggccacgctggcggcagccatgctcatctggaacattctccacaagagggaggactgcatggccccccgggtgattgtcatcagccgctccctgacagcgcgctttcgccgtgggctggacaatgactacgtggagtcaccatgctgagtcgcccttctcagcgctccatcaacgcacacctgctatcgtggaacagcctagaaaccaagggactccaccaccaagtcacttcccctgctcgtgcagaggcacgggatgagtctgggtgacctctgcgccatgcgtgcgagacacgtgtgcgtttactgttatgtcggtcatatgtctgtacgtgtcgtgggccaacctcgttctgcctccagctttcctggttagcgcaacgcggctccacgaccacacgcacttcagggtggaagctggaagctgagacacaggttaggtggcgcgaggctgccctgcgctccgctttgctttgggattaatttattctgcatctgctgagaggggcaccccagccatatcttacactttggtaaagcagaaaaccaggaaaattttcttaaaatatccacaatattccttgagtgagtcagaatctatagccggttagtgatggtttcagacagaatcgtgttcgtgtctgttttgctcgattcttttcctaagttaaataaatgcaagcctctgaactctgtctataa

SEQ ID NO: 193881 - DNA, 1034 bp, Homo sapiens
  Payload ID: 18296
  Gene Name: transmembrane protein 205
  Uniprot ID: Q6UW68
  ENST ID: ENST00000354882
  CDS Start-End: 428-997
ggtttcctcggggctttcgggatcttcacctaatatccggtattattttatgagaggagtggtcttggctgtcagaactggatccctggggtgatatttgggaattagtggagtgatctctgaagacctagggctatgatctggagctgctgtggctgaaatttggggcctctgaagtggcatggagattgaggtccagagagcctgagatcttgagggctgacatttggagagatggggtcgagggttgtctttgggccttgactgctttgggcctttctcactctcattcccgggatgctttgccagaatctctgctggattggccgtaaccctgtccccgagcgggctcacagggtctgaaggccacgcatgaggcaaaggtaaagttctgagccacccggtgcctccttcccaggactgcaagatggaggaaggcgggaacctaggaggcctgattaagatggtccatctactggtcttgtcaggtgcctggggcatgcaaatgtgggtgaccttcgtctcaggcttcctgcttttccgaagccttccccgacataccttcggactagtgcagagcaaactcttccccttctacttccacatctccatgggctgtgccttcatcaacctctgcatcttggcttcacagcatgcttgggctcagctcacattctgggaggccagccagctttacctgctgttcctgagccttacgctggccactgtcaacgcccgctggctggaaccccgcaccacagctgccatgtgggccctgcaaaccgtggagaaggagcgaggcctgggtggggaggtaccaggcagccaccagggtcccgatccctaccgccagctgcgagagaaggaccccaagtacagtgctctccgccagaatttcttccgctaccatgggctgtcctctctttgcaatctgggctgcgtcctgagcaatgggctctgtctcgctggccttgccctggaaataaggagcctctagcatgggccctgcatgctaataaatgcttcttcagaaa

SEQ ID NO: 193882 - DNA, 916 bp, Homo sapiens
  Payload ID: 18296
  Gene Name: transmembrane protein 205
  Uniprot ID: Q6UW68
  ENST ID: ENST00000447337
  CDS Start-End: 308-877
ggctcagctgggaggcgggacgaattattggttgggggaaacccacgaggggacgcggccgaggagggtcgctgtccacccgggggcgtgggagtgaggtaccagattcagcccatttggccccgacgcctctgttctcggaatccgggtgctgcggattgaggtcccggttcctaacggtgggatcggtgtcctcgggatgagatttggcgtttcctcggggctttggtgggatcggtgtcctcaggatgagatttagggtttcctcggggctttcgggatcttcacctaatatccggactgcaagatggaggaaggcgggaacctaggaggcctgattaagatggtccatctactggtcttgtcaggtgcctggggcatgcaaatgtgggtgaccttcgtctcaggcttcctgcttttccgaagccttccccgacataccttcggactagtgcagagcaaactcttccccttctacttccacatctccatgggctgtgccttcatcaacctctgcatcttggcttcacagcatgcttgggctcagctcacattctgggaggccagccagctttacctgctgttcctgagccttacgctggccactgtcaacgcccgctggctggaaccccgcaccacagctgccatgtgggccctgcaaaccgtggagaaggagcgaggcctgggtggggaggtaccaggcagccaccagggtcccgatccctaccgccagctgcgagagaaggaccccaagtacagtgctctccgccagaatttcttccgctaccatgggctgtcctctctttgcaatctgggctgcgtcctgagcaatgggctctgtctcgctggccttgccctggaaataaggagcctctagcatgggccctgcatgctaataaatgcttcttcagaaatg

SEQ ID NO: 193883 - DNA, 688 bp, Homo sapiens
  Payload ID: 18296
  Gene Name: transmembrane protein 205
  Uniprot ID: Q6UW68
  ENST ID: ENST00000587948
  CDS Start-End: 83-652
aagcccgtggagggggcgggatcccaggggggtttctacgattagtcaatacccaggagggcgggatagaaaggactgcaagatggaggaaggcgggaacctaggaggcctgattaagatggtccatctactggtcttgtcaggtgcctggggcatgcaaatgtgggtgaccttcgtctcaggcttcctgcttttccgaagccttccccgacataccttcggactagtgcagagcaaactcttccccttctacttccacatctccatgggctgtgccttcatcaacctctgcatcttggcttcacagcatgcttgggctcagctcacattctgggaggccagccagctttacctgctgttcctgagccttacgctggccactgtcaacgcccgctggctggaaccccgcaccacagctgccatgtgggccctgcaaaccgtggagaaggagcgaggcctgggtggggaggtaccaggcagccaccagggtcccgatccctaccgccagctgcgagagaaggaccccaagtacagtgctctccgccagaatttcttccgctaccatgggctgtcctctctttgcaatctgggctgcgtcctgagcaatgggctctgtctcgctggccttgccctggaaataaggagcctctagcatgggccctgcatgctaataaatgcttcttcagaa

SEQ ID NO: 193884 - DNA, 628 bp, Homo sapiens
  Payload ID: 18296
  Gene Name: transmembrane protein 205
  ENST ID: ENST00000591677
  CDS Start-End: 308-628
ggctcagctgggaggcgggacgaattattggttgggggaaacccacgaggggacgcggccgaggagggtcgctgtccacccgggggcgtgggagtgaggtaccagattcagcccatttggccccgacgcctctgttctcggaatccgggtgctgcggattgaggtcccggttcctaacggtgggatcggtgtcctcgggatgagatttggcgtttcctcggggctttggtgggatcggtgtcctcaggatgagatttagggtttcctcggggctttcgggatcttcacctaatatccggactgcaagatggaggaaggcgggaacctaggaggcctgattaagatggtccatctactggtcttgtcaggtgcctggggcatgcaaatgtgggtgaccttcgtctcaggcttcctgcttttccgaagccttccccgacataccttcggactagtgcagagcaaactcttccccttctacttccacatctccatgggctgtgccttcatcaacctctgcatcttggcttcacagcatgcttgggctcagctcacattctgggaggccagccagctttacctgctgttcctgagccttacgctggccactgtcaacgcccgctggctggaa

SEQ ID NO: 193885 - DNA, 1003 bp, Homo sapiens
  Payload ID: 18296
  Gene Name: transmembrane protein 205
  Uniprot ID: Q6UW68
  ENST ID: ENST00000586956
  CDS Start-End: 397-966
cgaattattggttgggggaaacccacgaggggacgcggccgaggagggtcgctgtccacccgggggcgtgggagtgaggtaccagattcagcccatttggccccgacgcctctgttctcggaatccgggtgctgcggattgaggtcccggttcctaacggtgggatcggtgtcctcgggatgagatttggcgtttcctcggggctttggtgggatcggtgtcctcaggatgagatttagggtttcctcggggctttcgggatcttcacctaatatccgaatctctgctggattggccgtaaccctgtccccgagcgggctcacagggtctgaaggccacgcatgaggcaaaggtaaagttctgagccacccggtgcctccttcccaggactgcaagatggaggaaggcgggaacctaggaggcctgattaagatggtccatctactggtcttgtcaggtgcctggggcatgcaaatgtgggtgaccttcgtctcaggcttcctgcttttccgaagccttccccgacataccttcggactagtgcagagcaaactcttccccttctacttccacatctccatgggctgtgccttcatcaacctctgcatcttggcttcacagcatgcttgggctcagctcacattctgggaggccagccagctttacctgctgttcctgagccttacgctggccactgtcaacgcccgctggctggaaccccgcaccacagctgccatgtgggccctgcaaaccgtggagaaggagcgaggcctgggtggggaggtaccaggcagccaccagggtcccgatccctaccgccagctgcgagagaaggaccccaagtacagtgctctccgccagaatttcttccgctaccatgggctgtcctctctttgcaatctgggctgcgtcctgagcaatgggctctgtctcgctggccttgccctggaaataaggagcctctagcatgggccctgcatgctaataaatgcttcttcagaaa

SEQ ID NO: 193886 - DNA, 788 bp, Homo sapiens
  Payload ID: 18296
  Gene Name: transmembrane protein 205
  Uniprot ID: Q6UW68
  ENST ID: ENST00000589555
  CDS Start-End: 183-752
ggggaaacccacgaggggacgcggccgaggagggtcgctgtccacccgggggcgtgggagtgagaatctctgctggattggccgtaaccctgtccccgagcgggctcacagggtctgaaggccacgcatgaggcaaaggtaaagttctgagccacccggtgcctccttcccaggactgcaagatggaggaaggcgggaacctaggaggcctgattaagatggtccatctactggtcttgtcaggtgcctggggcatgcaaatgtgggtgaccttcgtctcaggcttcctgcttttccgaagccttccccgacataccttcggactagtgcagagcaaactcttccccttctacttccacatctccatgggctgtgccttcatcaacctctgcatcttggcttcacagcatgcttgggctcagctcacattctgggaggccagccagctttacctgctgttcctgagccttacgctggccactgtcaacgcccgctggctggaaccccgcaccacagctgccatgtgggccctgcaaaccgtggagaaggagcgaggcctgggtggggaggtaccaggcagccaccagggtcccgatccctaccgccagctgcgagagaaggaccccaagtacagtgctctccgccagaatttcttccgctaccatgggctgtcctctctttgcaatctgggctgcgtcctgagcaatgggctctgtctcgctggccttgccctggaaataaggagcctctagcatgggccctgcatgctaataaatgcttcttcagaa

SEQ ID NO: 193887 - DNA, 619 bp, Homo sapiens
  Payload ID: 18296
  Gene Name: transmembrane protein 205
  ENST ID: ENST00000590482
  CDS Start-End: 108-619
acagagaggggtgtggccggcattttagttccgcccctgccggagtagccgaaggcctcattggcgccttcacgcttcagctgcgcttagtagccgcggactgcaagatggaggaaggcgggaacctaggaggcctgattaagatggtccatctactggtcttgtcaggtgcctggggcatgcaaatgtgggtgaccttcgtctcaggcttcctgcttttccgaagccttccccgacataccttcggactagtgcagagcaaactcttccccttctacttccacatctccatgggctgtgccttcatcaacctctgcatcttggcttcacagcatgcttgggctcagctcacattctgggaggccagccagctttacctgctgttcctgagccttacgctggccactgtcaacgcccgctggctggaaccccgcaccacagctgccatgtgggccctgcaaaccgtggagaaggagcgaggcctgggtggggaggtaccaggcagccaccagggtcccgatccctaccgccagctgcgagagaaggaccccaagtacagtgctctccgccagaatttcttccgctaccatgggctgtcctctctttgcaatctgggctg

SEQ ID NO: 193888 - DNA, 563 bp, Homo sapiens
  Payload ID: 18296
  Gene Name: transmembrane protein 205
  ENST ID: ENST00000586701
  CDS Start-End: 204-563
atctacgacccgattggcttcgggctcagctgggaggcgggacgaattattggttgggggaaacccacgaggggacgcggccgaggagggtcgctgtccacccgggggcgtgggagtgaggcttcctgcttttccgaagccttccccgacataccttcggactagtgcagagcaaactcttccccttctacttccacatctccatgggctgtgccttcatcaacctctgcatcttggcttcacagcatgcttgggctcagctcacattctgggaggccagccagctttacctgctgttcctgagccttacgctggccactgtcaacgcccgctggctggaaccccgcaccacagctgccatgtgggccctgcaaaccgtggagaaggagcgaggcctgggtggggaggtaccaggcagccaccagggtcccgatccctaccgccagctgcgagagaaggaccccaagtacagtgctctccgccagaatttcttccgctaccatgggctgtcctctctttgcaatctgggctgcgtcctgagcaatgggctctgtctcgctggc

SEQ ID NO: 193889 - DNA, 840 bp, Homo sapiens
  Payload ID: 18296
  Gene Name: transmembrane protein 205
  Uniprot ID: Q6UW68
  ENST ID: ENST00000588560
  CDS Start-End: 241-810
gccgaggagggtcgctgtccacccgggggcgtgggagtgaggtaccagattcagcccatttggccccgacgcctctgttctcggaatccgggtgctgcggattgaggtcccggttcctaacgaatctctgctggattggccgtaaccctgtccccgagcgggctcacagggtctgaaggccacgcatgaggcaaaggtaaagttctgagccacccggtgcctccttcccaggactgcaagatggaggaaggcgggaacctaggaggcctgattaagatggtccatctactggtcttgtcaggtgcctggggcatgcaaatgtgggtgaccttcgtctcaggcttcctgcttttccgaagccttccccgacataccttcggactagtgcagagcaaactcttccccttctacttccacatctccatgggctgtgccttcatcaacctctgcatcttggcttcacagcatgcttgggctcagctcacattctgggaggccagccagctttacctgctgttcctgagccttacgctggccactgtcaacgcccgctggctggaaccccgcaccacagctgccatgtgggccctgcaaaccgtggagaaggagcgaggcctgggtggggaggtaccaggcagccaccagggtcccgatccctaccgccagctgcgagagaaggaccccaagtacagtgctctccgccagaatttcttccgctaccatgggctgtcctctctttgcaatctgggctgcgtcctgagcaatgggctctgtctcgctggccttgccctggaaataaggagcctctagcatgggccctgcatgctaataaatgcttct

SEQ ID NO: 193890 - DNA, 428 bp, Homo sapiens
  Payload ID: 18296
  Gene Name: transmembrane protein 205
  ENST ID: ENST00000592952
  CDS Start-End: 58-428
ggacgcggccgaggagggtcgctgtccacccgggggcgtgggagtgaggactgcaagatggaggaaggcgggaacctaggaggcctgattaagatggtccatctactggtcttgtcaggtgcctggggcatgcaaatgtgggtgaccttcgtctcagctttacctgctgttcctgagccttacgctggccactgtcaacgcccgctggctggaaccccgcaccacagctgccatgtgggccctgcaaaccgtggagaaggagcgaggcctgggtggggaggtaccaggcagccaccagggtcccgatccctaccgccagctgcgagagaaggaccccaagtacagtgctctccgccagaatttcttccgctaccatgggctgtcctctctttgcaatctgggctgcgtcctgagcaatgggctctgtc

SEQ ID NO: 193891 - DNA, 677 bp, Homo sapiens
  Payload ID: 18296
  Gene Name: transmembrane protein 205
  Uniprot ID: Q6UW68
  ENST ID: ENST00000586590
  CDS Start-End: 71-640
gaaacccacgaggggacgcggccgaggagggtcgctgtccacccgggggcgtgggagtgaggactgcaagatggaggaaggcgggaacctaggaggcctgattaagatggtccatctactggtcttgtcaggtgcctggggcatgcaaatgtgggtgaccttcgtctcaggcttcctgcttttccgaagccttccccgacataccttcggactagtgcagagcaaactcttccccttctacttccacatctccatgggctgtgccttcatcaacctctgcatcttggcttcacagcatgcttgggctcagctcacattctgggaggccagccagctttacctgctgttcctgagccttacgctggccactgtcaacgcccgctggctggaaccccgcaccacagctgccatgtgggccctgcaaaccgtggagaaggagcgaggcctgggtggggaggtaccaggcagccaccagggtcccgatccctaccgccagctgcgagagaaggaccccaagtacagtgctctccgccagaatttcttccgctaccatgggctgtcctctctttgcaatctgggctgcgtcctgagcaatgggctctgtctcgctggccttgccctggaaataaggagcctctagcatgggccctgcatgctaataaatgcttcttcagaaa

SEQ ID NO: 193892 - DNA, 593 bp, Homo sapiens
  Payload ID: 18296
  Gene Name: transmembrane protein 205
  ENST ID: ENST00000586218
  CDS Start-End: 168-554
gaggtaccagattcagcccatttggccccgacgcctctgttctcggaatccgggtgctgcggattgaggtcccggttcctaacggcttcctgcttttccgaagccttccccgacataccttcggactagtgcagagcaaactcttccccttctacttccacatctccatgggctgtgccttcatcaacctctgcatcttggcttcacagcatgcttgggctcagctcacattctgggaggccagccagctttacctgctgttcctgagccttacgctggccactgtcaacgcccgctggctggaaccccgcaccacagctgccatgtgggccctgcaaaccgtggagaaggagcgaggcctgggtggggaggtaccaggcagccaccagggtcccgatccctaccgccagctgcgagagaaggaccccaagtacagtgctctccgccagaatttcttccgctaccatgggctgtcctctctttgcaatctgggctgcgtcctgagcaatgggctctgtctcgctggccttgccctggaaataaggagcctctagcatgggccctgcatgctaataaatgcttcttcagaaatg

SEQ ID NO: 193893 - DNA, 393 bp, Homo sapiens
  Payload ID: 18296
  Gene Name: transmembrane protein 205
  ENST ID: ENST00000590788
  CDS Start-End: 130-393
cacgaggggacgcggccgaggagggtcgctgtccacccgggggcgtgggagtgaggtaccagattcagcccatttggccccgacgcctctgttctcggaatccgggtgctgcggattgaggactgcaagatggaggaaggcgggaacctaggaggcctgattaagatggtccatctactggtcttgtcaggtgcctggggcatgcaaatgtgggtgaccttcgtctcaggcttcctgcttttccgaagccttccccgacataccttcggactagtgcagagcaaactcttccccttctacttccacatctccatgggctgtgccttcatcaacctctgcatcttggcttcacagcatgcttgggctcagctcacattctgggaggccagccag

SEQ ID NO: 193894 - DNA, 792 bp, Homo sapiens
  Payload ID: 18296
  Gene Name: transmembrane protein 205
  Uniprot ID: Q6UW68
  ENST ID: ENST00000593256
  CDS Start-End: 184-753
agctgggaggcgggacgaattattggttgggggaaacccacgaggggacgcggccgaggagggtcgctgtccacccgggggcgtgggagtgaggtaccagattcagcccatttggccccgacgcctctgttctcggaatccgggtgctgcggattgaggtcccggttcctaacggactgcaagatggaggaaggcgggaacctaggaggcctgattaagatggtccatctactggtcttgtcaggtgcctggggcatgcaaatgtgggtgaccttcgtctcaggcttcctgcttttccgaagccttccccgacataccttcggactagtgcagagcaaactcttccccttctacttccacatctccatgggctgtgccttcatcaacctctgcatcttggcttcacagcatgcttgggctcagctcacattctgggaggccagccagctttacctgctgttcctgagccttacgctggccactgtcaacgcccgctggctggaaccccgcaccacagctgccatgtgggccctgcaaaccgtggagaaggagcgaggcctgggtggggaggtaccaggcagccaccagggtcccgatccctaccgccagctgcgagagaaggaccccaagtacagtgctctccgccagaatttcttccgctaccatgggctgtcctctctttgcaatctgggctgcgtcctgagcaatgggctctgtctcgctggccttgccctggaaataaggagcctctagcatgggccctgcatgctaataaatgcttcttcagaaatg

SEQ ID NO: 193895 - DNA, 2475 bp, Homo sapiens
  Payload ID: 18297
  Gene Name: transmembrane protein 206
  Uniprot ID: Q9H813
  ENST ID: ENST00000261455
  CDS Start-End: 139-1191
acgcctggtctctgggacgcccctccggaccggtttcgcctcgcggagccggtaggtccaggtgcagcggccgcagtgctgcgtccgtgcgccgcgggctggggcggtctcaggtgtgccgaagctctggtcagtgccatgatccggcaggagcgctccacatcctaccaggagctgagtgaggagttggtccaggtggttgagaactcagagctggcagacgagcaggacaaggagacggtcagagtccaaggtccgggtatcttaccaggcctggacagcgagtccgcctccagcagcatccgcttcagcaaggcctgcctgaagaacgtcttctcggtcctactcatcttcatctacctgctgctcatggctgtggccgtcttcctggtctaccggaccatcacagactttcgtgagaaactcaagcaccctgtcatgtctgtgtcttacaaggaagtggatcgctatgatgccccaggtattgccttgtaccccggtcaggcccagttgctcagctgtaagcaccattacgaggtcattcctcctctgacaagccctggccagccgggtgacatgaattgcaccacccagaggatcaactacacggaccccttctccaatcagactgtgaaatctgccctgattgtccaggggccccgggaagtgaaaaagcgggagctggtcttcctccagttccgcctgaacaagagtagtgaggacttcagcgccattgattacctcctcttctcttctttccaggagttcctgcaaagcccaaacagggtaggcttcatgcaggcctgtgagagtgcctattccagctggaagttctctgggggcttccgcacctgggtcaagatgtcactggtaaagaccaaggaggaggatgggcgggaagcagtggagttccggcaggagacaagtgtggttaactacattgaccagaggccagctgccaaaaaaagtgctcaattgttttttgtggtctttgaatggaaagatcctttcatccagaaagtccaagatatagtcactgccaatccttggaacacaattgctcttctctgtggcgccttcttggcattatttaaagcagcagagtttgccaaactgagtataaaatggatgatcaaaattagaaagagataccttaaaagaagaggtcaggcaacgagccacataagctgaagtcacctcgcgttgtttagagaactgtccacatcaatgggagctgtcatcacttccactttgtaaacggagctatcaacaatcctgtactcacttgaagaaatggggccttgctgggaggaacagcatgtaaaactggaacttctaaccccgtcccaaaagaggcggtgtagagcctaatagaagagactaatggataaacctacaagttatttaaatatttaaattattaataaactttttaaagagctggccaatgacttttgaatagggtttgtagaagatgcctttcttcctgtttggttcattgtattgtattaggttaagctctactagggtaatgaaggctctacttttcactttttaaaagtggacaaaagagtgtgattttctttttccaaaaattcctgagtatcaagacgtgcaggtcatgctttggagcctatgcactgtacacaaaggcaaaaccctatgactttggcatcatctgccattgatgtccagcctctgacatgctctttgatttgttaaatgttaaatgagactttaaggctactagaaactagtaattaagtttcttaatggactgagtagccacctacttgtccggctagaatgtttgttgatgtatgagtttagattaacactcaaaagcactaggacagatgtacatagaaggtgcctactcattgtattttgatgatttcattaacaggtaaataaaagttaatacaaaaggaacgagtgtgacaatatgaatatctgctcaatcatcgggcacaattactttcatttggtgacttccaaggacaaaaaggtagtatgagtctggactcccaagatggatctgactcccaaggtatgttctaactgcttccagggaagggtttgttaggcatggcaactgatggcaggtgtccagaaagagtgacctggtgtccccgaggaagctgggttaactctttactgtgtccacaaaactacccatcatatgaggaaggggcatacgcagtgtgaccctcaaaaagcttttagcctagcctttgacagaaatgagtatgcattaaaaaaaagtctatttttcacattaaggttctaaaaattgtttccagagttttaaattatttatgtgcctgttgcttcaaagaggacttggtagcatttcctaaattttgtaatctggcttccgataatccaaagggaataactcaaatgtatgaataggcattttaaatgggaagaaactgttttttggatgaatgattaaaagtgaactgtataaag

SEQ ID NO: 193896 - DNA, 2119 bp, Homo sapiens
  Payload ID: 18297
  Gene Name: transmembrane protein 206
  Uniprot ID: Q9H813
  ENST ID: ENST00000535273
  CDS Start-End: 145-1380
atcgccacgcctggtctctgggacgcccctccggaccggtttcgcctcgcggagccggtaggtccaggtgcagcggccgcagtgctgcgtccgtgcgccgcgggctggggcggtctcaggtgtgccgaagctctggtcagtgccatgatccggcaggagcgctccacatcctaccaggaggctgtgcgtccagcgcttccttcaagcaagccctgcctcctcacttctccagctgtattagtgaaactgctctcctcctccgcctccacttctcggcccccaaaccttggtcatctttggcaaccgtcctcttctgtgcccctccatcgtgccgcctcattggccaaagtcaggcagttccagctgagtgaggagttggtccaggtggttgagaactcagagctggcagacgagcaggacaaggagacggtcagagtccaaggtccgggtatcttaccaggcctggacagcgagtccgcctccagcagcatccgcttcagcaaggcctgcctgaagaacgtcttctcggtcctactcatcttcatctacctgctgctcatggctgtggccgtcttcctggtctaccggaccatcacagactttcgtgagaaactcaagcaccctgtcatgtctgtgtcttacaaggaagtggatcgctatgatgccccaggtattgccttgtaccccggtcaggcccagttgctcagctgtaagcaccattacgaggtcattcctcctctgacaagccctggccagccgggtgacatgaattgcaccacccagaggatcaactacacggaccccttctccaatcagactgtgaaatctgccctgattgtccaggggccccgggaagtgaaaaagcgggagctggtcttcctccagttccgcctgaacaagagtagtgaggacttcagcgccattgattacctcctcttctcttctttccaggagttcctgcaaagcccaaacagggtaggcttcatgcaggcctgtgagagtgcctattccagctggaagttctctgggggcttccgcacctgggtcaagatgtcactggtaaagaccaaggaggaggatgggcgggaagcagtggagttccggcaggagacaagtgtggttaactacattgaccagaggccagctgccaaaaaaagtgctcaattgttttttgtggtctttgaatggaaagatcctttcatccagaaagtccaagatatagtcactgccaatccttggaacacaattgctcttctctgtggcgccttcttggcattatttaaagcagcagagtttgccaaactgagtataaaatggatgatcaaaattagaaagagataccttaaaagaagaggtcaggcaacgagccacataagctgaagtcacctcgcgttgtttagagaactgtccacatcaatgggagctgtcatcacttccactttgtaaacggagctatcaacaatcctgtactcacttgaagaaatggggccttgctgggaggaacagcatgtaaaactggaacttctaaccccgtcccaaaagaggcggtgtagagcctaatagaagagactaatggataaacctacaagttatttaaatatttaaattattaataaactttttaaagagctggccaatgacttttgaatagggtttgtagaagatgcctttcttcctgtttggttcattgtattgtattaggttaagctctactagggtaatgaaggctctacttttcactttttaaaagtggacaaaagagtgtgattttctttttccaaaaattcctgagtatcaagacgtgcaggtcatgctttggagcctatgcactgtacacaaaggcaaaaccctatgactttggcatcatctgccattgatgtccagcctctgacatgctctttgatttgttaaatgttaaatgagactttaaggctactagaaactagtaattaagtttcttaatggactgagtagccacctacttgtccggctagaatgtttgttgatgtatgagtttagattaacactcaaaagcactaggacagatgtacatagaaggtgcctactcattgtattttgatgatttcattaacaggtaaataaaagttaatacaaaagg

SEQ ID NO: 193897 - DNA, 1448 bp, Homo sapiens
  Payload ID: 18298
  Gene Name: transmembrane protein 207
  Uniprot ID: Q6UWW9
  ENST ID: ENST00000354905
  CDS Start-End: 68-508
agttctgagaaagaaggaaataaacacaggcaccaaaccactatcctaagttgactgtcctttaaatatgtcaagatccagacttttcagtgtcacctcagcgatctcaacgatagggatcttgtgtttgccgctattccagttggtgctctcggacctaccatgcgaagaagatgaaatgtgtgtaaattataatgaccaacaccctaatggctggtatatctggatcctcctgctgctggttttggtggcagctcttctctgtggagctgtggtcctctgcctccagtgctggctgaggagaccccgaattgattctcacaggcgcaccatggcagtttttgctgttggagacttggactctatttatgggacagaagcagctgtgagtccaactgttggaattcaccttcaaactcaaacccctgacctatatcctgttcctgctccatgttttggccctttaggctccccacctccatatgaagaaattgtaaaaacaacctgattttaggtgtggattatcaatttaaagtattaacgacatctgtaattccaaaacatcaaatttaggaatagttatttcagttgttggaaatgtccagagatctattcatatagtctgaggaaggacaattcgacaaaagaatggatgttggaaaaaattttggtcatggagatgtttaaatagtaaagtagcaggcttttgatgtgtcactgctgtatcatacttttatgctacacaaccaaattaatgcttctccactagtatccaaacaggcaacaattaggtgctggaagtagtttccatcacatttaggactccactgcagtatacagcacaccattttctgctttaaactctttcctagcatggggtccataaaaattattataatttaacaatagcccaagccgagaatccaacatgtccagaaccagaaccagaaagatagtatttgaatgaaggtgaggggagagagtaggaaaaagaaaagtttggagttgaagggtaaaggataaatgaagaggaaaaggaaaagattacaagtctcagcaaaaacaagaggttttatgccccaacctgaagaggaagaaattgtagatagaaggtgaaggagattgctgaagatatagagcacatataatgccaacacggggagaaaagaaaagttccccttttacagtaatgaatgtggcctccatagtccatagtgtttctctggagcctcagggcttggcatttattgcagcatcatgctaagaaccttcggcataggtatctgttcccatgaggactgcagaagtagcaatgagacatcttcaagtggcattttggcagtggccatcagcagggggacagacaaaaacatccatcacagatgacatatgatcttcagctgacaaatttgttgaacaaaacaataaacatcaatagatatctaaaa

SEQ ID NO: 193898 - DNA, 793 bp, Homo sapiens
  Payload ID: 18299
  Gene Name: transmembrane protein 208
  Uniprot ID: Q9BTX3
  ENST ID: ENST00000304800
  CDS Start-End: 107-628
cgacttcggtctgcgccggaagtgcatgagctgccgatgtggtgcttagtgattgcggtttcggtcgctctcccgtgtttcccgggctgggtatttgcctcgcaccatggcgcccaagggcaaagtgggcacgagagggaagaagcagatatttgaagagaacagagagactctgaagttctacctgcggatcatactgggggccaatgccatttactgccttgtgacgttggtcttcttttactcatctgcctcattttgggcctggttggccctgggctttagtctggcagtgtatggggccagctaccactctatgagctcgatggcacgagcagcgttctctgaggatggggccctgatggatggtggcatggacctcaacatggagcagggcatggcagagcaccttaaggatgtgatcctactgacagccatcgtgcaggtgctcagctgcttctctctctatgtctggtccttctggcttctggctccaggccgggccctttacctcctgtgggtgaatgtgctgggcccctggttcactgcagacagtggcaccccagcaccagagcacaatgagaaacggcagcgccgacaggagcggcggcagatgaagcggttatagccattgacattgtggccacaggccactggccctgggtggctctgtcagggtgcacagcccctcatgcctggagcaatgagggtctagtccaggggccaaaagcagtctgaggtattgggtatacttatactctatagggtcgttgaataaatggcttagaatgtg

SEQ ID NO: 193899 - DNA, 832 bp, Homo sapiens
  Payload ID: 18299
  Gene Name: transmembrane protein 208
  ENST ID: ENST00000565201
  CDS Start-End: 52-474
cggtttcggtcgctctcccgtgtttcccgggctgggtatttgcctcgcaccatggcgcccaagggcaaagtgggcacgagagggaagaagcagatatttgaagagaacagagagactctgaagttctacctgcggatcatactgggggccaatgccatttactgccttgtgacgttggtcttcttttactcatctgcctcattttgggcctggttggccctgggctttagtctggcagtgtatggggccagctaccactctatgagctcgatggcacgagcagcgttctctgaggatggggccctgatggatggtggcatggacctcaacatggagcagggcatggcagagcaccttaaggatgtgatcctactgacagccatcgtgcaggtgctcagctgcttctctctctatgtctggtccttctggcttctggtatgtgggctgggggcgctcccaagaaggggcatctaaccctccccatcttttattccctgcatcttgcttcaagttaccgtttctcttgtaggctccaggccgggccctttacctcctgtgggtgaatgtgctgggcccctggttcactgcagacagtggcaccccagcaccagagcacaatgagaaacggcagcgccgacaggagcggcggcagatgaagcggttatagccattgacattgtggccacaggccactggccctgggtggctctgtcagggtgcacagcccctcatgcctggagcaatgagggtctagtccaggggccaaaagcagtctgaggtattgggtatacttatactctatagggtcgttgaataaatggcttagaatgtg

SEQ ID NO: 193900 - DNA, 775 bp, Homo sapiens
  Payload ID: 18299
  Gene Name: transmembrane protein 208
  Uniprot ID: Q9BTX3
  ENST ID: ENST00000562235
  CDS Start-End: 63-365
cttagtgattgcggtttcggtcgctctcccgtgtttcccgggctgggtatttgcctcgcaccatggcgcccaagggcaaagtgggcacgagagggaagaagcagatatttgaagagaacagagagactctgaagttctacctgcggatcatactgggggccaatgccatttactgccttgtgacgttggtcttcttttactcatctgcctcattttgggcctggttggccctgggctttagtctggcagtgtatggggccagctaccactctatgagctcgatggcacgagcagcgttctctgaggatggggccctgatggatggtggcatggacctcaacatggagcagggcatggcagagtgagtgtcccccaccgccagcccaggcaccttaaggatgtgatcctactgacagccatcgtgcaggtgctcagctgcttctctctctatgtctggtccttctggcttctggctccaggccgggccctttacctcctgtgggtgaatgtgctgggcccctggttcactgcagacagtggcaccccagcaccagagcacaatgagaaacggcagcgccgacaggagcggcggcagatgaagcggttatagccattgacattgtggccacaggccactggccctgggtggctctgtcagggtgcacagcccctcatgcctggagcaatgagggtctagtccaggggccaaaagcagtctgaggtattgggtatacttatactctatagggtcgttgaataaatggcttagaatgtg

SEQ ID NO: 193901 - DNA, 887 bp, Homo sapiens
  Payload ID: 18299
  Gene Name: transmembrane protein 208
  ENST ID: ENST00000563953
  CDS Start-End: 427-738
ggtctgcgccggaagtgcatgagctgccgatgtggtgcttagtgattgcggtttcggtcgctctcccgtgtttcccgggctgggtatttgcctcgcaccatggcggtttctgcactacggggacctggctgagttgcggatggagctctatagctcaccaggctggtggggagaatgaggaggaccgtggcctcctgacggcatctcatcattcctctgcagcccaagggcaaagtgggcacgagagggaagaagcagatatttgaagagaacagagagactctgaagttctacctgcggatcatactgggggccaatgccatttactgccttgtgacgttggtcttcttttactcatctgcctcattttgggcctggttggccctgggctttagtctggcagtgtatggggccagctaccactctatgagctcgatggcacgagcagcgttctctgaggatggggccctgatggatggtggcatggacctcaacatggagcagggcatggcagagcaccttaaggatgtgatcctactgacagccatcgtgcaggtgctcagctgcttctctctctatgtctggtccttctggcttctggctccaggccgggccctttacctcctgtgggtgaatgtgctgggcccctggttcactgcagacagtggcaccccagcaccagagcacaatgagaaacggcagcgccgacaggagcggcggcagatgaagcggttatagccattgacattgtggccacaggccactggccctgggtggctctgtcagggtgcacagcccctcatgcctggagcaatgagggtctagtccaggggccaaaagcagtctgaggtattgggtatacttatactctatagggtcgttgaata

SEQ ID NO: 193902 - DNA, 518 bp, Homo sapiens
  Payload ID: 18299
  Gene Name: transmembrane protein 208
  ENST ID: ENST00000564087
  CDS Start-End: 7-117
cgcaccatggcgggcgagcaagaggcgattgatcctagctgcgggtgctggagagatggcgtcagccctaggcagaatggactggaggatgggtggacatcccagggattttgctaggtttctgcactacggggacctggctgagttgcggatggagctctatagctcaccaggctggtggggagaatgaggaggaccgtggcctcctgacggcatctcatcattcctctgcagcccaagggcaaagtgggcacgagagggaagaagcagatatttgaagagaacagagagactctgaagttctacctgcggatcatactgggggccaatgccatttactgccttgtgacgttggtcttcttttactcatctgcctcattttgggcctggttggccctgggctttagtctggcagtgtatggggccagctaccactctatgagctcgatggcacgagcagcgttctctgaggatggggccctgatggatggtggcatggacctcaacatggagcaggg

SEQ ID NO: 193903 - DNA, 3545 bp, Homo sapiens
  Payload ID: 18300
  Gene Name: transmembrane protein 209
  Uniprot ID: Q96SK2
  ENST ID: ENST00000397622
  CDS Start-End: 124-1809
gagaagagactacctagttcttccggtaactttagagccgcttgccggtggcctcccgcttgagcttggctttgcgcatgcccagagagagtggcgcgagcctgcgttttccggccagaggacatgatgcagggggaggcacaccctagtgcttcccttattgacagaaccatcaagatgagaaaagaaacagaggctaggaaagtggtcttagcctggggactcctaaatgtatctatggctggaatgatatatactgaaatgactggaaaattgattagttcatactacaatgtgacatactggcccctctggtatattgagcttgcccttgcatctctcttcagccttaatgccttatttgatttttggagatatttcaaatatactgtggcaccaacaagtctggttgttagtcctggacagcaaacacttttagggttgaaaacagctgttgtacagactacgcctccacatgatctggcagcaacccaaatccctcccgctccaccttccccttcaattcagggtcagagtgtgttgagttatagcccttctcgttcgcccagtaccagtcccaagttcaccaccagctgtatgactggttacagccctcagctgcaaggtctgtcctcaggtggcagtggttcttatagccctggagtgacctactcgcccgtcagtggttataataagttggcgagctttagcccctctcctccttctccgtaccctaccactgttggaccagtggagagcagtggattgagatctcgctaccgttcttcacctaccgtctacaactcacctactgacaaagaagactacatgaccgacctacgaactttggatacttttctcagaagtgaagaggagaaacagcatagggttaagctggggagcccagattctacctctccttccagcagtcctactttctggaactatagtcgttctatgggggattatgcacaaactttaaagaagtttcagtatcagcttgcctgtaggtctcaggccccatgtgctaacaaagatgaagccgatctcagctctaaacaagccgcagaagaggtctgggcaagagtggctatgaatagacaacttcttgatcatatggattcatggacagctaaatttagaaattggatcaatgagacaatattagtgccacttgttcaagagattgagtctgtcagcacacagatgagacgaatgggttgtccagagctacagataggagaggctagtattactagcttgaaacaagctgccctggttaaagcgcctctcattccgactttgaacacaatcgttcagtatctagaccttactccaaatcaggaatacttgtttgaaaggatcaaagaactatctcagggaggttgtatgagctcatttcgatggaacagaggtggcgacttcaaaggacgaaagtgggatacagacctgcccaccgattctgctatcatcatgcatgtattttgcacctaccttgattccagattacctccacatccgaagtatcccgacggaaaaacttttacttctcagcactttgttcagacaccaaataaaccagatgttacaaatgagaatgttttttgcatttatcagagtgctatcaaccctccccattatgagctcatctaccagcgtcatgtatacaacctgccaaagggcagaaataatatgtttcatacattgttgatgtttctctacatcataaagaccaaagagtcaggaatgcttgggagagttaatcttggtctatctggtgtgaatatattgtggatctttggcgagtagcaagtcatatatttaattctgacatttagactatttcactgaaccagaagtcgaaactaaacatctctgagccactgactcttctgaaataaaatacacatgggtgtatgttacagactctttagatttaacagaaaatgtagctgttatgaaatgtaattgtaaaaatatgtcccgtatcttctatatcgagacattgcctttaattttatatcgcttttcagaaatttcagttgactacaaaactgcaacccttcggatttttattgactcaaaatagtgccattccccttaatgaaatagattttgagtctttttttcattgtaacccccaaatgagaatcatctacctgattcttgtaccaaaaaaaaatttttttcagtcttttttttttttagagagggtctctgtcaacgcagactggagtgcagtggcacgatcttagctcactacaacttctgcctcccaggctcaagcaattctcctgcctcagcctcctgagtagctgggattacaggcatgcaccaccacgcccagctaatttttgtatttttagtagagacagggtttcaccatgttggccaggctggtcccgaactcctgacctcaggtgatccacccacctcggcctcccaaagtgctgggattataggtgcgagccactgcgcccagcctcagttattttatttaacagtgtaagtacttagaaagtaagaaaattgctgatttagtttttttttttttttttttaatgtttccccagcattctgcaagttaggccaaagcccacattcaaagaaatgagattaactcttaagtaatgtattaagtttatgtatattttaaaatattattaaaggaggtttgaaagtattgacatttaaaaagtcaacacttagattaaatttagctggtagttttaatttgggttttagttaagagtgtgaggacatcaggaaaactgtttactactttggttttagcagctcagttttactattccataatgtgttatttttaaagttctctttttaagatcacagtgatatcctatcttcaaattttttaaatatgttcaaaatatctggagggtgagaagttaccaagtttgtatgttttgtttgactcaccatctttattttctgtatatgtagtagctggcaattgcatatattttcttgattaacatattagagactgcttccatcatcttatgtaaacctggaaacagctgaaactagtcttttctgaagaaccgtgtatcagtgttagatgtgcatcccgttttgtcattccctcagactttgaatacagtcattactctctggaagagaaatgtaagtatattttttgttatctgcagtatggtttaacatgtattaataatacacatatgcagactcactaaagtatccccagtaattagtaaattccaaatttaagtcagtacagttctgtatttgtaaattctgtctttcaaaaagttgttcgtgtttttaaaagttgatgtccaaaggaaaggagcttcttttaagtacttttggtgtatgttgaatatttatttgctatgatattctagaagaaaatatcaaacatgttaaatataagaacatgttaaaatttaaatttgctatttcaaaagttactgaagatgtcttggaataacaattgtcatgctgttaaactagttgcatatacttcattaaaagcaccatggagaaacattttaacaatg

SEQ ID NO: 193904 - DNA, 1961 bp, Homo sapiens
  Payload ID: 18300
  Gene Name: transmembrane protein 209
  Uniprot ID: Q96SK2
  ENST ID: ENST00000473456
  CDS Start-End: 29-1588
gcgagcctgcgttttccggccagaggacatgatgcagggggaggcacaccctagtgcttcccttattgacagaaccatcaagatgagaaaagaaacagaggctaggaaagtggtcttagcctggggactcctaaatgtatctatggctggaatgatatatactgaaatgactggaaaattgattagttcatactacaatgtgacatactggcccctctggtatattgagcttgcccttgcatctctcttcagccttaatgccttatttgatttttggagatatttcaaatatactgtggcaccaacaagtctggttgttagtcctggacagcaaacacttttagggttgaaaacagctgttgtacagactacgcctccacatgatctggcagcaacccaaatccctcccgctccaccttccccttcaattcagggtcagagtgtgttgagttatagcccttctcgttcgcccagtaccagtcccaagttcaccaccagctgtatgactggttacagccctcagctgcaaggtctgtcctcaggtggcagtggttcttatagccctggagtgacctactcgcccgtcagtggttataataagttggcgagctttagcccctctcctccttctccgtaccctaccactgttggaccagtggagagcagtggattgagatctcgctaccgttcttcacctaccgtctacaactcacctactgacaaagaagactacatgaccgacctacgaactttggatacttttctcagaagtgaagaggagaaacagcatagggttaagctggggagcccagattctacctctccttccagcagtcctactttctggaactatagtcgttctatgggggattatgcacaaactttaaagaagtttcagtatcagcttgcctgtaggtctcaggccccatgtgctaacaaagatgaagccgatctcagctctaaacaagccgcagaagaggtctgggcaagagtggctatgaatagacaacttcttgatcatatggattcatggacagctaaatttagaaattggatcaatgagacaatattagtgccacttgttcaagagattgagtctgtcagcacacagatgagacgaatgggttgtccagagctacagataggagaactatctcagggaggttgtatgagctcatttcgatggaacagaggtggcgacttcaaaggacgaaagtgggatacagacctgcccaccgattctgctatcatcatgcatgtattttgcacctaccttgattccagattacctccacatccgaagtatcccgacggaaaaacttttacttctcagcactttgttcagacaccaaataaaccagatgttacaaatgagaatgttttttgcatttatcagagtgctatcaaccctccccattatgagctcatctaccagcgtcatgtatacaacctgccaaagggcagaaataatatgtttcatacattgttgatgtttctctacatcataaagaccaaagagtcaggaatgcttgggagagttaatcttggtctatctggtgtgaatatattgtggatctttggcgagtagcaagtcatatatttaattctgacatttagactatttcactgaaccagaagtcgaaactaaacatctctgagccactgactcttctgaaataaaatacacatgggtgtatgttacagactctttagatttaacagaaaatgtagctgttatgaaatgtaattgtaaaaatatgtcccgtatcttctatatcgagacattgcctttaattttatatcgcttttcagaaatttcagttgactacaaaactgcaacccttcggatttttattgactcaaaatagtgccattccccttaatgaaatagattttgagtctttttttcattgtaacccccaaatgagaatcatctacctgattcttgtaccaaaaaaaaa

SEQ ID NO: 193905 - DNA, 585 bp, Homo sapiens
  Payload ID: 18300
  Gene Name: transmembrane protein 209
  ENST ID: ENST00000471077
  CDS Start-End: 417-585
agaggacatggtgcgttttcggggtcgtgtttgtgcttcctgtcttggaatctacgcgggttgtgggagttccgcgcctgctgatctgtcctgggttcagccaagggggatgtggctaggcgttccgcctctctaggggaagggaagaaagaagcaatagggttgctgaagttcgtgcccaggagccggggagggaagctctggactgggaaattgggacgcgggggctgagtggcgcgaaagctattgctctgtcctctgtgggatacgactgcttgtcgctggaacaagttttgcacggtctgtaagagttgagcctagctgaagaaaggaggaattataaatcccaaatgtggaccaaaacaatgcacgttttcccctctctccctcttactccgctcaccaccccatcataaatgcagggggaggcacaccctagtgcttcccttattgacagaaccatcaagatgagaaaagaaacagaggctaggaaagtggtcttagcctggggactcctaaatgtatctatggctggaatgatatatactgaaatgactggaaaattgattagttcatactacaatg

SEQ ID NO: 193906 - DNA, 2322 bp, Homo sapiens
  Payload ID: 18300
  Gene Name: transmembrane protein 209
  Uniprot ID: Q96SK2
  ENST ID: ENST00000462753
  CDS Start-End: 267-1949
gcttcctgtcttggaatctacgcgggttgtgggagttccgcgcctgctgatctgtcctgggttcagccaagggggatgtggctaggcgttccgcctctctaggggaagggaagaaagaagcaatagggttgctgaagttcgtgcccaggagccggggagggaagctctggactgggaaattgggacgcgggggctgagtggcgcgaaagctattgctctgtcctctgtgggatacgactgcttgtcgctggaacaagttttgcacgatgcagggggaggcacaccctagtgcttcccttattgacagaaccatcaagatgagaaaagaaacagaggctaggaaagtggtcttagcctggggactcctaaatgtatctatggctggaatgatatatactgaaatgactggaaaattgattagttcatactacaatgtgacatactggcccctctggtatattgagcttgcccttgcatctctcttcagccttaatgccttatttgatttttggagatatttcaaatatactgtggcaccaacaagtctggttgttagtcctggacagcaaacacttttagggttgaaaacagctgttgtacagactacgcctccacatgatctggcagcaacccaaatccctcccgctccaccttccccttcaattcagggtcagagtgtgttgagttatagcccttctcgttcgcccagtaccagtcccaagttcaccaccagctgtatgactggttacagccctcagctgcaaggtctgtcctcaggtggcagtggttcttatagccctggagtgacctactcgcccgtcagtggttataataagttggcgagctttagcccctctcctccttctccgtaccctaccactgttggaccagtggagagcagtggattgagatctcgctaccgttcttcacctaccgtctacaactcacctactgacaaagaagactacatgaccgacctacgaactttggatacttttctcagaagtgaagaggagaaacagcatagggttaagctggggagcccagattctacctctccttccagcagtcctactttctggaactatagtcgttctatgggggattatgcacaaactttaaagaagtttcagtatcagcttgcctgtaggtctcaggccccatgtgctaacaaagatgaagccgatctcagctctaaacaagccgcagaagaggtctgggcaagagtggctatgaatagacaacttcttgatcatatggattcatggacagctaaatttagaaattggatcaatgagacaatattagtgccacttgttcaagagattgagtctgtcagcacacagatgagacgaatgggttgtccagagctacagataggagaggctagtattactagcttgaaacaagctgccctggttaaagcgcctctcattccgactttgaacacaatcgttcagtatctagaccttactccaaatcaggaatacttgtttgaaaggatcaaagaactatctcagggaggttgtatgagctcatttcgatggaacagaggtggcgacttcaaaggacgaaagtgggatacagacctgcccaccgattctgctatcatcatgcatgtattttgcacctaccttgattccagattacctccacatccgaagtatcccgacggaaaaacttttacttctcagcactttgttcagacaccaaataaaccagatgttacaaatgagaatgttttttgcatttatcagagtgctatcaaccctccccattatgagctcatctaccagcgtcatgtatacaacctgccaaagggcagaaataatatgtttcatacattgttgatgtttctctacatcataaagaccaaagagtcaggaatgcttgggagagttaatcttggtctatctggtgtgaatatattgtggatctttggcgagtagcaagtcatatatttaattctgacatttagactatttcactgaaccagaagtcgaaactaaacatctctgagccactgactcttctgaaataaaatacacatgggtgtatgttacagactctttagatttaacagaaaatgtagctgttatgaaatgtaattgtaaaaatatgtcccgtatcttctatatcgagacattgcctttaattttatatcgcttttcagaaatttcagttgactacaaaactgcaacccttcggatttttattgactcaaaatagtgccattccccttaatgaaatagattttgagtctttttttcattgtaacccccaaatgagaatcatctacctgattcttgtaccaaaaaaaaa

SEQ ID NO: 193907 - DNA, 571 bp, Homo sapiens
  Payload ID: 18300
  Gene Name: transmembrane protein 209
  ENST ID: ENST00000471985
  CDS Start-End: 3-571
aaatgcttcttggacttctaagtttgtggaagggtctcactctgtcgcccagactggaatgcagtggcaccatcttggctcaccgcaacctcggcttcccaggctcaagtgattctcctgcctcagcctccagaatgcagggggaggcacaccctagtgcttcccttattgacagaaccatcaagatgagaaaagaaacagaggctaggaaagtggtcttagcctggggactcctaaatgtatctatggctggaatgatatatactgaaatgactggaaaattgattagttcatactacaatgtgacatactggcccctctggtatattgagcttgcccttgcatctctcttcagccttaatgccttatttgatttttggagatatttcaaatatactgtggcaccaacaagtctggttgttagtcctggacagcaaacacttttagggttgaaaacagctgttgtacagactacgcctccacatgatctggcagcaacccaaatccctcccgctccaccttccccttcaattcagggtcagagtgtgttgagttatagcccttctcgttc

SEQ ID NO: 193908 - DNA, 566 bp, Homo sapiens
  Payload ID: 18301
  Gene Name: transmembrane protein 210
  ENST ID: ENST00000535352
  CDS Start-End: 20-181
agtggggccagggctggacatggcccccggtccctggcctgtgtcctgcctgcgtggtggccccttgggcctcacatatttgtcccttctgctcatccctgctgcaggtgcctcctcctgcccccgcactccactcccagccatggctccccttccccaggcaagctggaacctactgtgaatgcagccttggcctcagccgcgaggccctcatcgccctccttgtggtgctggcgggcatcagtgccagctgcttctgtgccctcgtcatcgtggcaattggtgtcttgcgggccaagggtgaaacatgcccgagacaagtggacaacaggttggtggagaattttggggtccaggaagatctcatggacctgcacccggtttacgtggagtcccagctaatggacgctgacctggaggtctccctggtgccaccactagaggatcagagccttgtggccatccccatggaggcttcttcagaggagccgccaccacccccgcccctaccacctgagtagagggctgagggcagctgggggaggggaattaaagcgtatttagtg

SEQ ID NO: 193909 - DNA, 873 bp, Homo sapiens
  Payload ID: 18301
  Gene Name: transmembrane protein 210
  Uniprot ID: A6NLX4
  ENST ID: ENST00000413619
  CDS Start-End: 383-826
gaaggatttggctgggcgcagtggctcacacctgtaatcccagcactttgagaggccgaggcgagcggatcacaaggtcaggagatcgagaccatcctggctaacacggtgaaaccactgaaggactgcccgtaagaccaggccagccccactgctgcctctgcctcagagctggcctgagctggctgggctctcaggcctctgcccaccctacctgtcccattcccagagctgcttggccatggctccttgaattgcggtgcccaagggcaaatgacacactggcattgtgagcccccccacccccacctcacagtcctactgtgaagtcagcaccttccaacagttccgtcagaggtgtgcagtggggccagggctggacatggcccccggtccctggcctgtgtcctgcctgcgtggtggccccttgggcctcacatatttgtcccttctgctcatccctgctgcagctggaacctactgtgaatgcagccttggcctcagccgcgaggccctcatcgccctccttgtggtgctggcgggcatcagtgccagctgcttctgtgccctcgtcatcgtggcaattggtgtcttgcgggccaagggtgaaacatgcccgagacaagtggacaacaggttggtggagaattttggggtccaggaagatctcatggacctgcacccggtttacgtggagtcccagctaatggacgctgacctggaggtctccctggtgccaccactagaggatcagagccttgtggccatccccatggaggcttcttcagaggagccgccaccacccccgcccctaccacctgagtagagggctgagggcagctgggggaggggaattaaagcgtatttagtggc

SEQ ID NO: 193910 - DNA, 866 bp, Homo sapiens
  Payload ID: 18302
  Gene Name: transmembrane protein 211
  ENST ID: ENST00000407886
  CDS Start-End: 254-643
cattgttctacaagctaaattattccttcaaaggagaggagaattgtataaggtcacagacgtggatccaaagccggagcctgagcagaggtggccacgctggagggtcttgacctaaagtgtgaccccgaccttctcctttggcatcctcacctactgctcctggcctcagggcaacagttggaaccagagctgcgtgaccttcagttccctggaggatattcctgactttgcctggaaggtctcagctgtgatgctcctcggaggctggctcctgttggccttcaatgcaattttcctcctgtcttgggctgtggcccccaaagggctgtgcccaaggagaagcagtgttccaatgccaggggtgcaggcagtggcagctactgccatgattgtgggtctgctgattttcccaatcggccttgcctccccattcatcaaggaagtgtgcgaagcctcctccatgtattatggtgggaagtgccggctgggttggggttacatgactgctatcctcaatgcagtcctggccagcctcctgcccatcatcagctggccccacacaaccaaggtccaagggaggaccatcatcttctccagtgccaccgagagaatcatctttgtgccagaaatgaacaaataaaaatctcctgggagtagcacaaagggcacactccagagttttatgaaatcatcatgtagccaacttcaaatcccatctctgctccttcttgctgtgtgacttcaggcaagccactttacctctctggaacagttttttcttctggaaaatgaaagttgaaatcatacctacctcataaggttgttctgagaattcactggagatgctctgtgtaaataaagca

SEQ ID NO: 193911 - DNA, 695 bp, Homo sapiens
  Payload ID: 18302
  Gene Name: transmembrane protein 211
  Uniprot ID: Q6ICI0
  ENST ID: ENST00000423535
  CDS Start-End: 1-603
atgttgagcagtgtgtgggtagctctggggctctctctgacctgcacctcagccttcagcctcatctcccctgcctggttccagaccccgaccttctcctttggcatcctcacctactgctcctggcctcagggcaacagttggaaccagagctgcgtgaccttcagttccctggaggatattcctgactttgcctggaaggtctcagctgtgatgctcctcggaggctggctcctgttggccttcaatgcaattttcctcctgtcttgggctgtggcccccaaagggctgtgcccaaggagaagcagtgttccaatgccaggggtgcaggcagtggcagctactgccatgattgtgggtctgctgattttcccaatcggccttgcctccccattcatcaaggaagtgtgcgaagcctcctccatgtattatggtgggaagtgccggctgggttggggttacatgactgctatcctcaatgcagtcctggccagcctcctgcccatcatcagctggccccacacaaccaaggtccaagggaggaccatcatcttctccagtgccaccgagagaatcatctttgtgccagaaatgaacaaataaaaatctcctgggagtagcacaaagggcacactccagagttttatgaaatcatcatgtagccaacttcaaatcccatctctgctccttcttgc

SEQ ID NO: 193912 - DNA, 1881 bp, Homo sapiens
  Payload ID: 18303
  Gene Name: transmembrane protein 212
  Uniprot ID: A6NML5
  ENST ID: ENST00000334567
  CDS Start-End: 36-620
atctttgagaccaaggcctcaagccaccaaggaaaatgaagggcctctaccaggctgctggccggattcttgttactctggggatcctcagtgtatgctctggagttattgctttctttcctgtcttttcttacaagccttggttcacaggatggagtgttcgaattgcttgtcctatctggaatggagctttggccatcacaactggtgtgcttctactgttggcttacagagagtggacccagaggtacctgggggaagctactttcacctttgtgattctgagcattatgggatgtccacttcattttgcaatagccttggaatctgctctcctgggcccatattgcttctattcattttcagggattgcagggactaattaccttggctatgcagttacctttccttatccatatgcaaaattcccattagcctgtgtggacccaccacactacgaagagtaccacctgacacttcaagccctagacctgtgcctaagctttaccctactctgtacatccttgacagtgttcatcaaactttctgcaagacttatccagaatggacacataaacatgcaactccctgctgggaacccaaaccctttttcaccataaaagaattggaaaaaactaaagttcatatgggaccaaaaaagagcccgcatacccaagacaatcctaagcaaaaagaacaaagctggaggcatcacactacctgacttcaaactattctacaaggctacagttaccaaaacagcatggtactggtaccaaaacagatatatagaccaatggaacagaacagaggcctcagaaataacaccacacatatacaaccatctgatctttgacaaacctgacaaaaacaagaaatggggaaaggattccctttttaataaatggtgctgggaaaactggttagccatatgtagaaagctgaaactggatcccttccttacaccttatataaaaattaactcaagatggattaaagacttaaatgtaagacctaaaaccataaaaaccctagaagaaaacctaggcaataccattcaggacataggcatgggcaaagacttcatgactaaaacaccaaaagcaatggcaacaaaagccaaaatagacaaatcgtatctaattaaactaaagggcttctgcatggcaaaagaaactatcatcagagtgaacaggcaacctacagaacgggagaaaattttttcaatctacccatctgacaaacagctaatatccagaatctacaaagaacttaaacaaatttacaagaaaaaaacaaacaaccacatcaaaaagtaggcaaaggacatggacacttctcaaaagaagacatttatgaagccaacagacacacataatcccaaatcatgctactataaagacacatgcacacgtatgtttattgcggcactattcacaatagtaaagacttggaaccaacccaaatatccatcaatgatagattggattaagaaaatgtggcacatatacaccatggaatactacgcagccataaaaaaggatgagttcatgtcctttgcagggacatagatgaagctggaaaccatcattctccgcaaactgtcacaaggacagaaaaccaaacaccacatgttctcactcataggtgggaattgaacaatgggaacacttggacacagggtggggaacatcacacactggggcctttcagtgggtgggaggctgggggagggatagcattaggagaaattcctaatgtagatgatgagttgatgggtgtggcaaaccaacatggcacatatatacctatgcaacaaacctgcatgttgtgcacatgtaccctagaacttagagtataataaaaaaaaagaaaacagtg

SEQ ID NO: 193913 - DNA, 723 bp, Homo sapiens
  Payload ID: 18303
  Gene Name: transmembrane protein 212
  ENST ID: ENST00000450693
  CDS Start-End: 1-453
gcttgtcctatctggaatggagctttggccatcacaactggtgtgcttctactgttggcttacagagagtggacccagaggtacctgggggaagctactttcacctttgtgattctgagcattatgggatgtccacttcattttgcaatagccttggaatctgctctcctgggcccatattgcttctattcattttcagggattgcagggactaattaccttggctatgcagttacctttccttatccatatgcaaaattcccattagcctgtgtggacccaccacactacgaagagtaccacctgacacttcaagccctagacctgtgcctaagctttaccctactctgtacatccttgacagtgttcatcaaactttctgcaagacttatccagaatggacacataaacatgcaactccctgctgggaacccaaaccctttttcaccataaaaggtaaaatggtctggggatagaaaaggcctgggaccagaatataaaagcacacagattaatagaattataaaatttaagatgtttaaacaagctttatataaggtagttgaactcctttacctaaatgtcttattaaaatgggtactgcatctgactgggatgtttcccctttctagtactatgaagctgaaggcatgtaaatctgctcttttaggaaatgttaattaaacatgctaaatgggaactagtaaaatcacctaagcccac

SEQ ID NO: 193914 - DNA, 864 bp, Homo sapiens
  Payload ID: 18303
  Gene Name: transmembrane protein 212
  ENST ID: ENST00000420375
  CDS Start-End: 1-568
ggctgctggccggattcttgttactctggggatcctcagtgtatgctctggagttattgctttctttcctgtcttttcttacaagccttggttcacaggatggagtgttcgaattgcttgtcctatctggaatggagctttggccatcacaactggtgtgcttctactgttggcttacagagagtggacccagaggtacctgggggaagctactttcacctttgtgattctgagcattatgggatgtccacttcattttgcaatagccttggaatctgctctcctgggcccatattgcttctattcattttcagggattgcagggactaattaccttggctatgcagttacctttccttatccatatgcaaaattcccattagcctgtgtggacccaccacactacgaagagtaccacctgacacttcaagccctagacctgtgcctaagctttaccctactctgtacatccttgacagtgttcatcaaactttctgcaagacttatccagaatggacacataaacatgcaactccctgctgggaacccaaaccctttttcaccataaaagtttggacctgattaaagaaggacaacaaaggccaatttgccatcaccaaaggagcagcttgacctggagggatgaggcctggaggccgacagcaggactccgtcagtgattctttcagctcttgaaaatgtccaagaaagacactttctctcacctttttggagcctctagcctgccctgggaagcctggtggactggtgctgagaagagaccacggcccagttggagtcccactctgtcgcccaggctggagtgcagtggcacgatctcagctcactgcaacctccacctcc

SEQ ID NO: 193915 - DNA, 585 bp, Homo sapiens
  Payload ID: 18303
  Gene Name: transmembrane protein 212
  Uniprot ID: A6NML5
  ENST ID: ENST00000619900
  CDS Start-End: 1-585
atgaagggcctctaccaggctgctggccggattcttgttactctggggatcctcagtgtatgctctggagttattgctttctttcctgtcttttcttacaagccttggttcacaggatggagtgttcgaattgcttgtcctatctggaatggagctttggccatcacaactggtgtgcttctactgttggcttacagagagtggacccagaggtacctgggggaagctactttcacctttgtgattctgagcattatgggatgtccacttcattttgcaatagccttggaatctgctctcctgggcccatattgcttctattcattttcagggattgcagggactaattaccttggctatgcagttacctttccttatccatatgcaaaattcccattagcctgtgtggacccaccacactacgaagagtaccacctgacacttcaagccctagacctgtgcctaagctttaccctactctgtacatccttgacagtgttcatcaaactttctgcaagacttatccagaatggacacataaacatgcaactccctgctgggaacccaaaccctttttcaccataa

SEQ ID NO: 193916 - DNA, 1153 bp, Homo sapiens
  Payload ID: 18304
  Gene Name: transmembrane protein 213
  Uniprot ID: A2RRL7
  ENST ID: ENST00000397602
  CDS Start-End: 154-474
atggtgtttcccccaaacacccagcataagttcacctctggcagagttgctttccagctcctgcaggtgggagtcgactcacctgcagcaggcactcggcacaactccgcaggaccggctcacctgcaccgggcactcagcacagcctccagcatgcagcgcctccccgctgccacccgggccaccctgatcctcagcctggcctttgcctccctccactcggcttgctcggcagcaagcagcagcaacagctcaagcttgaccgctcaccacccagaccctgggaccctggagcagtgcctcaacgtggacttctgcccacaagcagcccggtgctgccgcacaggagtggacgagtacggctggatcgcggcagctgttggctggagcctctggttcctcaccctcatcctgctctgtgtggacaaactgatgaagctgactccagatgagcccaaggacttgcaagcgtgagacccaggctcggtgcacaaaatggtgatcgccaccaatttgtggctaatggggaaggggagtaaggctaacatggtttctattatttaagtcattttcacctttaagcttcagttacttttacaagggaaagaagaaagagcgggagaaccaaataaggcaagccagtgctgcccttgcatgtcactcccaagggcccctgggctgtgcccaggtaactcctctctcaagatagtccctctgtaatgtatcctgttttaacctttcttctaggcaccaagggaggtgcacaagaaactataagacttagtctcatcatcaacattttcagaagcaagtgcataaccttctcaccaaaaccaggttatctgcttctgtccctggcttgagtcctgggcttaactgtcatttcagaatctgagaatcagtcaggtatggtggctcatgcctgtaatcccagcactttgggaggcagaggtgggcagatcactcaaggtcaggagttccagatcagcctggccaacatggtgaaaccctgtctctactaaaaatacaaaaattagccaggtgtggtggtgcacacctgtaatcccagctacttgggaggccgaggcaggagaatctcttgaacctcggaggcggaggttgcagtgagccaagatcatgccactgcactcca

SEQ ID NO: 193917 - DNA, 4167 bp, Homo sapiens
  Payload ID: 18304
  Gene Name: transmembrane protein 213
  Uniprot ID: A2RRL7
  ENST ID: ENST00000442682
  CDS Start-End: 154-477
atggtgtttcccccaaacacccagcataagttcacctctggcagagttgctttccagctcctgcaggtgggagtcgactcacctgcagcaggcactcggcacaactccgcaggaccggctcacctgcaccgggcactcagcacagcctccagcatgcagcgcctccccgctgccacccgggccaccctgatcctcagcctggcctttgcctccctccactcggcttgctcggcagaagcaagcagcagcaacagctcaagcttgaccgctcaccacccagaccctgggaccctggagcagtgcctcaacgtggacttctgcccacaagcagcccggtgctgccgcacaggagtggacgagtacggctggatcgcggcagctgttggctggagcctctggttcctcaccctcatcctgctctgtgtggacaaactgatgaagctgactccagatgagcccaaggacttgcaagcgtgagacccaggctcggtgcacaaaatggtgatcgccaccaatttgtggctaatggggaaggggagtaaggctaacatggtttctattatttaagtcattttcacctttaagcttcagttacttttacaagggaaagaagaaagagcgggagaaccaaataaggcaagccagtgctgcccttgcatgtcactcccaagggcccctgggctgtgcccaggtaactcctctctcaagatagtccctctgtaatgtatcctgttttaacctttcttctaggcaccaagggaggtgcacaagaaactataagacttagtctcatcatcaacattttcagaagcaagtgcataaccttctcaccaaaaccaggttatctgcttctgtccctggcttgagtcctgggcttaactgtcatttcagaatctgagaatcagtcaggtatggtggctcatgcctgtaatcccagcactttgggaggcagaggtgggcagatcactcaaggtcaggagttccagatcagcctggccaacatggtgaaaccctgtctctactaaaaatacaaaaattagccaggtgtggtggtgcacacctgtaatcccagctacttgggaggccgaggcaggagaatctcttgaacctcggaggcggaggttgcagtgagccaagatcatgccactgcactccagcctgggcggcagagcaagactctgtatcagaaaaaaaaaaaaaaaaaagaatgtgaggatcaggtgggcatggtggctcatgcctgtaatcccagcactttgagagactgagacaggaggatcactttagcccaggaattcgagaccagcctgggcaagatggcaagaccttgtttctgtttaaaaactttttaaagttaaaaataaaaatgtgagaatccccttgacactcccaccatcttcacccccacctcaggtccttctccagctctccttctggcttcatcctgtcttccacggctctcctgtcccacctattctccctgccggtgcccaagttttagccttcactgccttcccctagaacacgccagggatattgcattctgtcctcactgtcttgaggatcttcctccccggctcatcactccccatgggcagctgccagggtaggcgctgtcaccttctgttgacaacagtcagtagctcctaaggactaaaactgttcagcccagcattcagctctttggaggagtccatctgtcccccagcacatccaggagtaaggattccgactggtccactcctcatcctggtgtcttcagcttctctgctgccatgttctttgctgggatggctgcttcccaactccacctccagaatcaaggatattcctccaagcccagctcgaatgcttgatctgcctggagccttcctggtcatccttgggtgacctggagctggtgctgttagagcacttctgctctgccctgatgtgcagttgttgtgaatgggccactccatagtttatccttcctcacacccctggggcatagtaccctattcaagtttgtccaatgagtgcatgggtgaattaatgaatgaatgaacaaatgagtctttgccctagacaacttaaggtcctcactctgcattaggagcctccatttttctccagatggttgaaataaccagcctctgaaggagccaatggtttggtcactgctctctcagcaaattacagtcactgtcacttagcatggagagtggacgttgcacatcactgtgaaaccttgcagaggaggagagggcaggttcatcagaagaaagaaaggacaaaatgactccttatgaagcattttgtgccttctgtgagaaaacatgtatttagatcagataaactctagtcaaaatacaaaaaggaaaaatgaaagacctctgaaataggaacaatctcttgaagaggcaaatgactcaaaactgctcagtggctctttcagaaaatctaagtaaagttccctgacaacagaaactgaagagattgcctggttcatcttgtagtcttccaaaacagcagataatttctgaatctcagatgttgaatcagtgcaacgggatggatttcttgttcctaagtgttaaatgatcacatacataaaagagtctgagcctgagcaacataatgagaccctgtctctacaaaaaaaaaaaaaagattagccaggcgtggtggtgcacactgatagtcccagctactcaggaggctgagggaggcggatcacttgagctagagagttcaaagctgcagtgagccatgtttgtgccactgcactccagcctgggcaacaaagtgagaccctgtctggaaaaaaaaaaaaaaaaagcgtctgcataattcctggtgcattttgtggatatacaatatgagtatgtgttccatgttttcagaaattcaaaggaagcgtttccacaatatgtgacggtttatttcccaagagatgaaaagattcattaaggtgcatgctttgatttaacatctgcaaacatttaaaaaatataacagtgtgtgacgtagcagtgagagtactatctttttttaaaaagggaaattaagatttatttctggccaatgtgaacagaaataagtcactttatctcactgagcaccaattttacacgtggaaaatagaagaattggaccaaatcagcagtttcaagctgagttgcaaaagttcatggaaccatttcagtcgcttcatggaatcggggtaggcatgaggcccgttgttctttcaacctgagccgcatggctcttgtgtctttaaaccttgtggtaggatttttttttttttctgctttaataagtgaagggtcagggcaccagttggtgtctgagatgccctccagtctggggaaccccgtagatgcttagactactttgaactgaagtatgtgcagtctgccatctcacattaaaatgtaggcattttgtcaattgcttttctttcatctgcacaagaggaaggagagaacgaatcaatacaaccactcttttccttgagactgcaaagaaaatggttctatagtttgatggttctacttcccagatgctacctctcagatttattctcaacagaaaattttttgattacagcagaccagatctttatctgtcaataagttaaaaaagataatctgggctggatgtggtggctcactcctgtaattccagcacttcgggaggccaagacaggaggattgcttgagcccaggaatttgagaccagcctgggcaacatggcgaaaccccacctctacaaaaaaatacaaaaaaattatttgggactggtggcgcatgcctgtggtcccagctactcgggaggctgaggtgggaagatcatttgagcccaggaggttgaggctgcagtgagctatgatcttgccactgcactccagcctgggtgacagagtgagaccttgcctcaaaaagaaaaaaataaagaaaagaaaatctgaaagggaaagcaggcatcaacttccagggatctaataacttcctaacttaaagcaacagaacttacctaacttttggacttttcattttaaaactttgcctctagcagtggacactgtcctcaacacagctacagtttatgtaacacagagtccatattatatggggcatgtctgtatcaaaatgtcatatgtagaaataaagtattaaatattaa

SEQ ID NO: 193918 - DNA, 572 bp, Homo sapiens
  Payload ID: 18304
  Gene Name: transmembrane protein 213
  Uniprot ID: A2RRL7
  ENST ID: ENST00000458494
  CDS Start-End: 99-350
agctcctgcaggtgggagtcgactcacctgcagcaggcactcggcacaactccgcaggaccggctcacctgcaccgggcactcagcacagcctccagcatgcagcgcctccccgctgccacccgggccaccctgatcctcagcctggcctttgcctccctccactcggcttgctcggcagacgtggacttctgcccacaagcagcccggtgctgccgcacaggagtggacgagtacggctggatcgcggcagctgttggctggagcctctggttcctcaccctcatcctgctctgtgtggacaaactgatgaagctgactccagatgagcccaaggacttgcaagcgtgagacccaggctcggtgcacaaaatggtgatcgccaccaatttgtggctaatggggaaggggagtaaggctaacatggtttctattatttaagtcattttcacctttaagcttcagttacttttacaagggaaagaagaaagagcgggagaaccaaataaggcaagccagtgctgcccttgcatgtcactcccaagggcccctgggctgtgcccaggtaactcc

SEQ ID NO: 193919 - DNA, 480 bp, Homo sapiens
  Payload ID: 18304
  Gene Name: transmembrane protein 213
  Uniprot ID: A2RRL7
  ENST ID: ENST00000413208
  CDS Start-End: 94-411
ctgcaggtgggagtcgactcacctgcagcaggcactcggcacaactccgcaggaccggctcacctgcaccgggcactcagcacagcctccagcatgcagcgcctccccgctgccacccgggccaccctgatcctcagcctggcctttgcctccctccactcggcttgctcggcagaagcaagcagcagcaacagctcaagcttgaccgctcaccacccagaccctgggaccctggagcagtgcctcagaagcggatacttggcaaatctgcgaggcgaggccgatcagctgtggaagttctgcacggtgctctgtttctgggagagccggaggagctcctcgcggattgctttgatgagagaggccgaggagtggccaggctggaggtcttccgtggagctggtggggtaacccagcccagggccctgcagtccccggtgggggaggttcccggaaggagctgagggctccctgcctgaa

SEQ ID NO: 193920 - DNA, 2990 bp, Homo sapiens
  Payload ID: 18305
  Gene Name: transmembrane protein 214
  Uniprot ID: Q6NUQ4
  ENST ID: ENST00000238788
  CDS Start-End: 63-2132
gcggcgcgctcgcgccggaccggaaagccggggaagtggccgaggagggagggctgcgagccatggcgaccaagacggcgggcgtggggcggtgggaggtagtgaagaagggtcggcggcctggggtcggcgccggcgccggcggccgaggaggcggcaggaaccgcagggcgctcggggaagcaaacggagtgtggaaatacgacctgacccctgcaatccagaccacaagcaccctttatgagcggggctttgagaatatcatgaagcggcagaataaggagcaggtcccaccccctgctgtggaacctaagaaaccagggaacaagaagcagccaaagaaggtggcaactcctcccaaccaaaaccagaagcagggccgcttccgcagcctggaggaagcactgaaagctctggatgtggcagacctgcagaaggaactggacaagagccagagtgtgttctctggaaacccatccatatggttgaaggacctggccagctatctcaactacaagctacaagctcctctaagtgaacccacgctgagccagcatactcatgattatccctacagcctggtgagccgggagctacgtgggatcatccgagggctgctggcgaaggcagcagggtctctggagctcttttttgaccactgtctgttcaccatgttgcaagagctggataagacaccaggggagtcactacatggttaccgcatctgtatccaggccatcctgcaagacaagcccaagattgccacggcaaacctaggcaagttcctggaactgctgaggtcccaccagagccgaccagcaaagtgtctcaccatcatgtgggccctgggtcaagcaggttttgccaacctcaccgagggactgaaagtgtggctggggatcatgctgcctgtgctgggcatcaagtctctgtctccctttgccatcacatacctggatcggctgctcctgatgcatcccaaccttaccaagggcttcggcatgattggccccaaggacttcttcccacttctggactttgcctatatgccgaacaactccctgacacccagcctgcaggagcagctgtgtcagctctacccccgactgaaagtgctggcatttggagcaaagccggattccaccctgcatacctacttcccttctttcctgtccagagccacccctagctgtccccctgagatgaagaaagagctcctgagcagcctgactgagtgcctgacggtggaccccctcagtgccagcgtctggaggcagctgtaccctaagcacctgtcacagtccagccttctgctggagcacttgctcagctcctgggagcagattcccaagaaggtacagaagtctttgcaagaaaccattcagtccctcaagcttaccaaccaggagctgctgaggaagggtagcagtaacaaccaggatgtcgtcacctgtgacatggcctgcaagggcctgttgcagcaggttcagggtcctcggctgccctggacgcggctcctcctgttgctgctggtcttcgctgtaggcttcctgtgccatgacctccggtcacacagctccttccaggcctcccttactggccggttgcttcgatcatctggcttcttacctgctagccaacaagcgtgtgccaagctctactcctacagtctgcaaggctacagctggctgggggagacactgccgctctggggctcccacctgctcaccgtggtgcggcccagcttgcagctggcctgggctcacaccaatgccacagtcagcttcctttctgcccactgtgcctctcaccttgcgtggtttggtgacagtctcaccagtctctctcagaggctacagatccagctccccgattccgtgaatcagctactccgctatctgagagagctgcccctgcttttccaccagaatgtgctgctgccactgtggcacctcttgcttgaggccctggcctgggcccaggagcactgccatgaggcatgcagaggtgaggtgacctgggactgcatgaagacacagctcagtgaggctgtccactggacctggctttgcctacaggacattacagtggctttcttggactgggcacttgccctgatatcccagcagtaggccctgccttcctggccactgatttctgcatgggtagaccatccaagactgcagcgggtagaaggtggcagttcttcatgggagtctttttaacttggtgcctgagttctctcctaggcaagtggccagttgcctccacctcagttcttccatctttggtggggacagggcccagcagcatctcagcctcctacccacaattccactgaacacttttctggccctactgcacatggcccccagcctccatccttgtgctggtagcctctcacaactccgcccttgccctctgccttccacttccttccatctcatttctaaaccccaaacagctcatctctaaaaagatagaactcccagcaggtggcttctgtgttcttctgacaaatgattcctgcttctccagactttagcagcctcctgttcccattcttggtcacagctctagccacagcagaaggaaaggggcttccagaagaatatagcaccgcattgggaaacagcagcctcacctccacctgaagcctgggtgtggctgtcagtggacatggggagctggatggaaatgcctctcacttcaaaatgcccagcctgccccaaatgcctctaagcccctccctgtcccctcccttgtagtcctacttcttccaactttccattccccatcatgctgggggtcttggtcacaaggctcagcttctctccactgtccatccctcctatcatctgtagagcagagcacaggcagttgtgtgccttgggcccagggaaccctccatcaacctgagacaggactcagtatatggttcttgggtatgccctaccaggtggaataaaggacacagatttgatttctag

SEQ ID NO: 193921 - DNA, 2700 bp, Homo sapiens
  Payload ID: 18305
  Gene Name: transmembrane protein 214
  Uniprot ID: Q6NUQ4
  ENST ID: ENST00000321326
  CDS Start-End: 63-2132
gcggcgcgctcgcgccggaccggaaagccggggaagtggccgaggagggagggctgcgagccatggcgaccaagacggcgggcgtggggcggtgggaggtagtgaagaagggtcggcggcctggggtcggcgccggcgccggcggccgaggaggcggcaggaaccgcagggcgctcggggaagcaaacggagtgtggaaatacgacctgacccctgcaatccagaccacaagcaccctttatgagcggggctttgagaatatcatgaagcggcagaataaggagcaggtcccaccccctgctgtggaacctaagaaaccagggaacaagaagcagccaaagaaggtggcaactcctcccaaccaaaaccagaagcagggccgcttccgcagcctggaggaagcactgaaagctctggatgtggcagacctgcagaaggaactggacaagagccagagtgtgttctctggaaacccatccatatggttgaaggacctggccagctatctcaactacaagctacaagctcctctaagtgaacccacgctgagccagcatactcatgattatccctacagcctggtgagccgggagctacgtgggatcatccgagggctgctggcgaaggcagcagggtctctggagctcttttttgaccactgtctgttcaccatgttgcaagagctggataagacaccaggggagtcactacatggttaccgcatctgtatccaggccatcctgcaagacaagcccaagattgccacggcaaacctaggcaagttcctggaactgctgaggtcccaccagagccgaccagcaaagtgtctcaccatcatgtgggccctgggtcaagcaggttttgccaacctcaccgagggactgaaagtgtggctggggatcatgctgcctgtgctgggcatcaagtctctgtctccctttgccatcacatacctggatcggctgctcctgatgcatcccaaccttaccaagggcttcggcatgattggccccaaggacttcttcccacttctggactttgcctatatgccgaacaactccctgacacccagcctgcaggagcagctgtgtcagctctacccccgactgaaagtgctggcatttggagcaaagccggattccaccctgcatacctacttcccttctttcctgtccagagccacccctagctgtccccctgagatgaagaaagagctcctgagcagcctgactgagtgcctgacggtggaccccctcagtgccagcgtctggaggcagctgtaccctaagcacctgtcacagtccagccttctgctggagcacttgctcagctcctgggagcagattcccaagaaggtacagaagtctttgcaagaaaccattcagtccctcaagcttaccaaccaggagctgctgaggaagggtagcagtaacaaccaggatgtcgtcacctgtgacatggcctgcaagggcctgttgcagcaggttcagggtcctcggctgccctggacgcggctcctcctgttgctgctggtcttcgctgtaggcttcctgtgccatgacctccggtcacacagctccttccaggcctcccttactggccggttgcttcgatcatctggcttcttacctgctagccaacaagcgtgtgccaagctctactcctacagtctgcaaggctacagctggctgggggagacactgccgctctggggctcccacctgctcaccgtggtgcggcccagcttgcagctggcctgggctcacaccaatgccacagtcagcttcctttctgcccactgtgcctctcaccttgcgtggtttggtgacagtctcaccagtctctctcagaggctacagatccagctccccgattccgtgaatcagctactccgctatctgagagagctgcccctgcttttccaccagaatgtgctgctgccactgtggcacctcttgcttgaggccctggcctgggcccaggagcactgccatgaggcatgcagaggtgaggtgacctgggactgcatgaagacacagctcagtgaggctgtccactggacctggctttgcctacaggacattacagtggctttcttggactgggcacttgccctgatatcccagcagtaggccctgccttcctggccactgatttctgcatgggtagaccatccaagactgcagcgggtagaaggtggcagttcttcatgggagtctttttaacttggtgcctgagttctctcctagactttagcagcctcctgttcccattcttggtcacagctctagccacagcagaaggaaaggggcttccagaagaatatagcaccgcattgggaaacagcagcctcacctccacctgaagcctgggtgtggctgtcagtggacatggggagctggatggaaatgcctctcacttcaaaatgcccagcctgccccaaatgcctctaagcccctccctgtcccctcccttgtagtcctacttcttccaactttccattccccatcatgctgggggtcttggtcacaaggctcagcttctctccactgtccatccctcctatcatctgtagagcagagcacaggcagttgtgtgccttgggcccagggaaccctccatcaacctgagacaggactcagtatatggttcttgggtatgccctaccaggtggaataaaggacacagatttgatttcta

SEQ ID NO: 193922 - DNA, 2830 bp, Homo sapiens
  Payload ID: 18305
  Gene Name: transmembrane protein 214
  Uniprot ID: Q6NUQ4
  ENST ID: ENST00000404032
  CDS Start-End: 40-1974
aaagccggggaagtggccgaggagggagggctgcgagccatggcgaccaagacggcgggcgtggggcggtgggaggtagtgaagaagggtcggcggcctggggtcggcgccggcgccggcggccgaggaggcggcaggaaccgcagggcgctcggggaagcaaacggagtgtggaaatacgacctgacccctgcaatccagaccacaagcaccctttatgagcggggctttgagaatatcatgaagcggcagaataaggagcaggtcccaccccctgctgtggaacctaagaaaccagggaacaagaagcagccaaagaaggtggcaactcctcccaaccaaaaccagaagcagggccgcttccgcagcctggaggaagcactgaaagctctggatgtggcagacctgcagaaggaactggacaagagccagagtgtgttctctggaaacccatccatatggttgaaggacctggccagctatctcaactacaagctacaagctcctctaagtgaacccacgctgagccagcatactcatggggagtcactacatggttaccgcatctgtatccaggccatcctgcaagacaagcccaagattgccacggcaaacctaggcaagttcctggaactgctgaggtcccaccagagccgaccagcaaagtgtctcaccatcatgtgggccctgggtcaagcaggttttgccaacctcaccgagggactgaaagtgtggctggggatcatgctgcctgtgctgggcatcaagtctctgtctccctttgccatcacatacctggatcggctgctcctgatgcatcccaaccttaccaagggcttcggcatgattggccccaaggacttcttcccacttctggactttgcctatatgccgaacaactccctgacacccagcctgcaggagcagctgtgtcagctctacccccgactgaaagtgctggcatttggagcaaagccggattccaccctgcatacctacttcccttctttcctgtccagagccacccctagctgtccccctgagatgaagaaagagctcctgagcagcctgactgagtgcctgacggtggaccccctcagtgccagcgtctggaggcagctgtaccctaagcacctgtcacagtccagccttctgctggagcacttgctcagctcctgggagcagattcccaagaaggtacagaagtctttgcaagaaaccattcagtccctcaagcttaccaaccaggagctgctgaggaagggtagcagtaacaaccaggatgtcgtcacctgtgacatggcctgcaagggcctgttgcagcaggttcagggtcctcggctgccctggacgcggctcctcctgttgctgctggtcttcgctgtaggcttcctgtgccatgacctccggtcacacagctccttccaggcctcccttactggccggttgcttcgatcatctggcttcttacctgctagccaacaagcgtgtgccaagctctactcctacagtctgcaaggctacagctggctgggggagacactgccgctctggggctcccacctgctcaccgtggtgcggcccagcttgcagctggcctgggctcacaccaatgccacagtcagcttcctttctgcccactgtgcctctcaccttgcgtggtttggtgacagtctcaccagtctctctcagaggctacagatccagctccccgattccgtgaatcagctactccgctatctgagagagctgcccctgcttttccaccagaatgtgctgctgccactgtggcacctcttgcttgaggccctggcctgggcccaggagcactgccatgaggcatgcagaggtgaggtgacctgggactgcatgaagacacagctcagtgaggctgtccactggacctggctttgcctacaggacattacagtggctttcttggactgggcacttgccctgatatcccagcagtaggccctgccttcctggccactgatttctgcatgggtagaccatccaagactgcagcgggtagaaggtggcagttcttcatgggagtctttttaacttggtgcctgagttctctcctaggcaagtggccagttgcctccacctcagttcttccatctttggtggggacagggcccagcagcatctcagcctcctacccacaattccactgaacacttttctggccctactgcacatggcccccagcctccatccttgtgctggtagcctctcacaactccgcccttgccctctgccttccacttccttccatctcatttctaaaccccaaacagctcatctctaaaaagatagaactcccagcaggtggcttctgtgttcttctgacaaatgattcctgcttctccagactttagcagcctcctgttcccattcttggtcacagctctagccacagcagaaggaaaggggcttccagaagaatatagcaccgcattgggaaacagcagcctcacctccacctgaagcctgggtgtggctgtcagtggacatggggagctggatggaaatgcctctcacttcaaaatgcccagcctgccccaaatgcctctaagcccctccctgtcccctcccttgtagtcctacttcttccaactttccattccccatcatgctgggggtcttggtcacaaggctcagcttctctccactgtccatccctcctatcatctgtagagcagagcacaggcagttgtgtgccttgggcccagggaaccctccatcaacctgagacaggactcagtatatggttcttgggtatgccctaccaggtggaataaaggacacagatttgatttct

SEQ ID NO: 193923 - DNA, 834 bp, Homo sapiens
  Payload ID: 18305
  Gene Name: transmembrane protein 214
  ENST ID: ENST00000434544
  CDS Start-End: 1-421
gtctttgcaagaaaccattcagtccctcaagcttaccaaccaggagctgctgaggaagggtagcagtaacaaccaggatgtcgtcacctgtgacatggcctgcaagggcctgttgcagcaggttcagggtcctcggctgccctggacgcggctcctcctgttgctgctggtcttcgctgtaggcttcctgtgccatgacctccggtcacacagctccttccaggctggctgggggagacactgccgctctggggctcccacctgctcaccgtggtgcggcccagcttgcagctggcctgggctcacaccaatgccacagtcagcttcctttctgcccactgtgcctctcaccttgcgtggtttggtgacagtctcaccagtctctctcagaggctacagatccagctccccgattccgtgaatcagctactccgctatctgagagagctgcccctgcttttccaccagaatgtgctgctgccactgtggcacctcttgcttgaggccctggcctgggcccaggagcactgccatgaggcatgcagaggtgaggtgacctgggactgcatgaagacacagctcagtgaggctgtccactggacctggctttgcctacaggacattacagtggctttcttggactgggcacttgccctgatatcccagcagtaggccctgccttcctggccactgatttctgcatgggtagaccatccaagactgcagcgggtagaaggtggcagttcttcatgggagtctttttaacttggtgcctgagttctctcctaggcaagtggccagttgcctccacctcagttcttccatctttggtgg

SEQ ID NO: 193924 - DNA, 919 bp, Homo sapiens
  Payload ID: 18305
  Gene Name: transmembrane protein 214
  ENST ID: ENST00000444135
  CDS Start-End: 1-919
aagagacagcacattcagggtggatgtgcggcctggatggccttgcttacgggaaggggatcacctcttagcactccccgcctctgccagccccatgcccccagcagcctctccctctgtcgtgctgtgcagctcctgagcagcctgactgagtgcctgacggtggaccccctcagtgccagcgtctggaggcagctgtaccctaagcacctgtcacagtccagccttctgctggagcacttgctcagctcctgggagcagattcccaagaaggtacagaagtctttgcaagaaaccattcagtccctcaagcttaccaaccaggagctgctgaggaagggtagcagtaacaaccaggatgtcgtcacctgtgacatggcctgcaagggcctgttgcagcaggttcagggtcctcggctgccctggacgcggctcctcctgttgctgctggtcttcgctgtaggcttcctgtgccatgacctccggtcacacagctccttccaggcctcccttactggccggttgcttcgatcatctggcttcttacctgctagccaacaagcgtgtgccaagctctactcctacagtctgcaaggctacagctggctgggggagacactgccgctctggggctcccacctgctcaccgtggtgcggcccagcttgcagctggcctgggctcacaccaatgccacagtcagcttcctttctgcccactgtgcctctcaccttgcgtggtttggtgacagtctcaccagtctctctcagaggctacagatccagctccccgattccgtgaatcagctactccgctatctgagagagctgcccctgcttttccaccagaatgtgctgctgccactgtggcacctcttgcttgaggccctggcctgggcccaggagcactgccatgaggcat

SEQ ID NO: 193925 - DNA, 740 bp, Homo sapiens
  Payload ID: 18305
  Gene Name: transmembrane protein 214
  ENST ID: ENST00000425720
  CDS Start-End: 1-740
tggaactgctgaggtcccaccagagccgaccagcaaagtgtctcaccatcatgtgggccctgggtcaagcaggttttgccaacctcaccgagggactgaaagtgtggctggggatcatgctgcctgtgctgggcatcaagtctctgtctccctttgccatcacatacctggatcggctgctcctgatgcatcccaaccttaccaagggcttcggcatgattggccccaaggacttcttcccacttctggactttgcctatatgccgaacaactccctgacacccagcctgcaggagcagctgtgtcagctctacccccgactgaaagtgctggcatttggagcaaagccggattccaccctgcatacctacttcccttctttcctgtccagagccacccctagctgtccccctgagatgaagaaagagctccctgttgacagctgcctgccccgctcactcgagcttcaccctcagaagatggatcccaagagacagcacattcagctcctgagcagcctgactgagtgcctgacggtggaccccctcagtgccagcgtctggaggcagctgtaccctaagcacctgtcacagtccagccttctgctggagcacttgctcagctcctgggagcagattcccaagaaggtacagaagtctttgcaagaaaccattcagtccctcaagcttaccaaccaggagctgctgaggaagggtagcagtaacaaccaggatgtcgtc

SEQ ID NO: 193926 - DNA, 1480 bp, Homo sapiens
  Payload ID: 18305
  Gene Name: transmembrane protein 214
  ENST ID: ENST00000435172
  CDS Start-End: 1-678
agccagcatactcatgattatccctacagcctggtgagccgggagctacgtgggatcatccgagggctgctggcgaaggcagcagggtctctggagctcttttttgaccactgtctgttcaccatgttgcaagagctggataagacaccaggggagtcactacatggttaccgcatctgtatccaggccatcctgcaagacaagcccaagattgccacggcaaacctaggcaagttcctggaactgctgaggtcccaccagagccgaccagcaaagtgtctcaccatcatgtgggccctgggtcaagcaggttttgccaacctcaccgagggactgaaagtgtggctggggatcatgctgcctgtgctgggcatcaagtctctgtctccctttgccatcacatacctggatcggctgctcctgatgcatcccaaccttaccaagggcttcggcatgattggccccaaggacttcttcccacttctggactttgcctatatgccgaacaactccctgacacccagcctgcaggagcagctgtgtcagctctacccccgactgaaagtgctggcatttggagcaaagccggattccaccctgcatacctacttcccttctttcctgtccagagccacccctagctgtccccctgagatgaagaaagagagcccattctgaggcttttccttagctccctgttgacagctgcctgccccgctcactcgagcttcaccctcagaagatggatcccaagagacagcacattcagctcctgagcagcctgactgagtgcctgacggtggaccccctcagtgccagcgtctggaggcagctgtaccctaagcacctgtcacagtccagccttctgctggagcacttgctcagctcctgggagcagattcccaagaaggtacagaagtctttgcaagaaaccattcagtccctcaagcttaccaaccaggagctgctgaggaagggtagcagtaacaaccaggatgtcgtcacctgtgacatggcctgcaagggcctgttgcagcaggttcagggtcctcggctgccctggacgcggctcctcctgttgctgctggtcttcgctgtaggcttcctgtgccatgacctccggtcacacagctccttccaggcctcccttactggccggttgcttcgatcatctggcttcttacctgctagccaacaagcgtgtgccaagctctactcctacagtctgcaaggctacagctggctgggggagacactgccgctctggggctcccacctgctcaccgtggtgcggcccagcttgcagctggcctgggctcacaccaatgccacagtcagcttcctttctgcccactgtgcctctcaccttgcgtggtttggtgacagtctcaccagtctctctcagaggctacagatccagctccccgattccgtgaatcagctactccgctatctgagagagctgcccctgcttttccac

SEQ ID NO: 193927 - DNA, 3581 bp, Homo sapiens
  Payload ID: 18306
  Gene Name: transmembrane protein 215
  Uniprot ID: Q68D42
  ENST ID: ENST00000342743
  CDS Start-End: 366-1073
gatgtaacaaggccaggctcgcgccgcgtcccctctttcccagactcagtgctccctcctcctcccgcgccccgcgctctgcgcgctgagctggcgccgggctccgcttgcacagcaccgggaccgacgggcactgctgggagagccgctctcccaggttccacctccccgatgcagagtccgtgggggaaaccaggctttcctcccagaaccaagggagcgagccgagggggcagctgctgtgggggcttctgaggagacagcctggcttctttccctacttcctggagagggcaggaaacctcagaatagaggaacgctgctccctggtcagcaagcagcccccaacctggatggagtgaaacatgcggcctgatgacattaacccgaggactgggctggtggtggccctggtcagtgtcttcctcgtctttggtttcatgttcaccgtctctgggatgaaaggggagactttgggaaacatccccctcctggccatcgggccagccatctgcctaccaggcatcgcagccattgccctggccaggaaaaccgagggatgcaccaagtggccagagaacgagctgctgtgggtccgcaaattgccctgcttccggaaacccaaagacaaggaggtggtagagctgctgaggaccccttcagacctagaatccggcaaggggagctcagatgagctggctaagaaggcgggcctcagggggaagcctcccccacaaagccagggtgaggtgtccgtggccagctccatcaacagccccacacccacggaggaaggagaatgccagagcctcgtccagaatgggcatcaggaggagacgtccagatacctggacggctactgcccctcgggcagttccctcacctacagtgccttggacgtcaagtgctcagcaagggacagatctgagtgccctgagcctgaggatagcatcttctttgtgccccaggacagtatcatcgtttgctcctacaagcagaacagcccgtatgacagatactgttgttatatcaatcagatacaaggcaggtgggaccacgagaccatcgtctaatctctgcctacaaaggtggctggattgatagaatatgactaagcccagctccccgtggaagcaaattgctctgcttggagagccttcacactgttagaaattgacctggtatgtgatgggtgtgataacctctggtacccgagagtcatgtaaataggcatgttggggacacattttagggaagggcgatgagggttaaggacactggaagaggcagtgggtaggaaaggaagctactccagttgcttcttaacaatttacacaatgttaaatgttttgtaaaataacccaaaaagtgctatccagaaccagctgagagcaagataaatctagagtgggctgcagatgtgaggcatcaaatgatgcatgagctgaccacagggaaactgagctgctttatgtttgaataagttgaaaataaaattaatgatccgttatataaagtaatttttgcctggttaaaagcttatcacacttggtatttgctgaaagaaaaaaaaatcaagatacaagagttaaaccctccttagatgggatggtttttgggaaaagggtagttaaagagagttggattatgtaactgagtcttgtggcattattgtctgacaagatcatggtctctaataaagtaaaataagtgtgagcagctatgtgaaaagttaacatttttagatggctatgttacttcttaaactcttcgtttaaatccatttattgcatctttatctgaaatgggttttttctaaacatttactatcattcatgtattatttccttaccaggtgcaacattatttgaaatgatactttcatagattggaatttgttttcatcaagacaaaatgaattttacatatatatccaagtctttaacattggcagacatgtactgataattaccattcctacataccttttaaaatctgaaaactataaagtctacacattagccttgaacattgcacataatttgtatgaaatgcaatggttaaacctttggaagtgtcattatttgtacatttgttcaactcctctcacagactgtaaatgccagtgaaacaagaactcatctactaaatttaactgaagcctagattttattaagctcacctgatcagtgaacattacatgataaaagtctctttatttcatacatttttgctgctgaggaaaacaacaaatcacaatgatatcctaaaatgtgctttctatttcacttgctcaactgcaatagataagaaggctatcaagcagaatgccatttgatccccggtgaagaaaaatatgaattatatataggaatggtgatagagttcatcttgaagatcagaagtattttgtatccttcaaagaatgatcattttaagtgatcatatagtcttagtcactttctcccaaaaggggaattgaggacaaaaatttgggcatatatgttttgtgtatttcaattccaactctgcaattctttcttaagtatagcaattgttctgtcttaagaatcatggtatttttaaaaaatcataattttcaagtcaagttcaagatcaaaaatatgtaattattttagtagggcttaaatatcagaaatgagatgcatgatcttgggcaaattttatcttcttacacctgagtttcctactctgtgaagggagggggaactgatttacacttgattatttctatcattcattttcagtgtaaatattctatggtgttatgtcaaaggcattttatatattgccaggaaatgagttacagcaaaatgcatgccaaagttatgaaatttatgataattatgtgacatacattgcacagctactactcaaaaaagaattttgtagatgtatgaaagcagattattcaacacaatgcattcctgagaataaaatgaacataatcagagtaaaatatttttgaggagaaaacttaaaatgttggtataactcaaagtaatctaatacacaaccttgcactaaatgtgattgacatttggatttgggatggggagagatagtttcctaaaatcacagtaacttttaataattgtaatgcattttgaaaacagagaatcatatttttataatggtgagaactatgcaataactctttaggaatgaaaacttcctttaagaagtttgccaccgttagagatgaggagatagtgagacagagagatgttcacagagactcagcaaatcttagacaataatgctgcaattttctgaaagaagatgcttgcagtgtcaggtatggtttgggggttggaaaagttacttttctgatttcttggaaccatttaaaactcctttatatcattctgtctctttccaaattgagggtcaactactagtttagagatataaggtattttatcttgttttcaagttctacttcagaagaaaacctatttcatgtttcttctcccattacctacttaagatacttaaggtatttaagtatgcatttgaggaaatattttcctgtgctaaaataaaggtttgcaaatgtt

SEQ ID NO: 193928 - DNA, 1306 bp, Homo sapiens
  Payload ID: 18307
  Gene Name: transmembrane protein 216
  Uniprot ID: Q9P0N5
  ENST ID: ENST00000334888
  CDS Start-End: 273-719
acttccgcccaacgcccggtagtctgagagcctccaaggtcctcccccgcacccctgaggtcctgcagacgacggcgtcgtgggtggtcaccgttatcccttaggtctggagaggggacatccgagcgagggccacttgcggccaggcccgagctcgtccagctccgggtgaccacagagtgccgcgggcgggcagaggggccggaaacccaggccgcttcgtccctgtttccggcagcgccgcgctgctccgggagccgctgtggcagcgtatgctgccacggggactgaagatggcgccgcgaggtaaacggttgtcctccaccccgctggaaatcctgttctttctgaacgggtggtataatgctacctatttcctgctggaacttttcatatttctgtataaaggtgtcctgctaccatatccaacagctaacctagtactggatgtggtgatgctcctcctttatcttggaattgaagtaattcgcctgttttttggtacaaagggaaacctctgccagcgaaagatgccgctcagtattagcgtggccttgaccttcccatctgccatgatggcctcctattacctgctgctgcagacctacgtactccgcctggaagccatcatgaatggcatcttgctcttcttctgtggctcagagcttttacttgaggtgctcaccttggctgctttctccagtatggacaggatttgaagtacagaatttcagccagcagcccatcaggctgacaccacacatattgcttctggtactttagccacaccagtgagaattggtggggcaagttgtcctgagaaaggctgtgtggcttttcttcagcacagacatttgggcaagcaactcagcataaggccagtgggtaccatcttctaaaccaggaccatcagcccaagagactcttctacactccagtatagggaggggcaaggttattcccatcctgccccttctcagaaccagtcccctgctgacctcaagttctcctccttgatcaccgtggccagagcatctcgtgtggaccatctaggctccttgggcttcaagcaggacctgagccacatgctccctgtacgagctgtgctatacctgtcccacatgagcacggagagcctcatgttggtgggtttccagagtgatgtgaaagcctctcaccccaatcctcggagactgagttccacaacttttttagtagctcatagtgttatttttctactctcttcatgaaactaactttattttataataaatatgtattttctgttgtgggggttgcagccttt

SEQ ID NO: 193929 - DNA, 908 bp, Homo sapiens
  Payload ID: 18307
  Gene Name: transmembrane protein 216
  ENST ID: ENST00000398979
  CDS Start-End: 437-691
ccaaggtcctcccccgcacccctgaggtcctgcagacgacggcgtcgtgggtggtcaccgttatcccttaggtctggagaggggacatccgagcgagggccacttgcggccaggcccgagctcgtccagctccgggtgaccacagagtgccgcgggcgggcagaggggccggaaacccaggccgcttcgtccctgtttccggcagcgccgcgctgctccgggagccgctgtggcagcgtatgctgccacggggactgaagatggcgccgcgaggtgagattccggaggtaaacggttgtcctccaccccgctggaaatcctgttctttctgaacgggtggtataatgctacctatttcctgctggaacttttcatatttctgtataaaggtgtcctgctaccatatccaacagctaacctagtactggatgtggtgatgctcctcctttatcttggaattgaagtaattcgcctgttttttggtacaaagggaaacctctgccagcgaaagatgccgctcagtattagcgtggccttgaccttcccatctgccatgatggcctcctattacctgctgctgcagacctacgtactccgcctggaagccatcatgaatggcatcttgctcttcttctgtggctcagagcttttacttgaggtgctcaccttggctgctttctccaggatttgaagtacagaatttcagccagcagcccatcaggctgacaccacacatattgcttctggtactttagccacaccagtgagaattggtggggcaagttgtcctgagaaaggctgtgtggcttttcttcagcacagacatttgggcaagcaactcagcataaggccagtgggtaccatcttctaaaccaggaccatcagcccaagagactcttctacactcc

SEQ ID NO: 193930 - DNA, 1958 bp, Homo sapiens
  Payload ID: 18307
  Gene Name: transmembrane protein 216
  Uniprot ID: Q9P0N5
  ENST ID: ENST00000515837
  CDS Start-End: 946-1383
cagttttctgtttttttttttttttgagacagagtctcactgtcgcccaggctggagtgcggtggcgcgatctcagctcactgcaacctccgcctcccgggttcgagcgattctcctacctcagcctcccaagtagctgtaactactggcgcgcgccagtacgcccggctaatttttgtatttttagtagagacggggtttcgccatgttggccaggctgatttcgaactcctgacctcaggtgatccatcacctcggcctcccaaagtgctgggattacaggcgtgagccactaagcccggccagcaacacgcttttaccgctgcaaatccggatcaggcaggctttgaagcccagctcacaggccgtctcttggaaactaacttagatttccacctgggagcactttgtcctctcagctcccactgcaccactttatggatcgcgtggtgactcgtttcattttatttatgtgtgttcctggaaaggacgctctatttccttcgtgtctctacctggtaggtaaatcggccgcagaaaagaccaatgctaactccaccctgcatttgcagagatccgtcgctcacaccttttcttgtcttccgttgaaaaaagagaatcgtgggagtaggacctatttgccaatctcctggtaacactatcacaactggccacttccgcccaacgcccggtagtctgagagcctccaaggtcctcccccgcacccctgaggtcctgcagacgacggcgtcgtgggtggtcaccgttatcccttaggtctggagaggggacatccgagcgagggccacttgcggccaggcccgagctcgtccagctccgggtgaccacagagtgccgcgggcgggcagaggggccggaaacccaggccgcttcgtccctgtttccggcagcgccgcgctgctccgggagccgctgtggcagcgtatgctgccacggggactgaagatggcgccgcgaggtaaacggttgtcctccaccccgctggaaatcctgttctttctgaacgggtggtataatgctacctatttcctgctggaacttttcatatttctgtataaaggtgtcctgctaccatatccaacagctaacctagtactggatgtggtgatgctcctcctttatcttggaattgaagtaattcgcctgttttttggtacaaagggaaacctctgccagcgaaagatgccgctcagtattagcgtggccttgaccttcccatctgccatgatggcctcctattacctgctgctgcagacctacgtactccgcctggaagccatcatgaatggcatcttgctcttcttctgtggctcagagcttttacttgaggtgctcaccttggctgctttctccaggatttgaagtacagaatttcagccagcagcccatcaggctgacaccacacatattgcttctggtactttagccacaccagtgagaattggtggggcaagttgtcctgagaaaggctgtgtggcttttcttcagcacagacatttgggcaagcaactcagcataaggccagtgggtaccatcttctaaaccaggaccatcagcccaagagactcttctacactccagtatagggaggggcaaggttattcccatcctgccccttctcagaaccagtcccctgctgacctcaagttctcctccttgatcaccgtggccagagcatctcgtgtggaccatctaggctccttgggcttcaagcaggacctgagccacatgctccctgtacgagctgtgctatacctgtcccacatgagcacggagagcctcatgttggtgggtttccagagtgatgtgaaagcctctcaccccaatcctcggagactgagttccacaacttttttagtagctcatagtgttatttttctactctcttcatgaaactaactttattttataataaatatgtattttctgttgtgggg

SEQ ID NO: 193931 - DNA, 1546 bp, Homo sapiens
  Payload ID: 18308
  Gene Name: transmembrane protein 217
  Uniprot ID: Q8N7C4
  ENST ID: ENST00000336655
  CDS Start-End: 41-730
agttcctacccgcgagagggaagaagcaggaggtctcagcatgaaacagcagcagtggtgtgggatgactgccaaaatgggcaccgtgttgtcaggggtcttcaccatcatggccgtagacatgtatctcatctttgaacagaagcacctagggaatggcagttgcactgagatcacaccaaagtacaggggtgcaagtaacatcataaataacttcatcatctgctggagttttaaaatcgtcctcttcctgtctttcatcaccatcctcatcagctgcttcctcctgtactcagtgtatgcccagatcttcaggggcctggtcatctacattgtctggatttttttctatgaaactgcaaacgtcgtaatacaaatcctcaccaacaatgactttgacattaaagaggtcagaatcatgcgctggtttggcttggtgtctcgtacagtcatgcactgtttctggatgttctttgtcatcaactatgcccacataacctacaaaaaccggagccagggcaatataatttcctacaagagacgaatttctacagcggagattctccacagcagaaataaaagattatcaatttcgagtgggttcagtggctcacacctggaatcccagtactttgagaggcagagcttccacactagcatatttacctgtctgtctccagtgccaagctcagcccccagcacctgtagatacacaatagatgtctgctgagaggtgctctggtaaaacaagtataaaatgaatgtcaggatgttctccctcatggtgggcatcttctctgtccttaataccacccagttcttcatctttgacctgaaccagaagacacacatttgctatgaggccaagttcagcatctacgtggactcaaagtcggagctagtcacttggaccctgttccacagggctaatatcagcactggcctctccctcaccaccatcatcatcggctgcttcctcttttattgtatccacaagaatatctacatggggctgctgatctatgccatgtggatcatcacttacgagctcatcaacttctccatagtcctgctcctcaacgggatcatcaaagatcacttcaagacgctgagttatttgcactggatcttccaaatctcacacatgctcctgcactttttctgtctgcccttcatcgtcaagcatgcatacaacctttacaaggaatcccagactgtgggcaggaaacgccgccacaggctctgctccaccattgcagtgaactcatgactacctgtccgtctgggaatgttgtaccggaagttaaactgaaccatgccagatgccaggaaaggtgggagggaatggtgttcctcaacaatggaaccctccctaccctgcctgtcttctgttgatgctgcttggtttgtcagggcttttgagttttacgcactgaggaatgattctcgggagagggcaggttgtgcggatcaattattttacagatgtgttgtgtgacttgttttagcagttaatgatatgtggccttgtgcttacttaaccatc

SEQ ID NO: 193932 - DNA, 1489 bp, Homo sapiens
  Payload ID: 18308
  Gene Name: transmembrane protein 217
  Uniprot ID: Q8N7C4
  ENST ID: ENST00000356757
  CDS Start-End: 68-703
ttggacgagccgagaggcggggctcaaagttcctacccgcgagagggaagaagcaggaggtctcagcatgaaacagcagcagtggtgtgggatgactgccaaaatgggcaccgtgttgtcaggggtcttcaccatcatggccgtagacatgtatctcatctttgaacagaagcacctagggaatggcagttgcactgagatcacaccaaagtacaggggtgcaagtaacatcataaataacttcatcatctgctggagttttaaaatcgtcctcttcctgtctttcatcaccatcctcatcagctgcttcctcctgtactcagtgtatgcccagatcttcaggggcctggtcatctacattgtctggatttttttctatgaaactgcaaacgtcgtaatacaaatcctcaccaacaatgactttgacattaaagaggtcagaatcatgcgctggtttggcttggtgtctcgtacagtcatgcactgtttctggatgttctttgtcatcaactatgcccacataacctacaaaaaccggagccagggcaatataatttcctacaagagacgaatttctacagcggagattctccacagcagaaataaaagattatcaatttcgagtgggttcagtggctcacacctggaatcccagtactttgagaggcagaggaggtgctctggtaaaacaagtataaaatgaatgtcaggatgttctccctcatggtgggcatcttctctgtccttaataccacccagttcttcatctttgacctgaaccagaagacacacatttgctatgaggccaagttcagcatctacgtggactcaaagtcggagctagtcacttggaccctgttccacagggctaatatcagcactggcctctccctcaccaccatcatcatcggctgcttcctcttttattgtatccacaagaatatctacatggggctgctgatctatgccatgtggatcatcacttacgagctcatcaacttctccatagtcctgctcctcaacgggatcatcaaagatcacttcaagacgctgagttatttgcactggatcttccaaatctcacacatgctcctgcactttttctgtctgcccttcatcgtcaagcatgcatacaacctttacaaggaatcccagactgtgggcaggaaacgccgccacaggctctgctccaccattgcagtgaactcatgactacctgtccgtctgggaatgttgtaccggaagttaaactgaaccatgccagatgccaggaaaggtgggagggaatggtgttcctcaacaatggaaccctccctaccctgcctgtcttctgttgatgctgcttggtttgtcagggcttttgagttttacgcactgaggaatgattctcgggagagggcaggttgtgcggatcaattattttacagatgtgttgtgtgacttgttttagcagttaatgatatgtggccttgtgcttacttaaccatct

SEQ ID NO: 193933 - DNA, 1034 bp, Homo sapiens
  Payload ID: 18309
  Gene Name: transmembrane protein 218
  Uniprot ID: A2RU14
  ENST ID: ENST00000279968
  CDS Start-End: 325-672
tagagcctgggggagagtggatccaggtgaagggggcagaggactgggagttttcatcctcttgaataagaactcgacaacagagtgggaactttctgtcttgtgatccattgcctggtgagtcacagctcacaccatggatttaacctgagagcttcaacttctgctttggccctggagttcccatgccctggtgtcttctaccagttcttaggctttctgtatttgtctgaatgctttcacgggagtgtgttgcactggagcacagaggacactcgatcgtgcggcgcgcagggcggggggccgccgctgcctccccgcgggatggctggcactgtgctcggagtcggtgcgggcgtgttcatcttagccctgctctgggtggcagtgctgctgctgtgtgtgctgctgtccagagcctccggggcggcgaggttctctgtcatttttttattcttcggtgctgtgatcatcacatcagttctgttgcttttcccgcgagctggtgaattcccagccccagaagtggaagttaagattgtggatgactttttcattggccgctatgtcctgctggctttccttagtgccatcttccttggaggcctcttcttggttttaatccattatgttctggagccgatctatgccaaaccactgcactcctactgaccactcttcaggaaaacgaaaacctgttctctccttcattgtgatgacattgatgagcaggaaggcactattcagagccttgttttgacagccctcatgccttaaggttagaggagtatctgtccatcactaagacaaatctctggagtcctggcttccagaaacaggattgccaaattgtccctgtggggctagattcttaccagcttaagaaggatattgctatcttcttagtacccgtaccttaggatttccaactgttttgaaagggaaatagtaacagtgatctgcttagagtggattttcactcaagtccttagtaagtggattttggggaaaaaagcacctgggcttctggttct

SEQ ID NO: 193934 - DNA, 873 bp, Homo sapiens
  Payload ID: 18309
  Gene Name: transmembrane protein 218
  ENST ID: ENST00000533273
  CDS Start-End: 663-873
ctaagtaaaccagagccccgtgggctggaacgcgccggaatctgaggtgtgagtagagcctgggggagagtggatccaggtgaagggggcagaggactgggagttttcatcctcttgaataagaactcgacaacagagtgggaactttctgtcttgtgatccattgcctggtgagtcacagctcacaccatggatttaacctgagagcttcaacttctgctttggccctggagttcccatgccctggtgtcttctaccagttcttaggtagggttttatattcagagagggttcagctttctcccgtgggctgggggaagaggtcaaagtagaactcaggtaccaaatttgaaaggaaacactcagaaaaaacttctgagcgcagagcggaaaacaccctctcagtccccaccaaagagaaaggctttgggttctaaatttccagtttccattaagggactctgggactggacatttctgaaaattaatgacctgtactgagtaatcctcctaacacactgatcatcaaaaaataacctgtaatgagtttaggctttctgtatttgtctgaatgctttcacgggagtgtgttgcactggagcacagaggacactcgatcgtgcggcgcgcagggcggggggccgccgctgcctccccgcgggatggctggcactgtgctcggagtcggtgcgggcgtgttcatcttagccctgctctgggtggcagtgctgctgctgtgtgtgctgctgtccagagcctccggggcggcgaggttctctgtcatttttttattcttcggtgctgtgatcatcacatcagttctgttgcttttcccgcgagctggtgaattcccagccccagaagtggaagtta

SEQ ID NO: 193935 - DNA, 734 bp, Homo sapiens
  Payload ID: 18309
  Gene Name: transmembrane protein 218
  ENST ID: ENST00000529609
  CDS Start-End: 270-407
agagccccgtgggctggaacgcgccggaatctgaggtgtgagtagagcctgggggagagtggatccaggtgaagggggcagaggactgggagttttcatcctcttgaataagaactcgacaacagagtgggaactttctgtcttgtgatccattgcctggctttctgtatttgtctgaatgctttcacgggagtgtgttgcactggagcacagaggacactcgatcgtgcggcgcgcagggcggggggccgccgctgcctccccgcgggatggctggcactgtgctcggagtcggtgcgggcgtgttcatcttagccctgctctgggtggcagtgctgctgctgtgtgtgctgctgtccagagcctccggggcggcgagttctgttgcttttcccgcgagctggtgaattcccagccccagaagtggaagttaagattgtggatgactttttcattggccgctatgtcctgctggctttccttagtgccatcttccttggaggcctcttcttggttttaatccattatgttctggagccgatctatgccaaaccactgcactcctactgaccactcttcaggaaaacgaaaacctgttctctccttcattgtgatgacattgatgagcaggaaggcactattcagagccttgttttgacagccctcatgccttaaggttagaggagtatctgtccatcactaagacaaatctctggagtcctggcttccagaaa

SEQ ID NO: 193936 - DNA, 954 bp, Homo sapiens
  Payload ID: 18309
  Gene Name: transmembrane protein 218
  ENST ID: ENST00000532156
  CDS Start-End: 291-428
tagagcctgggggagagtggatccaggtgaagggggcagaggactgggagttttcatcctcttgaataagaactcgacaacagagtgggaactttctgtcttgtgatccattgcctggtgagtcacagctcacaccatggatttaacctgagagcttcaacttctgctttggccctggagttcccatgccctggtgtcttctaccagttcttagtgtgttgcactggagcacagaggacactcgatcgtgcggcgcgcagggcggggggccgccgctgcctccccgcgggatggctggcactgtgctcggagtcggtgcgggcgtgttcatcttagccctgctctgggtggcagtgctgctgctgtgtgtgctgctgtccagagcctccggggcggcgagttctgttgcttttcccgcgagctggtgaattcccagccccagaagtggaagttaagattgtggatgactttttcattggccgctatgtcctgctggctttccttagtgccatcttccttggaggcctcttcttggttttaatccattatgttctggagccgatctatgccaaaccactgcactcctactgaccactcttcaggaaaacgaaaacctgttctctccttcattgtgatgacattgatgagcaggaaggcactattcagagccttgttttgacagccctcatgccttaaggttagaggagtatctgtccatcactaagacaaatctctggagtcctggcttccagaaacaggattgccaaattgtccctgtggggctagattcttaccagcttaagaaggatattgctatcttcttagtacccgtaccttaggatttccaactgttttgaaagggaaatagtaacagtgatctgcttagagtggattttcactcaagtccttagtaagtggattttggggaaaaaagcacctgggcttctggttctt

SEQ ID NO: 193937 - DNA, 848 bp, Homo sapiens
  Payload ID: 18309
  Gene Name: transmembrane protein 218
  Uniprot ID: A2RU14
  ENST ID: ENST00000529583
  CDS Start-End: 381-728
aacgcgccggaatctgaggtgtgagtagagcctgggggagagtggatccaggtgaagggggcagagggcttgagtcagtgtgaaaatcgggggatgggtgagatatctccctccagcagcagcacttaggccacattaccctctgaggaatccacatttgtcttagatagttacctgtgcagggatcagtccatttattcctattttctctgacagctggatgaaagggactgggagttttcatcctcttgaataagaactcgacaacagagtgggaactttctgtcttgtgatccattgcctgtgtgttgcactggagcacagaggacactcgatcgtgcggcgcgcagggcggggggccgccgctgcctccccgcgggatggctggcactgtgctcggagtcggtgcgggcgtgttcatcttagccctgctctgggtggcagtgctgctgctgtgtgtgctgctgtccagagcctccggggcggcgaggttctctgtcatttttttattcttcggtgctgtgatcatcacatcagttctgttgcttttcccgcgagctggtgaattcccagccccagaagtggaagttaagattgtggatgactttttcattggccgctatgtcctgctggctttccttagtgccatcttccttggaggcctcttcttggttttaatccattatgttctggagccgatctatgccaaaccactgcactcctactgaccactcttcaggaaaacgaaaacctgttctctccttcattgtgatgacattgatgagcaggaaggcactattcagagccttgttttgacagccctcatgccttaaggttagaggagtatc

SEQ ID NO: 193938 - DNA, 910 bp, Homo sapiens
  Payload ID: 18309
  Gene Name: transmembrane protein 218
  ENST ID: ENST00000524373
  CDS Start-End: 699-910
gggctggaacgcgccggaatctgaggtggcttgagtcagtgtgaaaatcgggggatgggtgagatatctccctccagcagcagcacttaggccacattaccctctgaggaatccacatttgtcttagatagactgggagttttcatcctcttgaataagaactcgacaacagagtgggaactttctgtcttgtgatccattgcctggtgagtcacagctcacaccatggatttaacctgagagcttcaacttctgctttggccctggagttcccatgccctggtgtcttctaccagttcttaggtagggttttatattcagagagggttcagctttctcccgtgggctgggggaagaggtcaaagtagaactcaggtaccaaatttgaaaggaaacactcagaaaaaacttctgagcgcagagcggaaaacaccctctcagtccccaccaaagagaaaggctttgggttctaaatttccagtttccattaagggactctgggactggacatttctgaaaattaatgacctgtactgagtaatcctcctaacacactgatcatcaaaaaataacctgtaatgagtttaggctttctgtatttgtctgaatgctttcacgggagtgtgttgcactggagcacagaggacactcgatcgtgcggcgcgcagggcggggggccgccgctgcctccccgcgggatggctggcactgtgctcggagtcggtgcgggcgtgttcatcttagccctgctctgggtggcagtgctgctgctgtgtgtgctgctgtccagagcctccggggcggcgaggttctctgtcatttttttattcttcggtgctgtgatcatcacatcagttctgttgcttttcccgcgagctggtgaattcccagccccagaagtggaagttaa

SEQ ID NO: 193939 - DNA, 1103 bp, Homo sapiens
  Payload ID: 18309
  Gene Name: transmembrane protein 218
  Uniprot ID: A2RU14
  ENST ID: ENST00000532407
  CDS Start-End: 394-741
tagagcctgggggagagtggatccaggtgaagggggcagagggcttgagtcagtgtgaaaatcgggggatgggtgagatatctccctccagcagcagcacttaggccacattaccctctgaggaatccacatttgtcttagatagactgggagttttcatcctcttgaataagaactcgacaacagagtgggaactttctgtcttgtgatccattgcctggtgagtcacagctcacaccatggatttaacctgagagcttcaacttctgctttggccctggagttcccatgccctggtgtcttctaccagttcttagtgtgttgcactggagcacagaggacactcgatcgtgcggcgcgcagggcggggggccgccgctgcctccccgcgggatggctggcactgtgctcggagtcggtgcgggcgtgttcatcttagccctgctctgggtggcagtgctgctgctgtgtgtgctgctgtccagagcctccggggcggcgaggttctctgtcatttttttattcttcggtgctgtgatcatcacatcagttctgttgcttttcccgcgagctggtgaattcccagccccagaagtggaagttaagattgtggatgactttttcattggccgctatgtcctgctggctttccttagtgccatcttccttggaggcctcttcttggttttaatccattatgttctggagccgatctatgccaaaccactgcactcctactgaccactcttcaggaaaacgaaaacctgttctctccttcattgtgatgacattgatgagcaggaaggcactattcagagccttgttttgacagccctcatgccttaaggttagaggagtatctgtccatcactaagacaaatctctggagtcctggcttccagaaacaggattgccaaattgtccctgtggggctagattcttaccagcttaagaaggatattgctatcttcttagtacccgtaccttaggatttccaactgttttgaaagggaaatagtaacagtgatctgcttagagtggattttcactcaagtccttagtaagtggattttggggaaaaaagcacctgggcttctggttct

SEQ ID NO: 193940 - DNA, 812 bp, Homo sapiens
  Payload ID: 18309
  Gene Name: transmembrane protein 218
  Uniprot ID: A2RU14
  ENST ID: ENST00000527766
  CDS Start-End: 198-545
ccggaatctgaggtgtgagtagagcctgggggagagtggatccaggtgaagggggcagaggactgggagttttcatcctcttgaataagaactcgacaacagagtgggaactttctgtcttgtgatccattgcctgcacagaggacactcgatcgtgcggcgcgcagggcggggggccgccgctgcctccccgcgggatggctggcactgtgctcggagtcggtgcgggcgtgttcatcttagccctgctctgggtggcagtgctgctgctgtgtgtgctgctgtccagagcctccggggcggcgaggttctctgtcatttttttattcttcggtgctgtgatcatcacatcagttctgttgcttttcccgcgagctggtgaattcccagccccagaagtggaagttaagattgtggatgactttttcattggccgctatgtcctgctggctttccttagtgccatcttccttggaggcctcttcttggttttaatccattatgttctggagccgatctatgccaaaccactgcactcctactgaccactcttcaggaaaacgaaaacctgttctctccttcattgtgatgacattgatgagcaggaaggcactattcagagccttgttttgacagccctcatgccttaaggttagaggagtatctgtccatcactaagacaaatctctggagtcctggcttccagaaacaggattgccaaattgtccctgtggggctagattcttaccagcttaagaaggatattgctatcttcttagtacccgtaccttaggatttccaactgttttgaa

SEQ ID NO: 193941 - DNA, 584 bp, Homo sapiens
  Payload ID: 18309
  Gene Name: transmembrane protein 218
  ENST ID: ENST00000529530
  CDS Start-End: 427-584
aacccaccgcgctcggcgttgccgggagccgcgctaggcgtaagctaatgaggaagaagttggccgttgaaagagcaacgctgattagtgaatcttaaatcacctaaatgaaagcccacttgtgattcgccctaagtaaaccagagccccgtgggctggaacgcgccggaatctgaggactgggagttttcatcctcttgaataagaactcgacaacagagtgggaactttctgtcttgtgatccattgcctggtgagtcacagctcacaccatggatttaacctgagagcttcaacttctgctttggccctggagttcccatgccctggtgtcttctaccagttcttagtgtgttgcactggagcacagaggacactcgatcgtgcggcgcgcagggcggggggccgccgctgcctccccgcgggatggctggcactgtgctcggagtcggtgcgggcgtgttcatcttagccctgctctgggtggcagtgctgctgctgtgtgtgctgctgtccagagcctccggggcggcgaggttctctgtcatttttttattcttcggtgctgtgatcatcacatcagt

SEQ ID NO: 193942 - DNA, 706 bp, Homo sapiens
  Payload ID: 18309
  Gene Name: transmembrane protein 218
  Uniprot ID: A2RU14
  ENST ID: ENST00000527271
  CDS Start-End: 283-630
gtgggctggaacgcgccggaatctgagggcttgagtcagtgtgaaaatcgggggatgggtgagatatctccctccagcagcagcacttaggccacattaccctctgaggaatccacatttgtcttagatagactgggagttttcatcctcttgaataagaactcgacaacagagtgggaactttctgtcttgtgatccattgcctgtgtgttgcactggagcacagaggacactcgatcgtgcggcgcgcagggcggggggccgccgctgcctccccgcgggatggctggcactgtgctcggagtcggtgcgggcgtgttcatcttagccctgctctgggtggcagtgctgctgctgtgtgtgctgctgtccagagcctccggggcggcgaggttctctgtcatttttttattcttcggtgctgtgatcatcacatcagttctgttgcttttcccgcgagctggtgaattcccagccccagaagtggaagttaagattgtggatgactttttcattggccgctatgtcctgctggctttccttagtgccatcttccttggaggcctcttcttggttttaatccattatgttctggagccgatctatgccaaaccactgcactcctactgaccactcttcaggaaaacgaaaacctgttctctccttcattgtgatgacattgatgagcaggaaggcactattcaga

SEQ ID NO: 193943 - DNA, 972 bp, Homo sapiens
  Payload ID: 18309
  Gene Name: transmembrane protein 218
  Uniprot ID: A2RU14
  ENST ID: ENST00000526175
  CDS Start-End: 345-692
cccgtgggctggaacgcgccggaatctgagggcttgagtcagtgtgaaaatcgggggatgggtgagatatctccctccagcagcagcacttaggccacattaccctctgaggaatccacatttgtcttagatagttacctgtgcagggatcagtccatttattcctattttctctgacagctggatgaaagggactgggagttttcatcctcttgaataagaactcgacaacagagtgggaactttctgtcttgtgatccattgcctgtgtgttgcactggagcacagaggacactcgatcgtgcggcgcgcagggcggggggccgccgctgcctccccgcgggatggctggcactgtgctcggagtcggtgcgggcgtgttcatcttagccctgctctgggtggcagtgctgctgctgtgtgtgctgctgtccagagcctccggggcggcgaggttctctgtcatttttttattcttcggtgctgtgatcatcacatcagttctgttgcttttcccgcgagctggtgaattcccagccccagaagtggaagttaagattgtggatgactttttcattggccgctatgtcctgctggctttccttagtgccatcttccttggaggcctcttcttggttttaatccattatgttctggagccgatctatgccaaaccactgcactcctactgaccactcttcaggaaaacgaaaacctgttctctccttcattgtgatgacattgatgagcaggaaggcactattcagagccttgttttgacagccctcatgccttaaggttagaggagtatctgtccatcactaagacaaatctctggagtcctggcttccagaaacaggattgccaaattgtccctgtggggctagattcttaccagcttaagaaggatattgctatcttcttagtacccgtaccttaggatttccaactgttttgaaagggaaatagtaa

SEQ ID NO: 193944 - DNA, 1117 bp, Homo sapiens
  Payload ID: 18309
  Gene Name: transmembrane protein 218
  ENST ID: ENST00000528724
  CDS Start-End: 157-582
gactgggagttttcatcctcttgaataagaactcgacaacagagtgggaactttctgtcttgtgatccattgcctggtgatgtgttgcactggagcacagaggacactcgatcgtgcggcgcgcagggcggggggccgccgctgcctccccgcgggatggctggcactgtgctcggagtcggtgcgggcgtgttcatcttagccctgctctgggtggcagtgctgctgctgtgtgtgctgctgtccagagcctccggggcggcgaggaattgggaattaccaagaataaatgggaatgcacccagctggtacctgtctaggaagaaggactttgggatgaagaggttctctgtcatttttttattcttcggtgctgtgatcatcacatcagttctgttgcttttcccgcgagctggtgaattcccagccccagaagtggaagttaagattgtggatgactttttcattggccgctatgtcctgctggctttccttagtgccatcttccttggaggcctcttcttggttttaatccattatgttctggagccgatctatgccaaaccactgcactcctactgaccactcttcaggaaaacgaaaacctgttctctccttcattgtgatgacattgatgagcaggaaggcactattcagagccttgttttgacagccctcatgccttaaggttagaggagtatctgtccatcactaagacaaatctctggagtcctggcttccagaaacaggattgccaaattgtccctgtggggctagattcttaccagcttaagaaggatattgctatcttcttagtacccgtaccttaggatttccaactgttttgaaagggaaatagtaacagtgatctgcttagagtggattttcactcaagtccttagtaagtggattttggggaaaaaagcacctgggcttctggttctttttgataatatataaaattattcattatgaggttgcagttgtttgcaaaggagaggcactcaaatttgaaaggttattttaatgtgataatttggaagacttactcagatgttggtcattgaccactctgtgcatatatttctgcagagctctgtgaaggcaatgagtgtca

SEQ ID NO: 193945 - DNA, 1828 bp, Homo sapiens
  Payload ID: 18309
  Gene Name: transmembrane protein 218
  Uniprot ID: A2RU14
  ENST ID: ENST00000531909
  CDS Start-End: 420-767
gaagttggccgttgaaagagcaacgctgattagtgaatcttaaatcacctaaatgaaagcccacttgtgattcgccctaagtaaaccagagccccgtgggctggaacgcgccggaatctgaggtgtgagtagagcctgggggagagtggatccaggtgaagggggcagaggactgggagttttcatcctcttgaataagaactcgacaacagagtgggaactttctgtcttgtgatccattgcctggtgagtcacagctcacaccatggatttaacctgagagcttcaacttctgctttggccctggagttcccatgccctggtgtcttctaccagttcttagtgtgttgcactggagcacagaggacactcgatcgtgcggcgcgcagggcggggggccgccgctgcctccccgcgggatggctggcactgtgctcggagtcggtgcgggcgtgttcatcttagccctgctctgggtggcagtgctgctgctgtgtgtgctgctgtccagagcctccggggcggcgaggttctctgtcatttttttattcttcggtgctgtgatcatcacatcagttctgttgcttttcccgcgagctggtgaattcccagccccagaagtggaagttaagattgtggatgactttttcattggccgctatgtcctgctggctttccttagtgccatcttccttggaggcctcttcttggttttaatccattatgttctggagccgatctatgccaaaccactgcactcctactgaccactcttcaggaaaacgaaaacctgttctctccttcattgtgatgacattgatgagcaggaaggcactattcagagccttgttttgacagccctcatgccttaaggttagaggagtatctgtccatcactaagacaaatctctggagtcctggcttccagaaacaggattgccaaattgtccctgtggggctagattcttaccagcttaagaaggatattgctatcttcttagtacccgtaccttaggatttccaactgttttgaaagggaaatagtaacagtgatctgcttagagtggattttcactcaagtccttagtaagtggattttggggaaaaaagcacctgggcttctggttctttttgataatatataaaattattcattatgaggttgcagttgtttgcaaaggagaggcactcaaatttgaaaggttattttaatgtgataatttggaagacttactcagatgttggtcattgaccactctgtgcatatatttctgcagagctctgtgaaggcaatgagtgtcacttccctctgctctaataaagcaataaataatagctaaagggctgactttcacttcgaactcttggccacggctttttaatcaagttctttaggtttccttgggattagaggaaaggtatggaaatattgttttttgttttttgtcttgccatgtatctgtaggtttttttcttccatgatgtggtgggctgtgtgtgccttatttaattaccatgagtccattttggggtgtcttcacttttcatctttgtagccctttctccaaagctagtgaggaaggtatattctcaacatcagatataactctatacctgtctgatctcccagaccaaatgaaatttgcattaaatggaggggccctggtcaggttccactttggaagtctgatcctgactccctagagccatttgaaaaagaatcttctggcttaaaattaagaaccaagaaaacaagttggaaagagatcactgatggagtatgtgctctatgccaatagcacactaattcctttgaggtttaatttat

SEQ ID NO: 193946 - DNA, 999 bp, Homo sapiens
  Payload ID: 18310
  Gene Name: transmembrane protein 219
  Uniprot ID: Q86XT9
  ENST ID: ENST00000279396
  CDS Start-End: 141-863
gaggaggagggtcggggacggaagcgcagagcacggaccccgccccctcgcggccccgctcgtgacgtcgcggggggcgccggcctccgcccggccccgagggcaggctctccccggaggctcagccccctctgctccccatgggcaactgccaggcagggcacaacctgcacctgtgtctggcccaccacccacctctggtctgtgccactttgatcctgctgctccttggcctctctggcctgggccttggcagcttcctcctcacccacaggactggcctgcgcagccctgacatcccccaggactgggtctcttttttgagatcttttggccagctgaccctgtgtcccaggaatgggacagtcacagggaagtggcgagggtctcacgtcgtgggcttgctgaccaccttgaacttcggagacggtccagacaggaacaagacccggacattccaggccacagtcctgggaagtcagatgggattgaaaggatcttctgcaggacaactggtccttatcacagccagggtgaccacagaaaggactgcaggaacctgcctatattttagtgctgttccaggaatcctaccctccagccagccacccatatcctgctcagaggagggggctggaaatgccaccctgagccctagaatgggtgaggaatgtgttagtgtctggagccatgaaggccttgtgctgaccaagctgctcacctcggaggagctggctctgtgtggctccaggctgctggtcttgggctccttcctgcttctcttctgtggccttctctgctgtgtcactgctatgtgcttccacccgcgccgggagtcccactggtctagaacccggctctgagggcactggcctagttcccgacttgtttctcaggtgtgaatcaacttcttgggccttggctctgagttggaaaaggttttagaaaaagtgaagagctggaatgtgggggaaaataaaaagcttttttgcccagtgg

SEQ ID NO: 193947 - DNA, 1024 bp, Homo sapiens
  Payload ID: 18310
  Gene Name: transmembrane protein 219
  Uniprot ID: Q86XT9
  ENST ID: ENST00000414689
  CDS Start-End: 168-890
agggaacaagcttcaattgaatgaaactggcttgaccacagaggaatctgggggactttctgagcttcgcggacttgtgccgcctcctgactttaagctggctctggaggaggaggaagtggaggtatctcaggctctccccggaggctcagccccctctgctccccatgggcaactgccaggcagggcacaacctgcacctgtgtctggcccaccacccacctctggtctgtgccactttgatcctgctgctccttggcctctctggcctgggccttggcagcttcctcctcacccacaggactggcctgcgcagccctgacatcccccaggactgggtctcttttttgagatcttttggccagctgaccctgtgtcccaggaatgggacagtcacagggaagtggcgagggtctcacgtcgtgggcttgctgaccaccttgaacttcggagacggtccagacaggaacaagacccggacattccaggccacagtcctgggaagtcagatgggattgaaaggatcttctgcaggacaactggtccttatcacagccagggtgaccacagaaaggactgcaggaacctgcctatattttagtgctgttccaggaatcctaccctccagccagccacccatatcctgctcagaggagggggctggaaatgccaccctgagccctagaatgggtgaggaatgtgttagtgtctggagccatgaaggccttgtgctgaccaagctgctcacctcggaggagctggctctgtgtggctccaggctgctggtcttgggctccttcctgcttctcttctgtggccttctctgctgtgtcactgctatgtgcttccacccgcgccgggagtcccactggtctagaacccggctctgagggcactggcctagttcccgacttgtttctcaggtgtgaatcaacttcttgggccttggctctgagttggaaaaggttttagaaaaagtgaagagctggaatgtgggggaaaataaaaagcttttttgcccagt

SEQ ID NO: 193948 - DNA, 443 bp, Homo sapiens
  Payload ID: 18310
  Gene Name: transmembrane protein 219
  ENST ID: ENST00000569481
  CDS Start-End: 1-299
tgagatcttttggccagctgaccctgtgtcccaggaatgggacagtcacagggaagtggcgagggtctcacgtcgtgggcttgctgaccaccttgaacttcggagacggtccagacaggaacaagacccggacattccaggccacagtcctgggaagtcagatgggattgaaaggaggagctggctctgtgtggctccaggctgctggtcttgggctccttcctgcttctcttctgtggccttctctgctgtgtcactgctatgtgcttccacccgcgccgggagtcccactggtctagaacccggctctgagggcactggcctagttcccgacttgtttctcaggtgtgaatcaacttcttgggccttggctctgagttggaaaaggttttagaaaaagtgaagagctggaatgtgggggaaaataaaaagcttttttgccc

SEQ ID NO: 193949 - DNA, 1249 bp, Homo sapiens
  Payload ID: 18310
  Gene Name: transmembrane protein 219
  Uniprot ID: Q86XT9
  ENST ID: ENST00000561899
  CDS Start-End: 67-789
gggcgccggcctccgcccggccccgagggcaggctctccccggaggctcagccccctctgctccccatgggcaactgccaggcagggcacaacctgcacctgtgtctggcccaccacccacctctggtctgtgccactttgatcctgctgctccttggcctctctggcctgggccttggcagcttcctcctcacccacaggactggcctgcgcagccctgacatcccccaggactgggtctcttttttgagatcttttggccagctgaccctgtgtcccaggaatgggacagtcacagggaagtggcgagggtctcacgtcgtgggcttgctgaccaccttgaacttcggagacggtccagacaggaacaagacccggacattccaggccacagtcctgggaagtcagatgggattgaaaggatcttctgcaggacaactggtccttatcacagccagggtgaccacagaaaggactgcaggaacctgcctatattttagtgctgttccaggaatcctaccctccagccagccacccatatcctgctcagaggagggggctggaaatgccaccctgagccctagaatgggtgaggaatgtgttagtgtctggagccatgaaggccttgtgctgaccaagctgctcacctcggaggagctggctctgtgtggctccaggctgctggtcttgggctccttcctgcttctcttctgtggccttctctgctgtgtcactgctatgtgcttccacccgcgccgggagtcccactggtctagaacccggctctgagggcactggcctagttcccgacttgtttctcaggtgaggttctttgctccagtcctgcgggagcagggaatggggtgggggtgggggttgtaaccggggtagagcagatccttggacttttcctcaaagactgctgcttctgagtccccgagaacctcttcaaccacagctctcccttagggactgggaacaatttgacaccgtcagcattcaatatttttctaattactttaacttttttattataaaatagttaacacttatgtagaaaagtccaatagtataaaaggacagcttggcaaattattataaagtggatacttataaataccactgagtagaatattaccagctgtccagaaaccccccatggtcccttccttcctgacaatgccctctctctccctagaaattactgtcctgctttataatgtattgccatgtatgtattcctaaataa

SEQ ID NO: 193950 - DNA, 1292 bp, Homo sapiens
  Payload ID: 18310
  Gene Name: transmembrane protein 219
  Uniprot ID: Q86XT9
  ENST ID: ENST00000566848
  CDS Start-End: 468-1190
atggattcttaagctcacagagtcagtgaataacagaaagggattcagatctagccgtttagctgcacagtggagttcttctccagagtcttcccttgtctgggctctggctggaactattcctcagccaaatcctcgccccagaacagtgcttcctgtttctccagctgagaagtctccctttcagtttccttcttccagcacggagtacactgctctgcctccacttagattacttcagaaatgaaatgcagcaaatatttatccagcagtgcagggagttgaacttttggagtcgggaaccttggattcttgttctggctctgccacttactgtgtggccttgggaagtcctttgtcttctctgagctttcttttctctttgcgtaaaagcggtgctcttgtcccattctccctccctgtcttccagcaggctctccccggaggctcagccccctctgctccccatgggcaactgccaggcagggcacaacctgcacctgtgtctggcccaccacccacctctggtctgtgccactttgatcctgctgctccttggcctctctggcctgggccttggcagcttcctcctcacccacaggactggcctgcgcagccctgacatcccccaggactgggtctcttttttgagatcttttggccagctgaccctgtgtcccaggaatgggacagtcacagggaagtggcgagggtctcacgtcgtgggcttgctgaccaccttgaacttcggagacggtccagacaggaacaagacccggacattccaggccacagtcctgggaagtcagatgggattgaaaggatcttctgcaggacaactggtccttatcacagccagggtgaccacagaaaggactgcaggaacctgcctatattttagtgctgttccaggaatcctaccctccagccagccacccatatcctgctcagaggagggggctggaaatgccaccctgagccctagaatgggtgaggaatgtgttagtgtctggagccatgaaggccttgtgctgaccaagctgctcacctcggaggagctggctctgtgtggctccaggctgctggtcttgggctccttcctgcttctcttctgtggccttctctgctgtgtcactgctatgtgcttccacccgcgccgggagtcccactggtctagaacccggctctgagggcactggcctagttcccgacttgtttctcaggtgtgaatcaacttcttgggccttggctctgagttggaaaaggttttagaaaaagtgaagagctggaat

SEQ ID NO: 193951 - DNA, 721 bp, Homo sapiens
  Payload ID: 18310
  Gene Name: transmembrane protein 219
  ENST ID: ENST00000575829
  CDS Start-End: 81-721
gctcgtgacgtcgcggggggcgccggcctccgcccggccccgaggggctctccccggaggctcagccccctctgctccccatgggcaactgccaggcagggcacaacctgcacctgtgtctggcccaccacccacctctggtctgtgccactttgatcctgctgctccttggcctctctggcctgggccttggcagcttcctcctcacccacaggactggcctgcgcagccctgacatcccccaggactgggtctcttttttgagatcttttggccagctgaccctgtgtcccaggaatgggacagtcacagggaagtggcgagggtctcacgtcgtgggcttgctgaccaccttgaacttcggagacggtccagacaggaacaagacccggacattccaggccacagtcctgggaagtcagatgggattgaaaggatcttctgcaggacaactggtccttatcacagccagggtgaccacagaaaggactgcaggaacctgcctatattttagtgctgttccaggaatcctaccctccagccagccacccatatcctgctcagaggagggggctggaaatgccaccctgagccctagaatgggtgaggaatgtgttagtgtctggagccatgaaggccttgtgctgaccaagctgctcacctcggagctggctctgtgtggctccaggctgctggtcttgggctccttcctgcttctctt

SEQ ID NO: 193952 - DNA, 926 bp, Homo sapiens
  Payload ID: 18310
  Gene Name: transmembrane protein 219
  ENST ID: ENST00000570255
  CDS Start-End: 1-695
tgcacctgtgtctggcccaccacccacctctggtctgtgccactttgatcctgctgctccttggcctctctggcctgggccttggcagcttcctcctcacccacaggactggcctgcgcagccctgacatcccccaggactgggtctcttttttgagatcttttggccagctgaccctgtgtcccaggaatgggacagtcacagggaagtggcgagggtctcacgtcgtgggcttgctgaccaccttgaacttcggagacggtccagacaggaacaagacccggacattccaggccacagtcctgggaagtcagatgggattgaaaggatcttctgcaggacaactggtccttatcacagccagggtgaccacagaaaggactgcaggaacctgcctatattttagtgctgttccaggaatcctaccctccagccagccacccatatcctgctcagaggagggggctggaaatgccaccctgagccctagaatgggtgaggaatgtgttagtgtctggagccatgaaggccttgtgctgaccaagctgctcacctcggaggagctggctctgtgtggctccaggctgctggtcttgggctccttcctgcttctcttctgtggccttctctgctgtgtcactgctatgtgcttccacccgcgccgggagtcccactggtctagaacccggctctgagggcactggcctagttcccgacttgtttctcagacagaatcatacacattcttttgtggctgacttctttcaagcaacattgtgattttaagactcataactagttcacatccaagcatttgggtaacaatggtgtgaatcaacttcttgggccttggctctgagttggaaaaggttttagaaaaagtgaagagctggaatgtgggggaaaataaaaagcttttttgccca

SEQ ID NO: 193953 - DNA, 760 bp, Homo sapiens
  Payload ID: 18310
  Gene Name: transmembrane protein 219
  ENST ID: ENST00000569445
  CDS Start-End: 1-510
gactgggtctcttttttgagatcttttggccagctgaccctgtgtcccaggaatgggacagtcacagggaagtggcgagggtctcacgtcgtgggcttgctgaccaccttgaacttcggagacggtccagacaggaacaagacccggacattccaggccacagtcctgggaagtcagatgggattgaaaggatcttctgcaggacaactggtccttatcacagccagggtgaccacagaaaggactgcaggaacctgcctatattttagtgctgttccaggaatcctaccctccagccagccacccatatcctgctcagaggagggggctggaaatgccaccctgagccctagaatgggtgaggaatgtgttagtgtctggagccatgaaggccttgtgctgaccaagctgctcacctcggtaagagcctcagatgggtcgccagggttttgtagactgcctgctgactactgtatcttgaaggtccctggaaacaattctaccttgtagaaaaagcacaggttttataaccctgccttgggggctgtgtgacgtagaacaagtgtctaaacatctctgagtgtcagcatcctcatctgtaaaacagaaaacatgaccctatctcttaattccatcaaataaggattaaatgagaatgaccgtgaagtgcccagcacattgcctgggacatagagatttgataagtgacagctattgttgtttactattgtctttaaaacattctctctacttcaaagga

SEQ ID NO: 193954 - DNA, 588 bp, Homo sapiens
  Payload ID: 18310
  Gene Name: transmembrane protein 219
  ENST ID: ENST00000602948
  CDS Start-End: 141-588
gaggaggagggtcggggacggaagcgcagagcacggaccccgccccctcgcggccccgctcgtgacgtcgcggggggcgccggcctccgcccggccccgagggcaggctctccccggaggctcagccccctctgctccccatgggcaactgccaggcagggcacaacctgcacctgtgtctggcccaccacccacctctggtctgtgccactttgatcctgctgctccttggcctctctggcctgggccttggcagcttcctcctcacccacaggactggcctgcgcagccctgacatcccccaggactgggtctcttttttgagatcttttggccagctgaccctgtgtcccaggaatgggacagtcacagggaagtggcgagggtctcacgtcgtgggcttgctgaccaccttgaacttcggagacggtccagacaggaacaagacccggacattccaggccacagtcctgggaagtcagatgggattgaaaggatcttctgcaggacaactggtccttatcacagccagggtgaccacagaaaggactgcaggaacctgcctatattttagtgctgttccaggaa

SEQ ID NO: 193955 - DNA, 3106 bp, Homo sapiens
  Payload ID: 18311
  Gene Name: transmembrane protein 220
  Uniprot ID: Q6QAJ8
  ENST ID: ENST00000341871
  CDS Start-End: 466-948
ctttttctttctttctctttcttcctctctcccctcccgcctgccttccttccttttttccttcttttttttctttcttctttttttttttttttgtgaggaaggtagctttagtgaaaacagggtttggagttgaacctatacgggttcaaattcgacttccgtccaccaccgagacctgcgctccctgagggactcgctttcccatccgcgaaaccaggacggcgccgcctacaccccgcggcgttcggggcgggctgaatgggtcgctgagtgggggctacacccacgcccttcgctccccgcccccgggcggagcgacggccacggcagtgtccccaaggcaccgaaaccgaggcgggggtctcggtccctccgcgcaaggaggaaggcggaccgtacgtggcaggactcaccgccccgcacgtggcaggactcaccgccccgcgccgtgttctccgagccatggcgccagcgctgtggcgggcctgcaacggactcatggccgccttcttcgcgctggcggccttggtgcaggtaaatgacccagatgcagaggtgtgggtggtggtgtacacaatccctgcagtactgaccctgcttgttggacttaaccctgaagtcacaggtaatgttatttggaaaagtatctctgcaatacacatactcttttgtacggtgtgggctgttggcttggcgtcctacctcttgcatcgtacacaacagaacatcttacatgaggaagaaggcagggagctgtctggtctggtgattattacagcatggattatcctgtgccacagttcctcaaagaatccagttggtggaagaattcaattggctattgccattgtaatcacacttttcccatttatctcatgggtctacatatatattaacaaggaaatgcggtcctcttggccaactcactgcaagacagtaatttaaataaattcaagaacttcgtttttaaaatgaatattttcaatcaattttttataaacattaggggaacaagccaggagtttatttcaggtaatttgggctaatagttttaaaactccaaataactttttaagggtgcatataattcgatgtaagattggatgggacaagtaagagatggtctgatattttccagacgactttctgcagggtcttgtgtcataatgtagtggaaaaggctagagaatagaagtttaaaaatacgagttctaacttaactttgtaactatgtaatttgggcaaatatataaacctcctggtggatatttatctataaaataggattaatgccagatctacttacttacacagtaacaaggatcaatctagataatgtaagaacactctgaagatataaagtgtttggaaagattacggagggctgcccatgattaaaatagaggggagcagggattgggtaatatactgaaatagacattcaagagagggctataccccgatctttttttttttttaagacagtcccactctattgcccaggctggagtgcagtggcatgatcatggctcactgcagtcctgacctcccggggctcaggtgatcctcctacctcagcctcccaagaagctacgactacaagtgtgcaccaccatgcccggctaaatttttttaaattttttgtagaggcagggtttcaccgtgttgtccaggctggtcttgaattcctgagttcaagcgatctgtccaccttggcctcccaaagtgctgggattacaggtgtgagccaccatgcccagtccagccctaaactaatcttatccagagctggcatagtgcagtgaactaaaggagaactctagatgaatcaaatgagcaggcatgtcttggaaagaaagggaagctggatagaataaaggaattagggaccaaacaagaaggcaatagggactataactacattctaaatgagaaataaggtcaaaatctatatacattctttataaatggatgtccaaagtaatcctagggaggagagcttttttttttttcatttccattttcatttaaaaatggatacttgattattggaaaacttacaattgtgtttggaacaacttgggtatttgaatctaattttccaattgcaaattttatgatacctaaatacagataaagtatttccaatgaaaatttagtgtccaaatgagtggggctataaatgtaaaatacactggattttaaagacatggtagaaaaagaacagaaaatattttttgtattgattacatgttgaaacaatattttggctataatgggttaaatatactattaaagttgattttatctgtttctgtttacttttatttacgtggcttacattgcatttctgttggacagtcctgtatttaagtatctagatggcaacattttacatacacaagcatcaaactctgtggtcagatactgttttttctgatctaggaaagagatctgggaaatacttcactcaaaaagaacgagtagtgccttccacaggttaggagagtgtaaatgagtctggtagtttgtctatttttattgtctttattactatagtaaatattctataaatatttgttaaaggaggtatgtgtattttgtttttgttattggcacagtggccactgaatggtgagaaattatctaagattaagacttgaatgagtaaaaagggggaaaacaaatctagttgatattaaaacagtcaaagtgaaacttaagggtcagtaaaatacacataaaggatttgagttttccagtgtatattttgcttacatatttgtggcttttataactcctttagtattaataaactactgaagtcacatgcaaaaaaaaaacagactcatttgcaaattccctgtgggctctatccattgaccaagtcatgtttacttctgtgcttaaagacagtaatgttcaagatgtgctttcatcatgtatgcctctcccatatcagactacgaaattatgtgactattcatagtctctttcgcatcttcagttaagcatataaaaggcacttttggtggaatagtcttttgaagagtattaatgaaattgaatttaagtattattattaaatttaatatttctatta

SEQ ID NO: 193956 - DNA, 1402 bp, Homo sapiens
  Payload ID: 18311
  Gene Name: transmembrane protein 220
  Uniprot ID: Q6QAJ8
  ENST ID: ENST00000455996
  CDS Start-End: 173-625
cttcgctccccgcccccgggcggagcgacggccacggcagtgtccccaaggcaccgaaaccgaggcgggggtctcggtccctccgcgcaaggaggaaggcggaccgtacgtggcaggactcaccgccccgcacgtggcaggactcaccgccccgcgccgtgttctccgagccatggcgccagcgctgtggcgggcctgcaacggactcatggccgccttcttcgcgctggcggccttggtgcaggtggtgtacacaatccctgcagtactgaccctgcttgttggacttaaccctgaagtcacaggtaatgttatttggaaaagtatctctgcaatacacatactcttttgtacggtgtgggctgttggcttggcgtcctacctcttgcatcgtacacaacagaacatcttacatgaggaagaaggcagggagctgtctggtctggtgattattacagcatggattatcctgtgccacagttcctcaaagaatccagttggtggaagaattcaattggctattgccattgtaatcacacttttcccatttatctcatgggtctacatatatattaacaaggaaatgcggtcctcttggccaactcactgcaagacagtaatttaaataaattcaagaacttcgtttttaaaatgaatattttcaatcaattttttataaacattaggggaacaagccaggagtttatttcaggtaatttgggctaatagttttaaaactccaaataactttttaagggtgcatataattcgatgtaagattggatgggacaagtaagagatggtctgatattttccagacgactttctgcagggtcttgtgtcataatgtagtggaaaaggctagagaatagaagtttaaaaatacgagttctaacttaactttgtaactatgtaatttgggcaaatatataaacctcctggtggatatttatctataaaataggattaatgccagatctacttacttacacagtaacaaggatcaatctagataatgtaagaacactctgaagatataaagtgtttggaaagattacggagggctgcccatgattaaaatagaggggagcagggattgggtaatatactgaaatagacattcaagagagggctataccccgatctttttttttttttaagacagtcccactctattgcccaggctggagtgcagtggcatgatcatggctcactgcagtcctgacctcccggggctcaggtgatcctcctacctcagcctcccaagaagctacgactacaagtgtgcaccaccatgcccggctaaatttttttaaattttttgtagaggcagggtttcaccgtgttgtccaggctggtcttgaattcctgagttcaagcgatctgtccaccttggcctccc

SEQ ID NO: 193957 - DNA, 437 bp, Homo sapiens
  Payload ID: 18311
  Gene Name: transmembrane protein 220
  ENST ID: ENST00000580787
  CDS Start-End: 1-260
gtaatgttatttggaaaagtatctctgcaatacacatactcttttgtacggtgtgggctgttggcttggcgtcctacctcttgcatcgtacacaacagaacatcttacatgaggaagaaggcagggagctgtctggtctggtgattattacagcatggattatcctgtgccacagttcctcaaaaggcagagtcttgctttgttgcccagactggaaggcagtggcccgatcacagctcactgcagcttcaaactcctaggctccagtgacccactcacctcagcctcccaaagtgatgggattacaggcgtgagccaccacatctggccccaagaactgttttcaatgatagcattttatttaatattataaaattaatatgaagaagttgctactaaaagaagcactttagcaaataaaatttaatagatcaggt

SEQ ID NO: 193958 - DNA, 559 bp, Homo sapiens
  Payload ID: 18311
  Gene Name: transmembrane protein 220
  ENST ID: ENST00000578345
  CDS Start-End: 136-528
cagtgtccccaaggcaccgaaaccgaggcgggggtctcggtccctccgcgcaaggaggaaggcggaccgtacgtggcaggactcaccgccccgcacgtggcaggactcaccgccccgcgccgtgttctccgagccatggcgccagcgctgtggcgggcctgcaacggactcatggccgccttcttcgcgctggcggccttggtgcaggtggtgtacacaatccctgcagtactgaccctgcttgttggacttaaccctgaagtcacaggtaatgttatttggaaaagtatctctgcaatacacatactcttttgtacggtgtgggctgttggcttggcgtcctacctcttgcatcgtacacaacagaacatcttacatgaggaagaaggcaggaatccagttggtggaagaattcaattggctattgccattgtaatcacacttttcccatttatctcatgggtctacatatatattaacaaggaaatgcggtcctcttggccaactcactgcaagacagtaatttaaataaattcaagaacttcgtttttaaaatgaa

SEQ ID NO: 193959 - DNA, 376 bp, Homo sapiens
  Payload ID: 18311
  Gene Name: transmembrane protein 220
  ENST ID: ENST00000581949
  CDS Start-End: 1-353
aaagtatctctgcaatacacatactcttttgtacggtgtgggctgttggcttggcgtcctacctcttgcatcgtacacaacagaacatcttacatgaggaagaaggcaggttcaagctattcttctgcctcagcctcctgagtagctgggattacagggagctgtctggtctggtgattattacagcatggattatcctgtgccacagttcctcaaagaatccagttggtggaagaattcaattggctattgccattgtaatcacacttttcccatttatctcatgggtctacatatatattaacaaggaaatgcggtcctcttggccaactcactgcaagacagtaatttaaataaattcaagaacttcgttttt

SEQ ID NO: 193960 - DNA, 1930 bp, Homo sapiens
  Payload ID: 18312
  Gene Name: transmembrane protein 221
  Uniprot ID: A6NGB7
  ENST ID: ENST00000341130
  CDS Start-End: 106-981
cccctcggggaccccctgaggaccctcggattccccccaactcccctgccctctaaaaccacttcaattcctcaactcttcccccggcccgcaggaacccccgccatggcccgttcttacggcggccgggtgctggctgcaatgaccctgctgggcatcgcggcggccgtgctggcggcgctgggcgcgcagctgctgtttcagctgcaggcgggccgcgccgagctgcgggggctgcgcgccgaggggctgggccaggagctgggcgccggccccgggctgccagaggacgcggccgggacgctgctgccgctggccgccgcgctggccgcgctggtgctcgtgctggggttcacctgcttgctgctcgccgcgctctgtggccacctgggcgccgagctggcgcgggggcctggccccaggaggtctgactggtttctctacgactgccgcctcctcagacatgtggcccttggccttttctgctgtgggatctccgtctatttagcagcactgtccatctatgccttgctacttttcgagatcgagacaggcgcagcagctgcttccatcctcggctcgggcaccctggttctggtggctgtgctgacccacactctcctccgggctgcccgggctgcccgccgtgggctccatgagttgtccccgccatcctttgaagacgacctcgcccgccctgccgaagtctccaaggccagccccagagctcagcctcagcagggtatccatcgtcggaccccctattcaacctgtccagagcctggggacccctttgggtccatggccactgccacagcacctgcagccctggagggaggctgggagagcagcctgcctgcatccagaatgcaccggacactgtcggctggcctggggcactgggacggggttacgcacgagatgcgtcgaatgctgggccacagaccagggagcatggggaaggactccacactggtgtgagcccagggatgaggaatagagacctggtgtaagaaaaggataccatagagataggttcgggttcagctgcagtagcagtaggacttgatttttctctcattttattgcatccttggcttttgtcctcaaggttgcctcgtggcacaaaataattgccagagctccagccttcacctcctcattctgagggaaagtcagaggccagcgctggctaggtgtctcctggaagtcttcccaggaagcctcgaaacccttctttttatatcccactggccagaacagagcgaaatggccataccttgctgcaggggaggctgggaaatgtggctgtccagatggatgagattctgttacaggcataaggggagcggggggcttaggcagtgattctctaagtgtctccatccatttcacagatgaggaaacggaggccccaagagaggcagtgactcaccagggggcccacggccaggactgagcaccagagccaggattctcacctgaaccccataatctccatgctgctgatgtgcaagtctcagactctgcaaaatccactgcaccccctcgggctgtgaacatttcaaatccatgtgtgccaagcttggagcagcccagggccaggggcacggctggagagctggacccaggttcctggctgtggacccatggctgagggcttagctgctttgtgcctcagtttcctcatctgtaatatggggacacgaagtggccctgtctccaagggctctgacaagacacatgacttcatgtgaggcattccggggacccccacacaataggtcctcaatgtgtgttaatcgttctcatgctgctgctgcttttggggtgtaggcatgggtagtttctggggctcaaggaaataacagaggggtctccaaaggtctcctgtcttgcacaacccacaagtaaactctgatattcacta

SEQ ID NO: 193961 - DNA, 1599 bp, Homo sapiens
  Payload ID: 18313
  Gene Name: transmembrane protein 222
  Uniprot ID: Q9H0R3
  ENST ID: ENST00000374076
  CDS Start-End: 39-665
accagagccggggccagtcggagcggggcgcgcgccgcatggcggaagcggaagggagttctctgctcttgttgccgccgccgccacccccgcccaggatggcggaagtggaggcgccgacggcggccgagacggacatgaagcaatatcaaggctccggcggcgtcgccatggatgtggaacggagtcgcttcccctactgcgtggtgtggacgcccatcccggtgctcacgtggtttttccccatcatcggccacatgggcatctgcacatccacaggagtcattcgggacttcgcgggcccctactttgtctcagaggacaacatggcctttggaaagcctgccaagtactggaagttggaccctgctcaggtctatgctagcgggcccaacgcatgggacacggctgtgcacgacgcctctgaggagtacaagcaccgcatgcacaatctctgctgtgacaactgccactcgcacgtggcattggccctgaatctgatgcgctacaacaacagcaccaactggaatatggtgacgctctgcttcttctgcctgctctacgggaagtacgtcagcgttggggccttcgtgaagacctggctgcccttcatccttctcctgggcatcatcctcaccgtcagcctggtctttaacctccggtgatggctgctcggtggccccacacccaccagggtcccgaggaaacagccgccatcccttttggttccagatttttttctcctcaccccaaaaggcagggttgggcctgctgttgtggaccgggggtcggggctggcaggatggaaggactgaggaccagcatgaagtgggggtttgttgtctccctgcctctcagaagcaccctgtcccctcctccccaggcctgtgactccggccctggaagcccctttgttcttctgttgaaaggctttggcttcccgctgtagagctgctcccgccaccacctgctggggtcctgcctcagcccagtgcccagtatggggagaggaggacatttgggctcacctgtcaaggtggccctgggaccagagctggtcccagcatggggtgcaccgggtacacttaacgtgtctctataagccaagttgcttcaggaccttcaccactggcctctagaatggtccagaggggctggctgggtccctttgtcagactcctgccggcagctgccctgggggacatgtgtgcccatctggcatcctccagcccgtgcagtccgctcttcactgttccacggcctcccagtgcctcccagcattggacccatctccccctgcagtttgaggccagagaggtgagtggacctgacaagtgccagagtaaccgtgtagacagagcagtgtagacagcactcagccccagccccaggtgtggacctcatgctggtgatggctcccctgggtggcctgccagcacagccagtgccatcagggagctgaaggggctgtcccccacctaactccagctcccccttcacgttgtcaccaaggccctgtgccgcccgcctcgcccccctgctctgtggattcctttgggaagggctccctgggcaggacaataaagagttttgactcca

SEQ ID NO: 193962 - DNA, 986 bp, Homo sapiens
  Payload ID: 18313
  Gene Name: transmembrane protein 222
  ENST ID: ENST00000478104
  CDS Start-End: 13-477
gccgagacggacatgaagcaatatcaaggctccggcggcgtcgccatggatgtggaacggagtcgcttcccctactgcgtggtgtggacgcccatcccggtgctcacgtggtttttccccatcatcggccacatgggcatctgcacatccacaggagtcattcgggacttcgcgggcccctactttgtctcagaggacaacatggcctttggaaagcctgccaagtactggaagttggaccctgctcaggtctatgctagcgggcccaacgcatgggacacggctgtgcacgacgcctctgaggagtacaagcaccgcatgcacaatctctgctgtgacaactgccactcgcacgtggcattggccctgaatctgatgcgctacaacaacagcaccaactggaatatggtgacgctctgcttcttctgcctgctctacgggaagtacgtcaggtcccttcctaggcagagagattgagtgagtcgcccatggtcgccacagcatggacacagcagagcccagactcgtgagccagcatagcgttggggccttcgtgaagacctggctgcccttcatccttctcctgggcatcatcctcaccgtcagcctggtctttaacctccggtgatggctgctcggtggccccacacccaccagggtcccgaggaaacagccgccatcccttttggttccagatttttttctcctcaccccaaaaggcagggttgggcctgctgttgtggaccgggggtcggggctggcaggatggaaggactgaggaccagcatgaagtgggggtttgttgtctccctgcctctcagaagcaccctgtcccctcctccccaggcctgtgactccggccctggaagcccctttgttcttctgttgaaaggctttggcttcccgctgtagagctgctcccgccaccacctgctggggtcctgcctcagcccagtgcccagtatggggagaggaggacatttggg

SEQ ID NO: 193963 - DNA, 994 bp, Homo sapiens
  Payload ID: 18313
  Gene Name: transmembrane protein 222
  ENST ID: ENST00000486082
  CDS Start-End: 44-262
caggatggcggaagtggaggcgccgacggcggccgagacggacatgaagcaatatcaaggctccggcggcgtcgccatggatgtggaacggagtcgcttcccctactgcgtggtgtggacgcccatcccggtgctcacgtggtttttccccatcatcggccacatgggcatctgcacatccacaggagtcattcgggacttcgcgggcccctactttgtctcagacaggccgggagggcagtgtggccagaaggattcttaagtaactgacccagccctttgcccccacccctggggtaccgagacatgggtagggattagaggcaagagtggagagtcagaccatccaggaaccacatctctggaccttcagaaggaggacaacatggcctttggaaagcctgccaagtactggaagttggaccctgctcaggtctatgctagcgggcccaacgcatgggacacggctgtgcacgacgcctctgaggagtacaagcaccgcatgcacaatctctgctgtgacaactgccactcgcacgtggcattggccctgaatctgatgcgctacaacaacagcaccaactggaatatggtgacgctctgcttcttctgcctgctctacgggaagtacgtcaggtcccttcctaggcagagagattgagtgagtcgcccatggtcgccacagcatggacacagcagagcccagactcgtgagccagcatagcgttggggccttcgtgaagacctggctgcccttcatccttctcctgggcatcatcctcaccgtcagcctggtctttaacctccggtgatggctgctcggtggccccacacccaccagggtcccgaggaaacagccgccatcccttttggttccagatttttttctcctcaccccaaaaggcagggttgggcctgctgttgtggaccgggggtcggggctggcaggatggaaggactgaggaccagcatgaagtgggggtttgttgtctcc

SEQ ID NO: 193964 - DNA, 1071 bp, Homo sapiens
  Payload ID: 18313
  Gene Name: transmembrane protein 222
  ENST ID: ENST00000464813
  CDS Start-End: 17-460
ggcggccgagacggacatgaagcaatatcaaggctccggcggcgtcgccatggatgtggaacggagtcgcttcccctactgcgtggtgtggacgcccatcccggtgctcacgtggtttttccccatcatcggccacatgggcatctgcacatccacaggagtcattcgggacttcgcgggcccctactttgtctcagaggacaacatggcctttggaaagcctgccaagtactggaagttggaccctgctcaggtctatgctagcgggcccaacgcatgggacacggctgtgcacgacgcctctgaggagtacaagcaccgcatgcacaatctctgctgtgacaactgccactcgcacgtggcattggccctgaatctgatgcgctacaacaacagcaccaactggaatatggtgacgctctgcttcttctgcctgctctacgggaagtacgtcaggtgagctgccctcctgcctgcccacccacacactgcccagaggctgctctcccaaggatcctagaaagaccattcctagcgtccttcagtcagccaggacagttggaacagatgccagttggagccgtggtggttctagagtgacgagctgagggcctgatggagagggaggtggctgtgctgaagtccagctccacctgggccccaaatgcagctctggctcttgcctgctgtgagaccatgggcaactgccttggtctctcttagccacagctgtctctggtgaaatgcaggcaatgattccggctcctcagggaggcttctacggatccctgtgctccggtaaagtgagcagatagatcctctcataatgactgccccacaggtcccttcctaggcagagagattgagtgagtcgcccatggtcgccacagcatggacacagcagagcccagactcgtgagccagcataggttagtgctgatctggccgcctctccaagctttcctcttagccacgttcatcattaagaggttctgaaaagaagacttttagggatatttttaagtactgcatggcttttagaagtcccctgagaataactggtcacacaga

SEQ ID NO: 193965 - DNA, 679 bp, Homo sapiens
  Payload ID: 18313
  Gene Name: transmembrane protein 222
  ENST ID: ENST00000498220
  CDS Start-End: 1-600
aagcaatatcaaggctccggcggcgtcgccatggatgtggaacggagtcgcttcccctactgcgtggtgtggacgcccatcccggtgctcacgtggtttttccccatcatcggccacatgggcatctgcacatccacaggagtcattcgggacttcgcgggcccctactttgtctcagaggacaacatggcctttggaaagcctgccaagtgtcacctccaggaagccttctcacaccccatcttagtccgttctggctgccataacaaaatctcatcaattgggtactggaagttggaccctgctcaggtctatgctagcgggcccaacgcatgggacacggctgtgcacgacgcctctgaggagtacaagcaccgcatgcacaatctctgctgtgacaactgccactcgcacgtggcattggccctgaatctgatgcgctacaacaacagcaccaactggaatatggtgacgctctgcttcttctgcctgctctacgggaagtacgtcagcgttggggccttcgtgaagacctggctgcccttcatccttctcctgggcatcatcctcaccgtcagcctggtctttaacctccggtgatggctgctcggtggccccacacccaccagggtcccgaggaaacagccgccatcccttttggttccagatttttttctcc

SEQ ID NO: 193966 - DNA, 1665 bp, Homo sapiens
  Payload ID: 18313
  Gene Name: transmembrane protein 222
  ENST ID: ENST00000464720
  CDS Start-End: 51-269
ccccgcccaggatggcggaagtggaggcgccgacggcggccgagacggacatgaagcaatatcaaggctccggcggcgtcgccatggatgtggaacggagtcgcttcccctactgcgtggtgtggacgcccatcccggtgctcacgtggtttttccccatcatcggccacatgggcatctgcacatccacaggagtcattcgggacttcgcgggcccctactttgtctcagacaggccgggagggcagtgtggccagaaggattcttaagtaactgacccagccctttgcccccacccctggggtaccgagacatgggtagggattagaggcaagagtggagagtcagaccatccaggaaccacatctctggaccttcagaaggaggacaacatggcctttggaaagcctgccaagtactggaagttggaccctgctcaggtctatgctagcgggcccaacgcatgggacacggctgtgcacgacgcctctgaggagtacaagcaccgcatgcacaatctctgctgtgacaactgccactcgcacgtggcattggccctgaatctgatgcgctacaacaacagcaccaactggaatatggtgacgctctgcttcttctgcctgctctacgggaagtacgtcagcgttggggccttcgtgaagacctggctgcccttcatccttctcctgggcatcatcctcaccgtcagcctggtctttaacctccggtgatggctgctcggtggccccacacccaccagggtcccgaggaaacagccgccatcccttttggttccagatttttttctcctcaccccaaaaggcagggttgggcctgctgttgtggaccgggggtcggggctggcaggatggaaggactgaggaccagcatgaagtgggggtttgttgtctccctgcctctcagaagcaccctgtcccctcctccccaggcctgtgactccggccctggaagcccctttgttcttctgttgaaaggctttggcttcccgctgtagagctgctcccgccaccacctgctggggtcctgcctcagcccagtgcccagtatggggagaggaggacatttgggctcacctgtcaaggtggccctgggaccagagctggtcccagcatggggtgcaccgggtacacttaacgtgtctctataagccaagttgcttcaggaccttcaccactggcctctagaatggtccagaggggctggctgggtccctttgtcagactcctgccggcagctgccctgggggacatgtgtgcccatctggcatcctccagcccgtgcagtccgctcttcactgttccacggcctcccagtgcctcccagcattggacccatctccccctgcagtttgaggccagagaggtgagtggacctgacaagtgccagagtaaccgtgtagacagagcagtgtagacagcactcagccccagccccaggtgtggacctcatgctggtgatggctcccctgggtggcctgccagcacagccagtgccatcagggagctgaaggggctgtcccccacctaactccagctcccccttcacgttgtcaccaaggccctgtgccgcccgcctcgcccccctgctctgtggattcctttgggaagggctccctgggcaggacaataaagagttttgactcca

SEQ ID NO: 193967 - DNA, 368 bp, Homo sapiens
  Payload ID: 18313
  Gene Name: transmembrane protein 222
  ENST ID: ENST00000466759
  CDS Start-End: 44-286
caggatggcggaagtggaggcgccgacggcggccgagacggacatgaagcaatatcaaggctccggcggcgtcgccatggatgtggaacggagtcgcttcccctactgcgtggtgtggacgcccatcccggtgctcacgtggtttttccccatcatcggccacatgggcatctgcacatccacaggagtcattcgggacttcgcgggcccctactttgtctcagaggacaacatggcctttggaaagcctgccaaactcactctcctgccctttgggaacaaatgaggcatggaaggtagaagagaggcattgtttggagctctgctggaaagttctggttggagagaataaaaaccgttcaaccttc

SEQ ID NO: 193968 - DNA, 1511 bp, Homo sapiens
  Payload ID: 18313
  Gene Name: transmembrane protein 222
  ENST ID: ENST00000608611
  CDS Start-End: 50-577
cccgcccaggatggcggaagtggaggcgccgacggcggccgagacggacatgaagcaatatcaaggctccggcggcgtcgccatggatgtggaacggagtcgcttcccctactgcgtggtgtggacgcccatcccggtgctcacgtggtttttccccatcatcggccacatgggcatctgcacatccacaggagtcattcgggacttcgcgggcccctactttgtctcagaggacaacatggcctttggaaagcctgccaagtactggaagttggaccctgctcaggtctatgctagcgggcccaacgcatgggacacggctgtgcacgacgcctctgaggagtacaagcaccgcatgcacaatctctgctgtgacaactgccactcgcacgtggcattggccctgaatctgatgcgctacaacaacagcaccaactggaatatggtgacgctctgcttcttctgcctgctctacgggaagtacgtcagcgttggggccttcgtgaagacctggctgcccttcatccttctcctgggcatcatcctcaccgtcagcctggtctttaacctccggtgatggctgctcggtggccccacacccaccagggtcccgaggaaacagccgccatcccttttggttccagatttttttctcctcaccccaaaaggcagggttgggcctgctgttgtggaccgggggtcggggctggcaggatggaaggactgaggaccagcatgaagtgggggtttgttgtctccctgcctctcagaagcaccctgtcccctcctccccaggcctgtgactccggccctggaagcccctttgttcttctgttgaaaggctttggcttcccgctgtagagctgctcccgccaccacctgctggggtcctgcctcagcccagtgcccagtatggggagaggaggacatttgggctcacctgtcaaggtggccctgggaccagagctggtcccagcatggggtgcaccgggtacacttaacgtgtctctataagccaagttgcttcaggaccttcaccactggcctctagaatggtccagaggggctggctgggtccctttgtcagactcctgccggcagctgccctgggggacatgtgtgcccatctggcatcctccagcccgtgcagtccgctcttcactgttccacggcctcccagtgcctcccagcattggacccatctccccctgcagtttgaggccagagaggtgagtggacctgacaagtgccagagtaaccgtgtagacagagcagtgtagacagcactcagccccagccccaggtgtggacctcatgctggtgatggctcccctgggtggcctgccagcacagccagtgccatcagggagctgaaggggctgtcccccacctaactccagctcccccttcacgttgtcaccaaggccctgtgccgcccgcctcgcccccctgctctgtggattcctttgggaagggctccctgggcaggacaataaagagttttgactcca

SEQ ID NO: 193969 - DNA, 1613 bp, Homo sapiens
  Payload ID: 18313
  Gene Name: transmembrane protein 222
  Uniprot ID: Q9H0R3
  ENST ID: ENST00000611517
  CDS Start-End: 54-680
atggggacgagcggcaccagagccggggccagtcggagcggggcgcgcgccgcatggcggaagcggaagggagttctctgctcttgttgccgccgccgccacccccgcccaggatggcggaagtggaggcgccgacggcggccgagacggacatgaagcaatatcaaggctccggcggcgtcgccatggatgtggaacggagtcgcttcccctactgcgtggtgtggacgcccatcccggtgctcacgtggtttttccccatcatcggccacatgggcatctgcacatccacaggagtcattcgggacttcgcgggcccctactttgtctcagaggacaacatggcctttggaaagcctgccaagtactggaagttggaccctgctcaggtctatgctagcgggcccaacgcatgggacacggctgtgcacgacgcctctgaggagtacaagcaccgcatgcacaatctctgctgtgacaactgccactcgcacgtggcattggccctgaatctgatgcgctacaacaacagcaccaactggaatatggtgacgctctgcttcttctgcctgctctacgggaagtacgtcagcgttggggccttcgtgaagacctggctgcccttcatccttctcctgggcatcatcctcaccgtcagcctggtctttaacctccggtgatggctgctcggtggccccacacccaccagggtcccgaggaaacagccgccatcccttttggttccagatttttttctcctcaccccaaaaggcagggttgggcctgctgttgtggaccgggggtcggggctggcaggatggaaggactgaggaccagcatgaagtgggggtttgttgtctccctgcctctcagaagcaccctgtcccctcctccccaggcctgtgactccggccctggaagcccctttgttcttctgttgaaaggctttggcttcccgctgtagagctgctcccgccaccacctgctggggtcctgcctcagcccagtgcccagtatggggagaggaggacatttgggctcacctgtcaaggtggccctgggaccagagctggtcccagcatggggtgcaccgggtacacttaacgtgtctctataagccaagttgcttcaggaccttcaccactggcctctagaatggtccagaggggctggctgggtccctttgtcagactcctgccggcagctgccctgggggacatgtgtgcccatctggcatcctccagcccgtgcagtccgctcttcactgttccacggcctcccagtgcctcccagcattggacccatctccccctgcagtttgaggccagagaggtgagtggacctgacaagtgccagagtaaccgtgtagacagagcagtgtagacagcactcagccccagccccaggtgtggacctcatgctggtgatggctcccctgggtggcctgccagcacagccagtgccatcagggagctgaaggggctgtcccccacctaactccagctcccccttcacgttgtcaccaaggccctgtgccgcccgcctcgcccccctgctctgtggattcctttgggaagggctccctgggcaggacaataaagagttttgactcc

SEQ ID NO: 193970 - DNA, 1288 bp, Homo sapiens
  Payload ID: 18314
  Gene Name: transmembrane protein 223
  Uniprot ID: A0PJW6
  ENST ID: ENST00000307366
  CDS Start-End: 28-636
aagccccaccccggaagtcggctggccatggcggcgccttggaggcgatggcccacggggctgctagccgtgctgcggcccctgctcacctgccggcccctgcaaggcacgacgctgcaacgggatgtgctgctctttgagcatgatcggggccgcttcttcaccatcctcgggctgttctgcgcgggccagggcgtcttctgggcttccatggctgtggcagccgtgtcccggcccccggttccggtgcagcctctggatgcggaggtcccaaatcgtggccccttcgacctgcgctccgcgctctggcgctacggtctggccgtcggctgcggcgccatcggagccctcgtactcggtgctggtcttctcttctctctccggtctgtgcgctcagtggtgcttcgagctggagggcagcaggtgaccctcaccactcatgccccctttggcttgggggcccatttcacagttcctttgaagcaggtatcttgcatggcccaccggggtgaagtccctgccatgctacctctgaaagtcaaaggccgacgcttctatttcctcttggacaaaactggacacttccctaacacaaaactctttgacaatactgtgggtgcctaccggagcttgtgaagaaatgacctcaagtcactcacctctccaagaggaggataaaaactgaaccttggggagccaggtgtgttggttcacacctgttgtaatcccagcactttgggagggtgaggcaggagcactgctcgagcccaggctgggcaacatagcgagaccttgtctctatttacaaaaaaaaaaacaaaaaaaaacgccaatcttagaatggagtaacaaccagggtcacacaaggaggtcaagattcattaacaacaaataaaggagcagtcatccctagggcagctgcctaacagtacctctaagtttcagtccatgtctgcttagccttcactccttcctcctatctagttgtactttaacatcaaaaactcactactaagatgaagacagtaatataatattttggtacaaaaacagctgcaggaagaggtggaggggggcctgtcattatgtttcccccccaccccccaacgaaaggaaaactaagactcccaacataaacagggccttgaggggggggattacaggcacttgggcatggagtcttcggctgcaggaagcactccgcttattcttcaggaatgggaaaggcgtgacccaacgagagcatctgtctcagagctccactcagggtcacccctctccagaggcc

SEQ ID NO: 193971 - DNA, 857 bp, Homo sapiens
  Payload ID: 18314
  Gene Name: transmembrane protein 223
  ENST ID: ENST00000528367
  CDS Start-End: 1-412
ggcggcgccttggaggcgatggcccacggggctgctagccgtgctgcggcccctgctcacctgccggcccctgcaaggcacgacgctgcaacgggatgtgctgctctttgagcatgatcggggccgcttcttcaccatcctcgggctgttctgcgcgggccagggcgtcttctgggcttccatggctgtggcagccgtgtcccggcccccggttccggtgcagcctctggatgcggaggtcccaaatcgtggccccttcgacctgcgctccgcgctctggcgctacggtctggccgtcggctgcggcgccatcgggtatagcacaataagaaaccgacaaaaacagcagctgatgactcactccaacaacgcacagcaccagaaggcaaggaaatcaaacctcagaggctaaatgttccatgacttctccaagatcatgaagtaagcactgagtaagtagggagggggagcaaggactcaaccccttgctcctaatctttactctataccgcattcaggagccgccagctgtatggggaacaaggcctggatcccaccccaaagacatggattggagacccaccccttggtgaccctagacccgccaatagatcgttgtgaagctgcagtttccctatctgtaaaatgggagcatttagtccaccagcgcgaaaggcacggagggagtttccctattatatgaccgtacacgaaatctagactgtgaccaaagtctcccgctcctcagcctcctctcctccgcatcctcagccactagtcacgctggagaggaggcgtgggaactgacctccgcgggccgggcctcggcaacgcgcatcctcccacccggcctagcc

SEQ ID NO: 193972 - DNA, 736 bp, Homo sapiens
  Payload ID: 18314
  Gene Name: transmembrane protein 223
  ENST ID: ENST00000525631
  CDS Start-End: 4-324
gccatggcggcgccttggaggcgatggcccacggggctgctagccgtgctgcggcccctgctcacctgccggcccctgcaaggcacgacgctgcaacgggatgtgctgctctttgagcatgatcggggccgcttcttcaccatcctcgggctgttctgcgcgggccagggcgtcttctgggcttccatggctgtggcagccgtgtcccggcccccggttccggtgcagcctctggatgcggaggtcccaaatcgtggccccttcgacctgcgctccgcgctctggcgctacggtctggccgtcggctgcggcgccatcgcttgatcatctccactacactatgctttatttctcgacaaagctcagcacaaatggcttctgatttaacggatggacgcaggttctgcactgacttctgtttcggaaccacagtaaggctgtgcagcaggagccacgaaacccgactccacctagtgctttaagacgctactgacccgtccctttggcgaggggacaacttcgaagtatgacctggccaggaggagccacaaagcgcgattagcctcgctgcatttcaggtacaggccggcgccagccgtgcctcaccaggtccaccggctccgagcagcagcaagcccggtcggaaagcgaaagtggcctcgccatgtccagaccggccagctcccccgcctacctgaccccgccccgcagccgcacctgggtccgagtcatcgcc

SEQ ID NO: 193973 - DNA, 1107 bp, Homo sapiens
  Payload ID: 18315
  Gene Name: transmembrane protein 225
  Uniprot ID: Q6GV28
  ENST ID: ENST00000375026
  CDS Start-End: 218-895
gcagtcctgacagcaggctggccctgatagataacggaagtgaggaagggtgagagttatctatcttctctgttttatagactacttcagcttctgctgttaccaatgcctcagcaaccactgaaagttcagatatcacccttcttgtaactaatcaaatcaaggaagagatctacaaaatagtggtggtggttccagctagaaattttcactcacaatggtgcatgtttcaaatagaagtatccagggtatgaacatacttttctcctcctgggccgtagtcttaatggtgatgggaatcaccttagataaatgggttgaattgatttcagaagatgaaagagccaagatgaaccacagtccttggatgatgtgttgccctgctctttggccagaagatgacctgaaagtggtcaggattatgatgacgtcgagccttggcctttccttcctccttaacttaatcctgggtatgaaattcacctatctgattcctcaaaataaatatatacaactcttcactaccatcctcagtttcttctcaggtatctctctgctctgggcactcatactatatcacaataagctgaagcaaggtcaatccatgcacttctctagttataggatcacctggatcatgtatactgcttacttaaatgttttcttcttgtctgtctgtggagtcctctctctcctagagtgcaagttgtctaccagtagctgtacctgcctgaacatccataaatctgacaacgaatgtaaggaatctgagaattctatcgaagatatttcattaccagaatgcactgcaatgcctcgtagcattgtccgtgcacacactgtgaattccctaaacaaaaaagtccaaacacgtcacgtaacctgggctctgtgatttggcaatctatttcttgcagtatatgctcatctttatggaaaaagctttgtgggtgtgtgctgtgtctccaaccatgttgtctctatttggaattatggttggggtttgtaaaaagatctggaagatggttttttaaaaaatcctggcctgctgaacgaatagtttcttctgcaacatttgttgttaatataataaatattatcatataa

SEQ ID NO: 193974 - DNA, 659 bp, Homo sapiens
  Payload ID: 18315
  Gene Name: transmembrane protein 225
  ENST ID: ENST00000528595
  CDS Start-End: 209-659
acagcaggctggccctgatagataacggaagtgaggaagggtgagagttatctatcttctctgttttatagactacttcagcttctgctgttaccaatgcctcagcaaccactgaaagttcagatatcacccttcttgtaactaatcaaatcaaggaagagatctacaaaatagtggtggtggttccagctagaaattttcactcacaatggtgcatgtttcaaatagaagtatccaggatgacctgaaagtggtcaggattatgatgacgtcgagccttggcctttccttcctccttaacttaatcctgggtatgaaattcacctatctgattcctcaaaataaatatatacaactcttcactaccatcctcagtttcttctcaggtatctctctgctctgggcactcatactatatcacaataagctgaagcaaggtcaatccatgcacttctctagttataggatcacctggatcatgtatactgcttacttaaatgttttcttcttgtctgtctgtggagtcctctctctcctagagtgcaagttgtctaccagtagctgtacctgcctgaacatccataaatctgacaacgaatgtaaggaatctgagaattctatcgaagatatttcattaccagaatgcactgcaatgcctc

SEQ ID NO: 193975 - DNA, 2108 bp, Homo sapiens
  Payload ID: 18316
  Gene Name: transmembrane protein 229A
  Uniprot ID: B2RXF0
  ENST ID: ENST00000455783
  CDS Start-End: 21-1163
ttcggacagcctccgagcccatggcggggagcgacgtggacagcgagggccccgcacggaggggcggcgcggcgcggcgtccgggggcccctggcgggccaggaagcgaggcggcagccggctgcccggagccgctgtccactgctgaagcgccggctgagagcgccacgctgcccgcctggatgcgcctctacttctacgggatgcacgggatcaccctggacgtgctggtgtcctcggcccggcgcttcgcccgcagcccggacctgcggatgctaggcttctcctcgccctaccgctgcctgctgcactcgctcacccatttcgccctggagaaggtgtacctgcagcagcggcgctgtcccaacgccttcgtcttcaatttcctcctctacccctcggcccacgtggggctgcagaccctagcgggccaggcgctactactcagcctgggcggcggggcgggggtcgcggtggcgccaggggcgctggacctggcgctgcagtacgtgctggcgctctaccactgccaagtgttcctgaagcgcttcctgcgcttgcggtacgggcgacagaggcggcggcagcagcaacagcagcagcagcagcagcagcagcagcggaggggcgcgctccccgtccctcccggcgcccgggtccctactgcggccggagcccggcggcgacgaccccgtggccccaggggcgccgggggagcccccagccaggggctgcccgacctaccccgctttcttttcttcggaatgcacggctttctggatgagatcttcttcaccttcttcttcaacgtactggggcagggggacgggacaaccagcggccacacgtcgctctggtccttctttatgtacggcagctgcagtttcgtggtggaaaagctctacttccacctccactacagccgcggttggggcacttggaagcgggtgcccatctacgtgatcttcatctacgtgtgggagctgtcctggggtctgggactccgcacgtgcggggcttgttcctgggactattctcactacccgctcaattttatgggcctcatcaccctgatgtatttacctggctggatattccttagtgtgtaccaggacctaatttccaacgtgttgtggagggtgcagtacgtaccagctaactaaaaccaaaaaagaaagaaagaaaaggaaaaagtcactggattcccacgaatggatgcgatttatttttacacatttaaaatgaagtgggttttttagtcctttaatttttatacgctttactaaactcttccaaattgttttattccaccttttagtttttctatttgaaacccgtgtataatatactttgaaacactactcgaaacataattcaaagtactttatttgccaatgttttaaaacatttacaagcccaaacgtttacacgcccaaacagcaaaaccgttataccttaacatcagaatgatgtagtagtgtttacccatctggcaacagatgagtgacagctactaatttttttttttttggcggggggggatctttaaatcagagaccagtgatttttacaagatttggctaaattttctgattcagtgatttgttttactttctttttaatctaatttcattttaattccttgccatatttaccaatgactgaagaaactcaatgtcttgtactcttgagactacagttaatagctcttaaagtgcctccgtctagcacacaagtgaaaagaggctgaaaaatgtgaaagcacgttctatgaacagatttttaaatgagaggtcttttctagcaactcacacaggtgacactgtgttaagatatttgatctccatcctggaaatgattgctttccaatgtgggtaagccttaaacagcaggtgtgttaacgttgatcagatcctgtgttatctatggctgtaaatttttgttactgtgcaataatgtaaaatgtttaccttacatagccgagggccaagtgaaattatatcaccttccacagtgttctaactccaaggacccttttctacatggaacttcaagggcagaaacattacctttgaataaaatgaacctgaatgttcactctaattaca

SEQ ID NO: 193976 - DNA, 4068 bp, Homo sapiens
  Payload ID: 18317
  Gene Name: transmembrane protein 229B
  Uniprot ID: Q8NBD8
  ENST ID: ENST00000357461
  CDS Start-End: 411-914
gccaggcggcgtgggggaggcacggcccgcaactcggcgcggggggagccagagcgccgggcttgggggcggggagcaggcggtgcaggagagcgccccgagtcccggcgcgggaggaggagcgggagccagccctggagacggcgctcctagccgcacctgcgcctggcaggcggccggctctgcccagcccctacccacggccccggccccgcaccgggacacatggaagctgccagccccccagccaaggatcagctgagccctagggctgatgcttgcctacgttgctgagaatggcactgaggcccagccaacaaaggttaacccaggacactcctggacagtgatcctgatgtctgttgtgagctgcacactcaagggtgtgataaccagccccagtcggcgccatggcgtctgccgagcccctgacggcgctgtcccgctggtacctgtatgccatccacggctacttctgcgaggtgatgttcacagcggcctgggagttcgtggtgaacttgaactggaagttccctggggtcacgagcgtgtgggccctcttcatctacggcacctccatcctcatcgtggagcgcatgtacctgcggctgcgcggccgctgcccgctgctcctgcgctgcctcatctacacgctctggacctacctgtgggagttcaccaccggcttcatcctgcgccagttcaacgcctgcccctgggactactcccagttcgactttgacttcatgggcctcatcaccctggagtacgccgtgccctggttctgcggggccctcatcatggagcagttcatcatccgcaacaccctccgcctccgcttcgacaaggacgctgagcccggggagcccagcggcgccctagccctggccaacggccatgtcaagactgactgagcaggaagcgggtggggggcctggggatctctcatggaactcatggacaaagagaccaagctggtgaggttgccccatccatgcagcaaaagccctgctccggccaagcctcagccctatagggcacacagagccccctaacgtccgcgggggccggtgttggggggccgtggtcaggtgttgggggatggggtgtggaggcagcagagggacattgggaagggtccatggatcgcggcccagttcaggggttggtaccaggaggcctgtggctgagcagcgatggactatgtagttgactttggaagcagcaggccctgtcctggccaagggacaatgagaatggggccgcaggtgggaggcaaggcctgacctccctccctccgatctggatttagttgagctttggctggttccattaggcaatattcaggtgcttgcttgcaaccaatacctccccaggggcctgctgagctgcagccgaggagagactgggcagccaggaggctgcgtggcagcaacgctggtctgcaagggctgggagaccctcccttggctcctctcccctcccccagggccctgcgctgctcccttggccttctggggcccccgtggtgctggattcccaccaaccttgggcttttggaggtttcaatccccgtgtgttcggtggcgtttcccccttttctgtcttgttttcaaagcctttaccactagcggctctttatccacgtcggtcgccacacctgccccaccccagctccctagccagcacaggagctgccggagatgaagccctgagacacccccaaccctcacccccttgcagcccttccctccactgttccggctggcctgatgcctggggagttcctgagttacacctccctacccccggtctagtgggctgtggcagtgctcccttctcagtggctcagctgagaacaaatgatgccctccaatgcacaggcaggctgggttaggccctgtggatccacagtggggacctagaggcaagtcagtttggtggggaaaagccagagttctaggtcatctattccctgcctggtttattttcaagccaaaactgagcagtctagctttctatgggatggagaagccaggtatccagcattggagactgatggagaatgagaggaagaaagagaggaggaccttgcagctgtggaaggctccttggagcctcctttgtgggagggtatcagttctggttctgccagagcctcagccctggtagcagaacctcagggctgcccctctccccaaactcctcccagcaaggctgaccctttgagctcactccttaaacagtattaaccctgccacactcatgggcattggcaccttggttcccctgccccactttgtcctgtgacaggtccattgctggcagtggacaggtgaaatactcactccagcctacttccggctctgactctcactcctcaaggggaagggtccgttagaaagtggcccaccccatggtacatggtctcttcttgaccacactaggactcttaggtagaaattagccttcccctttttatggatcattacaaagtgacggtatcacctgtggagagaatgtcctcttccctgctggctgccctgcccatactgtgcagggtgtggtggggtgcagggtgtggtggggtgggccacagttgtgtcctaggtctggagaaaagcttgcagactctgcctttggcaggattttctgcagttagccccgtccagagcagaacgaagggtatttcctagcctatttcctgggcaggctcctcaaatccagggatgaactactttctgcagtggccagccctccttttgattttattgtggccccaattccagggctttgggggttacagagaatcaggcttccggtgggagtagattgttttccatctataggtggagaaaattccaggaggagaatattgtctggcttccccgttctctctgggcaattgtttccttggttctctctccaactccatgttgtcttagtctcccagcaccccttcaggccttccatgtgggcccctagaccacactacccaccttcacacttgcattccacaactcagtccagtggccagcttgttgatgcctccataattctcagccagagcaaatccttgattggcccaccaggtcttgctgctccagaagttgccttgtgggcattccctggcaccatttcctctctgggtcctatactttcccaagtgcaggaggtcctgggggtatgcctgtgtgcctggcaacatccagcattgtgtttctgctccatctaggtgtcccatttctccagttgcccctcataaggcatcaaacctccagcaaaggaaggcaacaacccatggcctgaccacgggatctacaggttcagatctcaccagggatagcccagacttcaattcttgcttttttgggtatcagggccccaatcccttagtggccagggactcaaagtttggaataatcccagccctgccaagcattaagggtgctggtggggagtgtttgctggctgttcatgaacctctggtgtcctgggcctctctccactagacatggcagcatctctgagttacagattgcaatgtgttgccctgcatggttgaactgcttcggacatctgctaggcatcccatgtgccctgtcccctcttcaatgccagtgagtcacaatggcctatgcttattcacagcaataatacctagggagtccccatgaagcccttttgtcctggtccctcactctgcgtgggtctcctggggaggcagctgctgagtgggtcagttcatgagaacctgcatttatgaagccctgggctgtgtaggcatcaccctgggatgcagacaggttagaggcccagcccttaggggagccatggcagggagagtgccttccaccctgaggccacccagacctggaggagatgcaggccccagctctgctaaagggcctttgaggtgggtgggactgtctcccagttgggcagctcttgagaaggacacacgaccggtttgtgcgcccattgcctgctctgtgtctccgttggtccctctgtctcttccttttcacatttgtgcacataaaatatactggtgtttgtgttccagga

SEQ ID NO: 193977 - DNA, 655 bp, Homo sapiens
  Payload ID: 18317
  Gene Name: transmembrane protein 229B
  ENST ID: ENST00000554480
  CDS Start-End: 417-655
gtttctgttttagttctgacttgtgccgtggatgtggctgagggcctagggtggggagaagtctccacaggtgggattgaactccccaggcacatggtccttgtggtgctggtggagagagagtcccagagggttcggacatgctccgttaaaaccttttcctcaaggtgataggtacgtgtcaaggtgacccctgtccgccatccggcaggctggaagaagccgggacacatggaagctgccagccccccagccaaggatcagctgagccctagggctgatgcttgcctacgttgctgagaatggcactgaggcccagccaacaaaggttaacccaggacactcctggacagtgatcctgatgtctgttgtgagctgcacactcaagggtgtgataaccagccccagtcggcgccatggcgtctgccgagcccctgacggcgctgtcccgctggtacctgtatgccatccacggctacttctgcgaggtgatgttcacagcggcctgggagttcgtggtgaacttgaactggaagttccctggggtcacgagcgtgtgggccctcttcatctacggcacctccatcctcatcgtggagcgcatgtacctgcggctgcgcggccgctgcccgctgctcctgcgctgcctcatcta

SEQ ID NO: 193978 - DNA, 3941 bp, Homo sapiens
  Payload ID: 18317
  Gene Name: transmembrane protein 229B
  Uniprot ID: Q8NBD8
  ENST ID: ENST00000557006
  CDS Start-End: 284-787
gcagtttgcagcgcatccgtactatggggcagtgggcagccatgccgagtcatgaaggtggcatgcagggatgggaaatgctgccttaggagggacacatggaagctgccagccccccagccaaggatcagctgagccctagggctgatgcttgcctacgttgctgagaatggcactgaggcccagccaacaaaggttaacccaggacactcctggacagtgatcctgatgtctgttgtgagctgcacactcaagggtgtgataaccagccccagtcggcgccatggcgtctgccgagcccctgacggcgctgtcccgctggtacctgtatgccatccacggctacttctgcgaggtgatgttcacagcggcctgggagttcgtggtgaacttgaactggaagttccctggggtcacgagcgtgtgggccctcttcatctacggcacctccatcctcatcgtggagcgcatgtacctgcggctgcgcggccgctgcccgctgctcctgcgctgcctcatctacacgctctggacctacctgtgggagttcaccaccggcttcatcctgcgccagttcaacgcctgcccctgggactactcccagttcgactttgacttcatgggcctcatcaccctggagtacgccgtgccctggttctgcggggccctcatcatggagcagttcatcatccgcaacaccctccgcctccgcttcgacaaggacgctgagcccggggagcccagcggcgccctagccctggccaacggccatgtcaagactgactgagcaggaagcgggtggggggcctggggatctctcatggaactcatggacaaagagaccaagctggtgaggttgccccatccatgcagcaaaagccctgctccggccaagcctcagccctatagggcacacagagccccctaacgtccgcgggggccggtgttggggggccgtggtcaggtgttgggggatggggtgtggaggcagcagagggacattgggaagggtccatggatcgcggcccagttcaggggttggtaccaggaggcctgtggctgagcagcgatggactatgtagttgactttggaagcagcaggccctgtcctggccaagggacaatgagaatggggccgcaggtgggaggcaaggcctgacctccctccctccgatctggatttagttgagctttggctggttccattaggcaatattcaggtgcttgcttgcaaccaatacctccccaggggcctgctgagctgcagccgaggagagactgggcagccaggaggctgcgtggcagcaacgctggtctgcaagggctgggagaccctcccttggctcctctcccctcccccagggccctgcgctgctcccttggccttctggggcccccgtggtgctggattcccaccaaccttgggcttttggaggtttcaatccccgtgtgttcggtggcgtttcccccttttctgtcttgttttcaaagcctttaccactagcggctctttatccacgtcggtcgccacacctgccccaccccagctccctagccagcacaggagctgccggagatgaagccctgagacacccccaaccctcacccccttgcagcccttccctccactgttccggctggcctgatgcctggggagttcctgagttacacctccctacccccggtctagtgggctgtggcagtgctcccttctcagtggctcagctgagaacaaatgatgccctccaatgcacaggcaggctgggttaggccctgtggatccacagtggggacctagaggcaagtcagtttggtggggaaaagccagagttctaggtcatctattccctgcctggtttattttcaagccaaaactgagcagtctagctttctatgggatggagaagccaggtatccagcattggagactgatggagaatgagaggaagaaagagaggaggaccttgcagctgtggaaggctccttggagcctcctttgtgggagggtatcagttctggttctgccagagcctcagccctggtagcagaacctcagggctgcccctctccccaaactcctcccagcaaggctgaccctttgagctcactccttaaacagtattaaccctgccacactcatgggcattggcaccttggttcccctgccccactttgtcctgtgacaggtccattgctggcagtggacaggtgaaatactcactccagcctacttccggctctgactctcactcctcaaggggaagggtccgttagaaagtggcccaccccatggtacatggtctcttcttgaccacactaggactcttaggtagaaattagccttcccctttttatggatcattacaaagtgacggtatcacctgtggagagaatgtcctcttccctgctggctgccctgcccatactgtgcagggtgtggtggggtgcagggtgtggtggggtgggccacagttgtgtcctaggtctggagaaaagcttgcagactctgcctttggcaggattttctgcagttagccccgtccagagcagaacgaagggtatttcctagcctatttcctgggcaggctcctcaaatccagggatgaactactttctgcagtggccagccctccttttgattttattgtggccccaattccagggctttgggggttacagagaatcaggcttccggtgggagtagattgttttccatctataggtggagaaaattccaggaggagaatattgtctggcttccccgttctctctgggcaattgtttccttggttctctctccaactccatgttgtcttagtctcccagcaccccttcaggccttccatgtgggcccctagaccacactacccaccttcacacttgcattccacaactcagtccagtggccagcttgttgatgcctccataattctcagccagagcaaatccttgattggcccaccaggtcttgctgctccagaagttgccttgtgggcattccctggcaccatttcctctctgggtcctatactttcccaagtgcaggaggtcctgggggtatgcctgtgtgcctggcaacatccagcattgtgtttctgctccatctaggtgtcccatttctccagttgcccctcataaggcatcaaacctccagcaaaggaaggcaacaacccatggcctgaccacgggatctacaggttcagatctcaccagggatagcccagacttcaattcttgcttttttgggtatcagggccccaatcccttagtggccagggactcaaagtttggaataatcccagccctgccaagcattaagggtgctggtggggagtgtttgctggctgttcatgaacctctggtgtcctgggcctctctccactagacatggcagcatctctgagttacagattgcaatgtgttgccctgcatggttgaactgcttcggacatctgctaggcatcccatgtgccctgtcccctcttcaatgccagtgagtcacaatggcctatgcttattcacagcaataatacctagggagtccccatgaagcccttttgtcctggtccctcactctgcgtgggtctcctggggaggcagctgctgagtgggtcagttcatgagaacctgcatttatgaagccctgggctgtgtaggcatcaccctgggatgcagacaggttagaggcccagcccttaggggagccatggcagggagagtgccttccaccctgaggccacccagacctggaggagatgcaggccccagctctgctaaagggcctttgaggtgggtgggactgtctcccagttgggcagctcttgagaaggacacacgaccggtttgtgcgcccattgcctgctctgtgtctccgttggtccctctgtctcttccttttcacatttgtgcacataaaatatactggtgtttgtgttccagga

SEQ ID NO: 193979 - DNA, 701 bp, Homo sapiens
  Payload ID: 18317
  Gene Name: transmembrane protein 229B
  ENST ID: ENST00000557779
  CDS Start-End: 536-701
gccgccgccgccgccgccgccgggggctcctttcctcccgggcagcggcggctgcagccccccggaccccgcgccgccgcggcggacgccgacacacaatgcgggactaggcgcggcgcgggagtgccaggcggcgtgggggaggcacggcccgcaactcggcgcggggggagccagagcgccgggcttgggggcggggagcaggcggtgcaggagagcgccccgagtcccggcgcgggaggaggagcgggagccagccctggagacggcgctcctagccgcacctgcgcctggcaggcggccggctctgcccagcccctacccacggccccggccccgcaccgggacacatggaagctgccagccccccagccaaggatcagctgagccctagggctgatgcttgcctacgttgctgagaatggcactgaggcccagccaacaaaggttaacccaggacactcctggacagtgatcctgatgtctgttgtgagctgcacactcaagggtgtgataaccagccccagtcggcgccatggcgtctgccgagcccctgacggcgctgtcccgctggtacctgtatgccatccacggctacttctgcgaggtgatgttcacagcggcctgggagttcgtggtgaacttgaactggaagttccctggggtcacgagcgtgtgggccctcttcatctacggcacct

SEQ ID NO: 193980 - DNA, 523 bp, Homo sapiens
  Payload ID: 18317
  Gene Name: transmembrane protein 229B
  ENST ID: ENST00000555994
  CDS Start-End: 354-523
cgggagccagccctggagacggcgctcctagccgcacctgcgcctggcaggcggccggctctgcccagcccctacccacggccccggccccgcaccgggcagtgggcagccatgccgagtcatgaaggtggcatgcagggatgggaaatgctgccttaggagggacacatggaagctgccagccccccagccaaggatcagctgagccctagggctgatgcttgcctacgttgctgagaatggcactgaggcccagccaacaaaggttaacccaggacactcctggacagtgatcctgatgtctgttgtgagctgcacactcaagggtgtgataaccagccccagtcggcgccatggcgtctgccgagcccctgacggcgctgtcccgctggtacctgtatgccatccacggctacttctgcgaggtgatgttcacagcggcctgggagttcgtggtgaacttgaactggaagttccctggggtcacgagcgtgtgggccctcttcatctacggcacctccat

SEQ ID NO: 193981 - DNA, 2812 bp, Homo sapiens
  Payload ID: 18317
  Gene Name: transmembrane protein 229B
  Uniprot ID: Q8NBD8
  ENST ID: ENST00000555638
  CDS Start-End: 233-736
agacgcgagcatgtgcagtttgcagcgcatccgtactatggggacacatggaagctgccagccccccagccaaggatcagctgagccctagggctgatgcttgcctacgttgctgagaatggcactgaggcccagccaacaaaggttaacccaggacactcctggacagtgatcctgatgtctgttgtgagctgcacactcaagggtgtgataaccagccccagtcggcgccatggcgtctgccgagcccctgacggcgctgtcccgctggtacctgtatgccatccacggctacttctgcgaggtgatgttcacagcggcctgggagttcgtggtgaacttgaactggaagttccctggggtcacgagcgtgtgggccctcttcatctacggcacctccatcctcatcgtggagcgcatgtacctgcggctgcgcggccgctgcccgctgctcctgcgctgcctcatctacacgctctggacctacctgtgggagttcaccaccggcttcatcctgcgccagttcaacgcctgcccctgggactactcccagttcgactttgacttcatgggcctcatcaccctggagtacgccgtgccctggttctgcggggccctcatcatggagcagttcatcatccgcaacaccctccgcctccgcttcgacaaggacgctgagcccggggagcccagcggcgccctagccctggccaacggccatgtcaagactgactgagcaggaagcgggtggggggcctggggatctctcatggaactcatggacaaagagaccaagctggtgaggttgccccatccatgcagcaaaagccctgctccggccaagcctcagccctatagggcacacagagccccctaacgtccgcgggggccggtgttggggggccgtggtcaggtgttgggggatggggtgtggaggcagcagagggacattgggaagggtccatggatcgcggcccagttcaggggttggtaccaggaggcctgtggctgagcagcgatggactatgtagttgactttggaagcagcaggccctgtcctggccaagggacaatgagaatggggccgcaggtgggaggcaaggcctgacctccctccctccgatctggatttagttgagctttggctggttccattaggcaatattcagatggccaccattatttctgttttatgggagaggtctgttggcaaagagtcggccacccagatttaccacatttctctgcagaacactcttttgttcaatataagcagagaccttccaccgggggcaggatttgtgatacctgcagtgagccaaggaccaggctagttcctgtgatgctgaagatgttgaagggaagcccataacattacaacgttgaccaatcctccagaaaagaagctctaacagaggaccctggctgtctacggggttggtttccatctctccattcgtgagctccttgaaggcagagaacacttggcttttcttcctatacctccagtccctaatgcagggacatgagagatgcccatttgtgtttgatgaatgaatgagtgaataaatgaatgaatgagtgcctggagatcagagtacatgggatgagtgttcggagttctacagactcaggaagccccagctgacattccaagaagaaggagacacgaaggtgaggggatgccatgcagttagcgtcacatgaagaaaaacaaaatttaaggtatcatccttagaagacggagggatgacagtttcaaggaggatttgttcatcagatgctgggaaggaatttcaacagatgaggaaactgaagagcagagaggttaagtacccccctaccctgccccccaggggacacaacctgctggagtgcaatggcacgatctcagctcactgcaacctctgcctcccgggttcaagcaattctcctgcctcagcctcccaagtagctgagattacagatgcaaggtagagagtggaaggaatgaaggggtgggcgagggcatgaagaagcctccccagctctaatggccactgtctgaaagtgatgcagctcacttccacccacattcgccagatttcaatccatagcctcacttaactgtagggcaggctaggacatatcatctttccatgtgctgagaaaaaatagaaaagaccaagattggtgaaaaggagcaaactagtgacgagaaccttgccatagccatttttttgccactcacagaagccggtctgtaccaagcgagaagtggctataggagaagtggtcctgaggctcatctgccttctcctggtcaccctcccaatatatccctcctgtgctgagctagttttctattacttttcatcacctacatctaaaagagacctacctatctaacacagtctttgtcttactatcataatgctattaatgcaagctaaataataatctttcatcttctttttttctttatctttttcacttgaattgctttaaattcaaatcttcctgctatagtgtgaatgtttgtgttccccccaaatttatgtttaaactttaacctccaagctgatggtattaggaagtggggcttggggaggtgattaggtcatgagggtggaatatttgagaatgagattagtgcccttgtgaattaggcctgagagagatcccctcatctcaccatgtaaggacacagcagaaggtgctatctttgaaccaggaagtgagcccttgccagacactgaacctgccgatacctcaatcttgtccttctcagtctccagaactgtgagaaataaatttctgttgtttataaacc

SEQ ID NO: 193982 - DNA, 699 bp, Homo sapiens
  Payload ID: 18317
  Gene Name: transmembrane protein 229B
  ENST ID: ENST00000554278
  CDS Start-End: 296-699
aaggggtgaaagggagcgagcaccgatagcaaggtggcagcctgcacgtccgctccgagggcccttcccaggagcggctggatctgaccgatccccaagtccagggacacatggaagctgccagccccccagccaaggatcagctgagccctagggctgatgcttgcctacgttgctgagaatggcactgaggcccagccaacaaaggttaacccaggacactcctggacagtgatcctgatgtctgttgtgagctgcacactcaagggtgtgataaccagccccagtcggcgccatggcgtctgccgagcccctgacggcgctgtcccgctggtacctgtatgccatccacggctacttctgcgaggtgatgttcacagcggcctgggagttcgtggtgaacttgaactggaagttccctggggtcacgagcgtgtgggccctcttcatctacggcacctccatcctcatcgtggagcgcatgtacctgcggctgcgcggccgctgcccgctgctcctgcgctgcctcatctacacgctctggacctacctgtgggagttcaccaccggcttcatcctgcgccagttcaacgcctgcccctgggactactcccagttcgactttgacttcatgggcctcatcaccctggagtacgccgtgccctggttctgcggggccctcatcatggagcagttcat

SEQ ID NO: 193983 - DNA, 1472 bp, Homo sapiens
  Payload ID: 18318
  Gene Name: transmembrane protein 230
  Uniprot ID: Q96A57
  ENST ID: ENST00000202834
  CDS Start-End: 159-521
ctgtttccggcacgccacttccggcgcactgatcccgcctggggccggctgagtggcacttaagcgggccatgccatgcaaccttgggcgctgccaaccgtgggcgagctctgggtgtgcgggcggcctggcgcggcgctccgctgtgtcagcgtgttatgatgccgtcccgtaccaacctggctactggaatccccagtagtaaagtgaaatattcaaggctctccagcacagacgatggctacattgaccttcagtttaagaaaacccctcctaagatcccttataaggccatcgcacttgccactgtgctgtttttgattggcgcctttctcattattataggctccctcctgctgtcaggctacatcagcaaagggggggcagaccgggccgttccagtgctgatcattggcattctggtgttcctacccggattttaccacctgcgcatcgcttactatgcatccaaaggctaccgtggttactcctatgatgacattccagactttgatgactagcacccaccccatagctgaggaggagtcacagtggaactgtcccagctttaagatatctagcagaaactatagctgaggactaaggaattctgcagcttgcagatgtttaagaaaataatggccagattttttgggtccttcccaaagatgttaagtgaacctacagttagctaattaggacaagctctatttttcatccctgggccctgacaagtttttccacaggaatatgtatcatggaagaatagaggttattctgtaatggaaaagtgttgcctgccaccaccctctgtagagctgagcatttcttttaaatagtcttcattgccaatttgttcttgtagcaaatggaacaatgtggtatggctaatttcttattattaagtaatttattttaaaaatatctgagtatattatcctgtacacttatccctaccttcatgttccagtggaagaccttagtaaaatcaaagatcagtgagttcatctgtaatattttttttacttgctttcttactgacagcaaccaggaatttttttatcctgcagagcaagttttcaaaatgtaaatacttcctctgtttaacagtccttggaccattctgatccagttcaccagtaggttggacagcatataatttgcatcattttgtcccttgtaaatcaagatgttctgcagattattcctttaacggccggacttttggctgtttcctaatgaaacatgtagtggttattatttagagtttatagccgtattgctagcaccttgtagtatgtcatcattctgctcatgattccaaggatcagcctggatgcctagaggactagatcaccttagtttgattctattttttagcttgcaaaaagtgacttatattccaaagaaattaaaatgttgaaatccaaatcctagaaataaaatgagttaacttcaaacatttcagaaaa

SEQ ID NO: 193984 - DNA, 1562 bp, Homo sapiens
  Payload ID: 18318
  Gene Name: transmembrane protein 230
  Uniprot ID: Q96A57
  ENST ID: ENST00000342308
  CDS Start-End: 60-611
acttccggcgcactgatcccgcctggggccggctgagtggcacttaagcgggccatgccatgcaaccttgggcgctgccaaccgtgggcgagctctgggtgtgcgggcggcctggcgcggcgctccgatggagtctagttctgtcgcccaggctggagcccagtggtgtgatctcagctcactgcaatctccacctcctggcttcaagcgattcttctgcttcagcctcccgactgtgtcagcgtgttatgatgccgtcccgtaccaacctggctactggaatccccagtagtaaagtgaaatattcaaggctctccagcacagacgatggctacattgaccttcagtttaagaaaacccctcctaagatcccttataaggccatcgcacttgccactgtgctgtttttgattggcgcctttctcattattataggctccctcctgctgtcaggctacatcagcaaagggggggcagaccgggccgttccagtgctgatcattggcattctggtgttcctacccggattttaccacctgcgcatcgcttactatgcatccaaaggctaccgtggttactcctatgatgacattccagactttgatgactagcacccaccccatagctgaggaggagtcacagtggaactgtcccagctttaagatatctagcagaaactatagctgaggactaaggaattctgcagcttgcagatgtttaagaaaataatggccagattttttgggtccttcccaaagatgttaagtgaacctacagttagctaattaggacaagctctatttttcatccctgggccctgacaagtttttccacaggaatatgtatcatggaagaatagaggttattctgtaatggaaaagtgttgcctgccaccaccctctgtagagctgagcatttcttttaaatagtcttcattgccaatttgttcttgtagcaaatggaacaatgtggtatggctaatttcttattattaagtaatttattttaaaaatatctgagtatattatcctgtacacttatccctaccttcatgttccagtggaagaccttagtaaaatcaaagatcagtgagttcatctgtaatattttttttacttgctttcttactgacagcaaccaggaatttttttatcctgcagagcaagttttcaaaatgtaaatacttcctctgtttaacagtccttggaccattctgatccagttcaccagtaggttggacagcatataatttgcatcattttgtcccttgtaaatcaagatgttctgcagattattcctttaacggccggacttttggctgtttcctaatgaaacatgtagtggttattatttagagtttatagccgtattgctagcaccttgtagtatgtcatcattctgctcatgattccaaggatcagcctggatgcctagaggactagatcaccttagtttgattctattttttagcttgcaaaaagtgacttatattccaaagaaattaaaatgttgaaatccaaatcctagaaataaaatgagttaacttcaaacatttcagaaaa

SEQ ID NO: 193985 - DNA, 306 bp, Homo sapiens
  Payload ID: 18318
  Gene Name: transmembrane protein 230
  ENST ID: ENST00000379276
  CDS Start-End: 85-306
tctgaagacgggtaggagaataacgtatgtacaaagtacttagaacagctggcatctaacaaagactagctgtgtcagcgtgttatgatgccgtcccgtaccaacctggctactggaatccccagtagtaaagtgaaatattcaaggctctccagcacagacgatggctacattgaccttcagtttaagaaaacccctcctaagatcccttataaggccatcgcacttgccactgtgctgtttttgattggcgcctttctcattattataggctccctcctgctgtcaggctacatcagcaaaggg

SEQ ID NO: 193986 - DNA, 1536 bp, Homo sapiens
  Payload ID: 18318
  Gene Name: transmembrane protein 230
  Uniprot ID: Q96A57
  ENST ID: ENST00000379277
  CDS Start-End: 223-585
gtccgagaccgcgctccccgccgaaatcaagctccgagtcatccgtgtggggcattcgtcccccctggcacagttggcctctttccagaagcccgttttgtttgttttacgtctaaattcgcgtcggttcttatttctctccctggcaaggtctgaagacgggtatgtacaaagtacttagaacagctggcatctaacaaagactagctgtgtcagcgtgttatgatgccgtcccgtaccaacctggctactggaatccccagtagtaaagtgaaatattcaaggctctccagcacagacgatggctacattgaccttcagtttaagaaaacccctcctaagatcccttataaggccatcgcacttgccactgtgctgtttttgattggcgcctttctcattattataggctccctcctgctgtcaggctacatcagcaaagggggggcagaccgggccgttccagtgctgatcattggcattctggtgttcctacccggattttaccacctgcgcatcgcttactatgcatccaaaggctaccgtggttactcctatgatgacattccagactttgatgactagcacccaccccatagctgaggaggagtcacagtggaactgtcccagctttaagatatctagcagaaactatagctgaggactaaggaattctgcagcttgcagatgtttaagaaaataatggccagattttttgggtccttcccaaagatgttaagtgaacctacagttagctaattaggacaagctctatttttcatccctgggccctgacaagtttttccacaggaatatgtatcatggaagaatagaggttattctgtaatggaaaagtgttgcctgccaccaccctctgtagagctgagcatttcttttaaatagtcttcattgccaatttgttcttgtagcaaatggaacaatgtggtatggctaatttcttattattaagtaatttattttaaaaatatctgagtatattatcctgtacacttatccctaccttcatgttccagtggaagaccttagtaaaatcaaagatcagtgagttcatctgtaatattttttttacttgctttcttactgacagcaaccaggaatttttttatcctgcagagcaagttttcaaaatgtaaatacttcctctgtttaacagtccttggaccattctgatccagttcaccagtaggttggacagcatataatttgcatcattttgtcccttgtaaatcaagatgttctgcagattattcctttaacggccggacttttggctgtttcctaatgaaacatgtagtggttattatttagagtttatagccgtattgctagcaccttgtagtatgtcatcattctgctcatgattccaaggatcagcctggatgcctagaggactagatcaccttagtttgattctattttttagcttgcaaaaagtgacttatattccaaagaaattaaaatgttgaaatccaaatcctagaaataaaatgagttaacttcaaacatttcagaaaa

SEQ ID NO: 193987 - DNA, 1636 bp, Homo sapiens
  Payload ID: 18318
  Gene Name: transmembrane protein 230
  Uniprot ID: Q96A57
  ENST ID: ENST00000379279
  CDS Start-End: 323-685
ggcacttaagcgggccatgccatgcaaccttgggcgctgccaaccgtgggcgagctctgggtgtgcgggcggcctggcgcggcgctccggtaaggcgtgtgtgcggcagggcggggacagaaccgtcctctcgggctctgggcgtgtccgagaccgcgctccccgccgaaatcaagctccgagtcatccgtgtggggcattcgtcccccctggcacagttggcctctttccagaagcccgttttgtttgttttacgtctaaattcgcgtcggttcttatttctctccctggcaaggtctgaagacggctgtgtcagcgtgttatgatgccgtcccgtaccaacctggctactggaatccccagtagtaaagtgaaatattcaaggctctccagcacagacgatggctacattgaccttcagtttaagaaaacccctcctaagatcccttataaggccatcgcacttgccactgtgctgtttttgattggcgcctttctcattattataggctccctcctgctgtcaggctacatcagcaaagggggggcagaccgggccgttccagtgctgatcattggcattctggtgttcctacccggattttaccacctgcgcatcgcttactatgcatccaaaggctaccgtggttactcctatgatgacattccagactttgatgactagcacccaccccatagctgaggaggagtcacagtggaactgtcccagctttaagatatctagcagaaactatagctgaggactaaggaattctgcagcttgcagatgtttaagaaaataatggccagattttttgggtccttcccaaagatgttaagtgaacctacagttagctaattaggacaagctctatttttcatccctgggccctgacaagtttttccacaggaatatgtatcatggaagaatagaggttattctgtaatggaaaagtgttgcctgccaccaccctctgtagagctgagcatttcttttaaatagtcttcattgccaatttgttcttgtagcaaatggaacaatgtggtatggctaatttcttattattaagtaatttattttaaaaatatctgagtatattatcctgtacacttatccctaccttcatgttccagtggaagaccttagtaaaatcaaagatcagtgagttcatctgtaatattttttttacttgctttcttactgacagcaaccaggaatttttttatcctgcagagcaagttttcaaaatgtaaatacttcctctgtttaacagtccttggaccattctgatccagttcaccagtaggttggacagcatataatttgcatcattttgtcccttgtaaatcaagatgttctgcagattattcctttaacggccggacttttggctgtttcctaatgaaacatgtagtggttattatttagagtttatagccgtattgctagcaccttgtagtatgtcatcattctgctcatgattccaaggatcagcctggatgcctagaggactagatcaccttagtttgattctattttttagcttgcaaaaagtgacttatattccaaagaaattaaaatgttgaaatccaaatcctagaaataaaatgagttaacttcaaacatttcagaaaa

SEQ ID NO: 193988 - DNA, 1660 bp, Homo sapiens
  Payload ID: 18318
  Gene Name: transmembrane protein 230
  Uniprot ID: Q96A57
  ENST ID: ENST00000379283
  CDS Start-End: 347-709
tggcacttaagcgggccatgccatgcaaccttgggcgctgccaaccgtgggcgagctctgggtgtgcgggcggcctggcgcggcgctccggtaaggcgtgtgtgcggcagggcggggacagaaccgtcctctcgggctctgggcgtgtccgagaccgcgctccccgccgaaatcaagctccgagtcatccgtgtggggcattcgtcccccctggcacagttggcctctttccagaagcccgttttgtttgttttacgtctaaattcgcgtcggttcttatttctctccctggcaaggtctgaagacgggtaggagaataacgtatgtagagctgtgtcagcgtgttatgatgccgtcccgtaccaacctggctactggaatccccagtagtaaagtgaaatattcaaggctctccagcacagacgatggctacattgaccttcagtttaagaaaacccctcctaagatcccttataaggccatcgcacttgccactgtgctgtttttgattggcgcctttctcattattataggctccctcctgctgtcaggctacatcagcaaagggggggcagaccgggccgttccagtgctgatcattggcattctggtgttcctacccggattttaccacctgcgcatcgcttactatgcatccaaaggctaccgtggttactcctatgatgacattccagactttgatgactagcacccaccccatagctgaggaggagtcacagtggaactgtcccagctttaagatatctagcagaaactatagctgaggactaaggaattctgcagcttgcagatgtttaagaaaataatggccagattttttgggtccttcccaaagatgttaagtgaacctacagttagctaattaggacaagctctatttttcatccctgggccctgacaagtttttccacaggaatatgtatcatggaagaatagaggttattctgtaatggaaaagtgttgcctgccaccaccctctgtagagctgagcatttcttttaaatagtcttcattgccaatttgttcttgtagcaaatggaacaatgtggtatggctaatttcttattattaagtaatttattttaaaaatatctgagtatattatcctgtacacttatccctaccttcatgttccagtggaagaccttagtaaaatcaaagatcagtgagttcatctgtaatattttttttacttgctttcttactgacagcaaccaggaatttttttatcctgcagagcaagttttcaaaatgtaaatacttcctctgtttaacagtccttggaccattctgatccagttcaccagtaggttggacagcatataatttgcatcattttgtcccttgtaaatcaagatgttctgcagattattcctttaacggccggacttttggctgtttcctaatgaaacatgtagtggttattatttagagtttatagccgtattgctagcaccttgtagtatgtcatcattctgctcatgattccaaggatcagcctggatgcctagaggactagatcaccttagtttgattctattttttagcttgcaaaaagtgacttatattccaaagaaattaaaatgttgaaatccaaatcctagaaataaaatgagttaacttcaaacatttcagaaaa

SEQ ID NO: 193989 - DNA, 1735 bp, Homo sapiens
  Payload ID: 18318
  Gene Name: transmembrane protein 230
  Uniprot ID: Q96A57
  ENST ID: ENST00000379286
  CDS Start-End: 422-784
aagcgggccatgccatgcaaccttgggcgctgccaaccgtgggcgagctctgggtgtgcgggcggcctggcgcggcgctccggtaaggcgtgtgtgcggcagggcggggacagaaccgtcctctcgggctctgggcgtgtccgagaccgcgctccccgccgaaatcaagctccgagtcatccgtgtggggcattcgtcccccctggcacagttggcctctttccagaagcccgttttgtttgttttacgtctaaattcgcgtcggttcttatttctctccctggcaaggtctgaagacggatggagtctagttctgtcgcccaggctggagcccagtggtgtgatctcagctcactgcaatctccacctcctggcttcaagcgattcttctgcttcagcctcccgactgtgtcagcgtgttatgatgccgtcccgtaccaacctggctactggaatccccagtagtaaagtgaaatattcaaggctctccagcacagacgatggctacattgaccttcagtttaagaaaacccctcctaagatcccttataaggccatcgcacttgccactgtgctgtttttgattggcgcctttctcattattataggctccctcctgctgtcaggctacatcagcaaagggggggcagaccgggccgttccagtgctgatcattggcattctggtgttcctacccggattttaccacctgcgcatcgcttactatgcatccaaaggctaccgtggttactcctatgatgacattccagactttgatgactagcacccaccccatagctgaggaggagtcacagtggaactgtcccagctttaagatatctagcagaaactatagctgaggactaaggaattctgcagcttgcagatgtttaagaaaataatggccagattttttgggtccttcccaaagatgttaagtgaacctacagttagctaattaggacaagctctatttttcatccctgggccctgacaagtttttccacaggaatatgtatcatggaagaatagaggttattctgtaatggaaaagtgttgcctgccaccaccctctgtagagctgagcatttcttttaaatagtcttcattgccaatttgttcttgtagcaaatggaacaatgtggtatggctaatttcttattattaagtaatttattttaaaaatatctgagtatattatcctgtacacttatccctaccttcatgttccagtggaagaccttagtaaaatcaaagatcagtgagttcatctgtaatattttttttacttgctttcttactgacagcaaccaggaatttttttatcctgcagagcaagttttcaaaatgtaaatacttcctctgtttaacagtccttggaccattctgatccagttcaccagtaggttggacagcatataatttgcatcattttgtcccttgtaaatcaagatgttctgcagattattcctttaacggccggacttttggctgtttcctaatgaaacatgtagtggttattatttagagtttatagccgtattgctagcaccttgtagtatgtcatcattctgctcatgattccaaggatcagcctggatgcctagaggactagatcaccttagtttgattctattttttagcttgcaaaaagtgacttatattccaaagaaattaaaatgttgaaatccaaatcctagaaataaaatgagttaacttcaaacatttcagaaaa

SEQ ID NO: 193990 - DNA, 1642 bp, Homo sapiens
  Payload ID: 18318
  Gene Name: transmembrane protein 230
  Uniprot ID: Q96A57
  ENST ID: ENST00000379299
  CDS Start-End: 329-691
aagcgggccatgccatgcaaccttgggcgctgccaaccgtgggcgagctctgggtgtgcgggcggcctggcgcggcgctccggtaaggcgtgtgtgcggcagggcggggacagaaccgtcctctcgggctctgggcgtgtccgagaccgcgctccccgccgaaatcaagctccgagtcatccgtgtggggcattcgtcccccctggcacagttggcctctttccagaagcccgttttgtttgttttacgtctaaattcgcgtcggttcttatttctctccctggcaaggtctgaagacgggtaggagaataacctgtgtcagcgtgttatgatgccgtcccgtaccaacctggctactggaatccccagtagtaaagtgaaatattcaaggctctccagcacagacgatggctacattgaccttcagtttaagaaaacccctcctaagatcccttataaggccatcgcacttgccactgtgctgtttttgattggcgcctttctcattattataggctccctcctgctgtcaggctacatcagcaaagggggggcagaccgggccgttccagtgctgatcattggcattctggtgttcctacccggattttaccacctgcgcatcgcttactatgcatccaaaggctaccgtggttactcctatgatgacattccagactttgatgactagcacccaccccatagctgaggaggagtcacagtggaactgtcccagctttaagatatctagcagaaactatagctgaggactaaggaattctgcagcttgcagatgtttaagaaaataatggccagattttttgggtccttcccaaagatgttaagtgaacctacagttagctaattaggacaagctctatttttcatccctgggccctgacaagtttttccacaggaatatgtatcatggaagaatagaggttattctgtaatggaaaagtgttgcctgccaccaccctctgtagagctgagcatttcttttaaatagtcttcattgccaatttgttcttgtagcaaatggaacaatgtggtatggctaatttcttattattaagtaatttattttaaaaatatctgagtatattatcctgtacacttatccctaccttcatgttccagtggaagaccttagtaaaatcaaagatcagtgagttcatctgtaatattttttttacttgctttcttactgacagcaaccaggaatttttttatcctgcagagcaagttttcaaaatgtaaatacttcctctgtttaacagtccttggaccattctgatccagttcaccagtaggttggacagcatataatttgcatcattttgtcccttgtaaatcaagatgttctgcagattattcctttaacggccggacttttggctgtttcctaatgaaacatgtagtggttattatttagagtttatagccgtattgctagcaccttgtagtatgtcatcattctgctcatgattccaaggatcagcctggatgcctagaggactagatcaccttagtttgattctattttttagcttgcaaaaagtgacttatattccaaagaaattaaaatgttgaaatccaaatcctagaaataaaatgagttaacttcaaacatttcagaaaa

SEQ ID NO: 193991 - DNA, 594 bp, Homo sapiens
  Payload ID: 18318
  Gene Name: transmembrane protein 230
  ENST ID: ENST00000615008
  CDS Start-End: 182-565
aaattcgcgtcggttcttatttctctccctggcaaggtctgaagacggggtctcattctgtcgcccaggctggagtgcagtggtgcagtctcggctcactgtaacctccgtctcccaggctcaagctattctcgtgcctcagccttccaaatagctgggattacagctgtgtcagcgtgttatgatgccgtcccgtaccaacctggctactggaatccccagtagtaaagtgaaatattcaaggctctccagcacagacgatggctacattgaccttcagtttaagaaaacccctcctaagatcccttataaggccatcgcacttgccactgtgctgtttttgattggcgcctttctcattattataggctccctcctgctgtcaggctacatcagcaaagggagtctcgaatccacctcacgggaacaaaagaaagctgaccacaaacatctaccagcatcccgtgggtacatgatgggaggcatcagtgggaggagtcccgaaggaggactcagctcaaggcttccagaaggaagaggaacacaggtgtcatcacctgactgaggttctgaccaatggaacacaggtggaag

SEQ ID NO: 193992 - DNA, 1231 bp, Homo sapiens
  Payload ID: 18318
  Gene Name: transmembrane protein 230
  ENST ID: ENST00000612323
  CDS Start-End: 143-526
acttccggcgcactgatcccgcctggggccggctgagtggcacttaagcgggccatgccatgcaaccttgggcgctgccaaccgtgggcgagctctgggtgtgcgggcggcctggcgcggcgctccgctgtgtcagcgtgttatgatgccgtcccgtaccaacctggctactggaatccccagtagtaaagtgaaatattcaaggctctccagcacagacgatggctacattgaccttcagtttaagaaaacccctcctaagatcccttataaggccatcgcacttgccactgtgctgtttttgattggcgcctttctcattattataggctccctcctgctgtcaggctacatcagcaaagggagtctcgaatccacctcacgggaacaaaagaaagctgaccacaaacatctaccagcatcccgtgggtacatgatgggaggcatcagtgggaggagtcccgaaggaggactcagctcaaggcttccagaaggaagaggaacacaggtgtcatcacctgactgaggttggtgcctctaatttgagataagcatcttaaaagggctaaactgaaaatgtcctaggaataagtacgtcagcatgaaaatgactgattgtaaaatgcagcagagagcttctcctactaagagcaggatatgtggagggaatgttccatatgcctagaggagcaggccaaaggaattccagctgccctctaccccctatgcaactcctcttgtgaatggtgagaatggcgcagaccactccccatggccccacctctgttcctgagggtaggaggattcctgtccccttcataccatccttggtactgagagcgatgctgaagagactgggatgctcatattctcacaaagggactgcagggtggtacagatggctggatgcccagtactacatccattctcccctttttctttagtaatagaaccactgaaccttagctggatgagtaataaaaccgctggataatcttggcctaacatggtgatatgatttggctctgtgtccccacccgaatctcactttgaattgtaatccctgtaattcccatgtatcaaaggaggtactaggtggaggtaattggatcatggggtggtttcccccaagctgttcttgtgatagtgagtgactctcatgagatctgatggttttataagcatctggcatttcccctgcttgcactcactctgtcctggtgcgctgtga

SEQ ID NO: 193993 - DNA, 4278 bp, Homo sapiens
  Payload ID: 18319
  Gene Name: transmembrane protein 231
  Uniprot ID: Q9H6L2
  ENST ID: ENST00000258173
  CDS Start-End: 78-1028
gtggagaccgaggcgatggcaaccaggagaagccaaacttggtcccccggctcgcggagtgcctgcgagcggtgctcatggcgctctatgagctcttctctcacccggtcgagcgcagttaccgcgcggggctctgctccaaagccgcgctgttcctgctgctggccgctgcgctcacgtacatcccgccgctgctggtggccttccggagccacgggttttggctgaagcggagcagctacgaggagcagccgaccgtgcgcttccaacaccaggtgctgctcgtggccctgctcggacccgaaagcgacgggttcctcgcctggagcacgttccccgccttcaaccggctgcaaggggatcgcctgcgcgtcccgctcgtttcgactagagaagaagacaggaaccaggatgggaagacggacatgttacattttaagctggagcttcccctgcagtccacggagcacgttctcggtgtgcagctcatcctgactttctcctatcgattacacaggatggcgaccctcgtgatgcagagcatggcgtttctccagtcctcctttcctgtcccgggatcccagttatacgtgaacggagacctgaggctgcagcagaagcagccgctgagctgtggtggcctagatgcccgatacaacatatccgtgatcaacgggaccagcccctttgcctatgactacgacctcacccatattgttgctgcctaccaggagaggaacgttaccaccgtcctgaatgatcccaaccccatctggctggtgggcagggccgcagatgctccatttgtgattaatgctatcatccgataccctgtggaagtcatttcttatcagccaggattctgggagatggtaaagttcgcctgggtgcagtatgtcagcatcctgcttatcttcctctgggtgtttgaaagaatcaagatcttcgtgtttcagaatcaggtggtgaccaccattcctgtgacagtgacgccccggggagacttgtgtaaggagcacttatcctagaaaggccatttctgaagactcagcaggaccgtggctgcctcattgtcatcttctgggaacatcttaggaccttttgaaagagcccagcggacacctgcgggcttgtgtgcttttccctcagagacaacggttctttccggttttgctctacacagttccgtatcttcagagctcctgcagaattgtcagggactagtttgtggaaaggtctgagagttcctggaggctataattagctttttgggttttccttctttgccttagcgttgaatttcaggagaaaattgcagtcagttcagacatcttggaaagagtcccatctctggtcaagcagagacttttcctctgttgaactgaggaacacactgtgcatttctaccttctgttgtgagccactcttactcttttcagggctctcttgtgacaaacatgccaatcactagcactttgcacccctgggcttctccatttcccattcacagctttgatttccagagctgaggcctttaactggagacctggaggggcagggcccaagggcaagggccgcattagcacaggcaatcagggagggccgctgaaggacacttggaccgtccacctgccccagcccaacagtcagtcatctgtcatcagctcagctgagcagccctggatctttgccgtactgtgactgggctctttgccctatttttccctctgtctgtgcccctggatggcaggctgaagtcagaggggctgtttcattctcagccccctcagcagcactgggggaagaaagcattgtcacaacaggttctttctggccctcacccaacagcctgggcacttggccctcctcctccttgacagccctcccccttcctgcaaaggacaggggcgacaggggttggtgttgggattggctcccgctgcctgacaaccacaagtttatttggaaggctagcgggaagcccagcggctggcgtttcccttgactaaggaacagggtgcccatcagagtggggcgggcagctttgggaaggacacaagaagcagtaagagtgtaaagaggatgctggcctgggcaggccagtccagcctggccactagcagaataccaagcagtccagtggattaccctcgtggctaagcaagtgtctgcaggagcagagatggctggaaggggcctctgcacacggaagatggcttgttcagcccattcacctcctgaggatgtgggcagtctcctccaagaacacatggagctgcttcctgatcccaagcaggtcattgccactggaaggacatggccccggtgatccatgcttcatgcccacccagaaacacacccctcagtgtgtgcctcagtttactttggagatcagttgtcgtttttagtgctcctttaggcttactaaaacagttttggaaacaaagctattttgaagtattcaagcagaggaattccctaacactgacccccttgtctttttttaatattcaggctgttttatatgcctaaatttttttcttaagatctaaacgaaaaatagtttcttgtttaaattcacataaggcaatgagatatggaaagatgacaagatacgtataaacattggtttgcattttattaaattattctaatgcaaatcttgtataaagaacccatgatgttttgtaactttctaattaaaatgttcaaaatgaggccgagcatggtggttcattcctgtaatctcaacactttgggaggccaaggtgggaggatcacttgagcccaggagcttgaggctgcagtgtgctatgattgcaccactgtactgtagcctgggtgacagagtgagaccctatctgttaaaataaataaataaataaataaaaaagtcaaaatggaagatcacatgtacctttttcgagggaaagggtttggaatggcaaagaatagggagggcagaggttgcacacacctgtctttattactcatctacagccatgctttacaaggctctgcctaacgaccttggaacttccatgaggtctttggtgaaagtcccctagttcttccccaggtagatgagttttcagtgggattcacatgccatgtgaaatctacgtgttggataattatgactgtgtctggtgaatatgaaattatttacagaccagatgttgatagtttctgactctgaatcacagcatagctgcaagaggtaaataaaaagcaagaggccgggagcggtggctcacgcctgtaatcccagcactttgggaggccgaggtgggtgaatcacaaggtcaggagatcgagaccatcctggccaacatggtgaaaccccatctccactaaaaatacaaaaattggctgggtgtggcgacacgtgcctgtcatcccaactatttagtaggctgaggcaggagaatcgcttgaaccctggaggcggaggttgcagtgagccgagattgcgccactgcactccagcctggcaacagagctagactccgtctcaaaaaaaaaaaaaaaaagaaatatagaggattttattaactcagctccgacccatagctaagttaaggtttgatgttattactgaatatttggaggcagaaagactcctgattttgccaaatgattagtacagtttcggcttaagtcagatgaggcccccctaatattccatcatgtaaggctaataaagcaattatttcttttttttttttccttccaacttttattgtagactcatggggtatatgtatgggtttcgtatatagctaaattgtacaacctgggggtttggtgtacagattatttcatcacccacgtaataagcatagtacccagtaggtggtttttcttttctttttctttttcttttttttttttttttttgagacagagtctcactctgttacccaggctggagtgcagcagcatgatctcagctcattgcagcctctacctcccaggttcaagtgattctcctgccttaccctcccgagtagctgggattacgggtgcccaccaccatgcccggctaatttttgtgtttttagtagagacagggcttcaccctggtggtcaggctggtctcgaactcctgacctcaagtgatccatccgctttggccacccaaagtgctgggatcacagcagtttgatcacagaagttattatggttggcattctggcacacatctttctaatcttttttgttgtatgtaacctttttagtatcacaaacaacacttttataaaccttgtgtagaaa

SEQ ID NO: 193994 - DNA, 2991 bp, Homo sapiens
  Payload ID: 18319
  Gene Name: transmembrane protein 231
  ENST ID: ENST00000562410
  CDS Start-End: 60-380
gcaaccaggagaagccaaacttggtcccccggctcgcggagtgcctgcgagcggtgctcatggcgctctatgagctcttctctcacccggtcgagcgcagttaccgcgcggggctctgctccaaagccgcgctgttcctgctgctggccgctgcgctcacgtacatcccgccgctgctggtggccttccggagccacgggttttggctgaagcggagcagctacgaggagcagccgaccgtgcgcttccaacaccaggtgctgctcgtggccctgctcggacccgaaagcgacgggttcctcgcctggagcacgttccccgccttcaaccggctgcaaggggatcgcctgcgcgtcccgctcgtttcgtggaggagataatgcctgttgtgtacagcaagacagtgggtcattgtgtatttacagaagtgatgtggattcctcccagactcattagtgaccagggctgctgggcctgtttgggtttcctagactagagaagaagacaggaaccaggatgggaagacggacatgttacattttaagctggagcttcccctgcagtccacggagcacgttctcggtgtgcagctcatcctgactttctcctatcgattacacaggatggcgaccctcgtgatgcagagcatggcgtttctccagtcctcctttcctgtcccgggatcccagttatacgtgaacggagacctgaggctgcagcagaagcagccgctgagctgtggtggcctagatgcccgatacaacatatccgtgatcaacgggaccagcccctttgcctatgactacgacctcacccatattgttgctgcctaccaggagaggaacgttaccaccgtcctgaatgatcccaaccccatctggctggtgggcagggccgcagatgctccatttgtgattaatgctatcatccgataccctgtggaagtcatttcttatcagccaggattctgggagatggtaaagttcgcctgggtgcagtatgtcagcatcctgcttatcttcctctgggtgtttgaaagaatcaagatcttcgtgtttcagaatcaggtggtgaccaccattcctgtgacagtgacgccccggggagacttgtgtaaggagcacttatcctagaaaggccatttctgaagactcagcaggaccgtggctgcctcattgtcatcttctgggaacatcttaggaccttttgaaagagcccagcggacacctgcgggcttgtgtgcttttccctcagagacaacggttctttccggttttgctctacacagttccgtatcttcagagctcctgcagaattgtcagggactagtttgtggaaaggtctgagagttcctggaggctataattagctttttgggttttccttctttgccttagcgttgaatttcaggagaaaattgcagtcagttcagacatcttggaaagagtcccatctctggtcaagcagagacttttcctctgttgaactgaggaacacactgtgcatttctaccttctgttgtgagccactcttactcttttcagggctctcttgtgacaaacatgccaatcactagcactttgcacccctgggcttctccatttcccattcacagctttgatttccagagctgaggcctttaactggagacctggaggggcagggcccaagggcaagggccgcattagcacaggcaatcagggagggccgctgaaggacacttggaccgtccacctgccccagcccaacagtcagtcatctgtcatcagctcagctgagcagccctggatctttgccgtactgtgactgggctctttgccctatttttccctctgtctgtgcccctggatggcaggctgaagtcagaggggctgtttcattctcagccccctcagcagcactgggggaagaaagcattgtcacaacaggttctttctggccctcacccaacagcctgggcacttggccctcctcctccttgacagccctcccccttcctgcaaaggacaggggcgacaggggttggtgttgggattggctcccgctgcctgacaaccacaagtttatttggaaggctagcgggaagcccagcggctggcgtttcccttgactaaggaacagggtgcccatcagagtggggcgggcagctttgggaaggacacaagaagcagtaagagtgtaaagaggatgctggcctgggcaggccagtccagcctggccactagcagaataccaagcagtccagtggattaccctcgtggctaagcaagtgtctgcaggagcagagatggctggaaggggcctctgcacacggaagatggcttgttcagcccattcacctcctgaggatgtgggcagtctcctccaagaacacatggagctgcttcctgatcccaagcaggtcattgccactggaaggacatggccccggtgatccatgcttcatgcccacccagaaacacacccctcagtgtgtgcctcagtttactttggagatcagttgtcgtttttagtgctcctttaggcttactaaaacagttttggaaacaaagctattttgaagtattcaagcagaggaattccctaacactgacccccttgtctttttttaatattcaggctgttttatatgcctaaatttttttcttaagatctaaacgaaaaatagtttcttgtttaaattcacataaggcaatgagatatggaaagatgacaagatacgtataaacattggtttgcattttattaaattattctaatgcaaatcttgtataaagaacccatgatgttttgtaactttctaattaaaatgttcaaaatgaggccgagcatggtggttcattcctgtaatctcaacactttgggaggccaaggtgggaggatcacttgagcccaggagcttgaggctgcagtgtgctatgattgcaccactgtactgtagcctgggtgacagagtgagaccctatctgttaaaataaataaataaataaa

SEQ ID NO: 193995 - DNA, 922 bp, Homo sapiens
  Payload ID: 18319
  Gene Name: transmembrane protein 231
  ENST ID: ENST00000570006
  CDS Start-End: 25-606
gcggagtgcctgcgagcggtgctcatggcgctctatgagctcttctctcacccggtcgagcgcagttaccgcgcggggctctgctccaaagccgcgctgttcctgctgctggccgctgcgctcacgtacatcccgccgctgctggtggccttccggagccacgggttttggctgaagcggagcagctacgaggagcagccgaccgtgcgcttccaacaccaggtgctgctcgtggccctgctcggacccgaaagcgacgggttcctcgcctggagcacgttccccgccttcaaccggctgcaaggggatcgcctgcgcgtcccgctcgtttcgactagagaagaagacaggaaccaggatgggaagacggacatgttacattttaagctggagcttcccctgcagtccacggagcacgttctcgaggatggcgaccctcgtgatgcagagcatggcgtttctccagtcctcctttcctgtcccgggatcccagttatacgtgaacggagacctgaggctgcagcagaagcagccgctgagctgtggtggcctagatgcccgatacaacatatccgtgatcaacgggaccagcccctttgcctatgactacgacctcacccatattgttgctgcctaccaggagaggaacgttaccaccgtcctgaatgatcccaaccccatctggctggtgggcagggccgcagatgctccatttgtgattaatgctatcatccgataccctgtggaagtcatttcttatcagccaggattctgggagatggtaaagttcgcctgggtgcagtatgtcagcatcctgcttatcttcctctgggtgtttgaaagaatcaagatcttcgtgtttcagaatcaggtggtgaccaccattcctgtgacagtgacgccccggggagacttgtgtaag

SEQ ID NO: 193996 - DNA, 1078 bp, Homo sapiens
  Payload ID: 18319
  Gene Name: transmembrane protein 231
  ENST ID: ENST00000565067
  CDS Start-End: 32-838
ccggctcgcggagtgcctgcgagcggtgctcatggcgctctatgagctcttctctcacccggtcgagcgcagttaccgcgcggggctctgctccaaagccgcgctgttcctgctgctggccgctgcgctcacgtacatcccgccgctgctggtggccttccggagccacgggttttggctgaagcggagcagctacgaggagcagccgaccgtgcgcttccaacaccaggtgctgctcgtggccctgctcggacccgaaagcgacgggttcctcgcctggagcacgttccccgccttcaaccggctgcaaggggatcgcctgcgcgtcccgctcgtttcgactagagaagaagacaggaaccaggatgggaagacggacatgttacattttaagctggagcttcccctgcagtccacggagcacgttctcggtgtgcagctcatcctgactttctcctatcgattacacatatccgtgatcaacgggaccagcccctttgcctatgactacgacctcacccatattgttgctgcctaccaggagaggaacgttaccaccgtcctgaatgatcccaaccccatctggctggtgggcagggccgcagatgctccatttgtgattaatgctatcatccgataccctgtggaagtcatttcttatcagccaggattctgggagatggtaaagttcgcctgggtgcagtatgtcagcatcctgcttatcttcctctgggtgtttgaaagaatcaagatcttcgtgtttcagaatcaggtggtgaccaccattcctgtgacagtgacgccccggggagacttgtgtaaggagcacttatcctagaaaggccatttctgaagactcagcaggaccgtggctgcctcattgtcatcttctgggaacatcttaggaccttttgaaagagcccagcggacacctgcgggcttgtgtgcttttccctcagagacaacggttctttccggttttgctctacacagttccgtatcttcagagctcctgcagaattgtcagggactagtttgtggaaaggtctgagagttcctggaggctataattagcttt

SEQ ID NO: 193997 - DNA, 2920 bp, Homo sapiens
  Payload ID: 18319
  Gene Name: transmembrane protein 231
  Uniprot ID: Q9H6L2
  ENST ID: ENST00000568377
  CDS Start-End: 40-1077
ggctcgcggagtgcctgcgagcggtgctcatggcgctctatgagctcttctctcacccggtcgagcgcagttaccgcgcggggctctgctccaaagccgcgctgttcctgctgctggccgctgcgctcacgtacatcccgccgctgctggtggccttccggagccacggtgagcctgccccggccgctgtgccacgaggctccccgggcgcgctcggccagggccggcctccctaaccgcctccctaccgccctctttaactcagggttttggctgaagcggagcagctacgaggagcagccgaccgtgcgcttccaacaccaggtgctgctcgtggccctgctcggacccgaaagcgacgggttcctcgcctggagcacgttccccgccttcaaccggctgcaaggggatcgcctgcgcgtcccgctcgtttcgactagagaagaagacaggaaccaggatgggaagacggacatgttacattttaagctggagcttcccctgcagtccacggagcacgttctcggtgtgcagctcatcctgactttctcctatcgattacacaggatggcgaccctcgtgatgcagagcatggcgtttctccagtcctcctttcctgtcccgggatcccagttatacgtgaacggagacctgaggctgcagcagaagcagccgctgagctgtggtggcctagatgcccgatacaacatatccgtgatcaacgggaccagcccctttgcctatgactacgacctcacccatattgttgctgcctaccaggagaggaacgttaccaccgtcctgaatgatcccaaccccatctggctggtgggcagggccgcagatgctccatttgtgattaatgctatcatccgataccctgtggaagtcatttcttatcagccaggattctgggagatggtaaagttcgcctgggtgcagtatgtcagcatcctgcttatcttcctctgggtgtttgaaagaatcaagatcttcgtgtttcagaatcaggtggtgaccaccattcctgtgacagtgacgccccggggagacttgtgtaaggagcacttatcctagaaaggccatttctgaagactcagcaggaccgtggctgcctcattgtcatcttctgggaacatcttaggaccttttgaaagagcccagcggacacctgcgggcttgtgtgcttttccctcagagacaacggttctttccggttttgctctacacagttccgtatcttcagagctcctgcagaattgtcagggactagtttgtggaaaggtctgagagttcctggaggctataattagctttttgggttttccttctttgccttagcgttgaatttcaggagaaaattgcagtcagttcagacatcttggaaagagtcccatctctggtcaagcagagacttttcctctgttgaactgaggaacacactgtgcatttctaccttctgttgtgagccactcttactcttttcagggctctcttgtgacaaacatgccaatcactagcactttgcacccctgggcttctccatttcccattcacagctttgatttccagagctgaggcctttaactggagacctggaggggcagggcccaagggcaagggccgcattagcacaggcaatcagggagggccgctgaaggacacttggaccgtccacctgccccagcccaacagtcagtcatctgtcatcagctcagctgagcagccctggatctttgccgtactgtgactgggctctttgccctatttttccctctgtctgtgcccctggatggcaggctgaagtcagaggggctgtttcattctcagccccctcagcagcactgggggaagaaagcattgtcacaacaggttctttctggccctcacccaacagcctgggcacttggccctcctcctccttgacagccctcccccttcctgcaaaggacaggggcgacaggggttggtgttgggattggctcccgctgcctgacaaccacaagtttatttggaaggctagcgggaagcccagcggctggcgtttcccttgactaaggaacagggtgcccatcagagtggggcgggcagctttgggaaggacacaagaagcagtaagagtgtaaagaggatgctggcctgggcaggccagtccagcctggccactagcagaataccaagcagtccagtggattaccctcgtggctaagcaagtgtctgcaggagcagagatggctggaaggggcctctgcacacggaagatggcttgttcagcccattcacctcctgaggatgtgggcagtctcctccaagaacacatggagctgcttcctgatcccaagcaggtcattgccactggaaggacatggccccggtgatccatgcttcatgcccacccagaaacacacccctcagtgtgtgcctcagtttactttggagatcagttgtcgtttttagtgctcctttaggcttactaaaacagttttggaaacaaagctattttgaagtattcaagcagaggaattccctaacactgacccccttgtctttttttaatattcaggctgttttatatgcctaaatttttttcttaagatctaaacgaaaaatagtttcttgtttaaattcacataaggcaatgagatatggaaagatgacaagatacgtataaacattggtttgcattttattaaattattctaatgcaaatcttgtataaagaacccatgatgttttgtaactttctaattaaaatgttcaaaatgaggccgagcatggtggttcattcctgtaatctcaacactttgggaggccaaggtgggaggatcacttgagcccaggagcttgaggctgcagtgtgctatgattgcaccactgtactgtagcctgggtgacagagtgagaccctatctgttaaaat

SEQ ID NO: 193998 - DNA, 1003 bp, Homo sapiens
  Payload ID: 18319
  Gene Name: transmembrane protein 231
  ENST ID: ENST00000615437
  CDS Start-End: 1-164
tccaacaccaggtgctgctcgtggccctgctcggacccgaaagcgacgggttcctcgcctggagcacgttccccgccttcaaccggctgcaaggggatcgcctgcgcgtcccgctcgtttcggtgcgtggttcccgcctgggcctggggcagagtcggggatagggtggggatggggactggaatgaggatgtggggcgagcggccccggccctggggagcccagctttgatcctaaggactcgcgaacccgcaaaggtggcgtttcatctcctaggacctagggaatcgatcttctgtttcattctgcttctcccagatgtccccggcccccagaaagttagccatgctgtcagcgtgtgcgccctgacacagagtccagaagtgtgggggcagcctgtgtctgcccgggtcacacccgcgggcctggcctgatggagggtgtttgtgaaagtccatttaggagcctggaaggccgcgcgctgttaatgtagataaccccattctgtcgcggcgtttctgcatcacaccactataggaacggaaagggcagcatttttatgcagacctgacccctggaaaccaaggcgctgattggttaagcggccttcccagaacgcgctgtggccgagtcacgcctccctgggtttgtcccattggagactgcgccatcctgaagctgtcgggatgaaatggaagcatgttactgtctgtaatttatttatttatttttaaattttttcaccagtagagcgctgagaggaatctgtaatttagtatttgctttgagataagcgaatgcttcctttgtagtcactccttttcactcattttctgaaaacgttttcctttagaagtatgaaacttctggttttccttctttcaaattcgaatctcttcagacatatctaagatgattgccctacaagccaaccttgtatagctgaggagaaaagaaaatcagacttgttcccagcaactaaataaaattgtttttaaaaatc

SEQ ID NO: 193999 - DNA, 2501 bp, Homo sapiens
  Payload ID: 18320
  Gene Name: transmembrane protein 232
  Uniprot ID: C9JQI7
  ENST ID: ENST00000455884
  CDS Start-End: 52-2025
agcaaccagccttggttcccagcggctcagagcgcagcgaatttatgatttatgaatatgcctgttaacaaatcacctatgattaatacatgtggaggcatatcttccccttatcatgaagagctctggaaattaaattttcaacatttaagtggagaaaggggtcataaatcaaggccaacattttcaatcacaaaagaattcatcttgagattcaatcaaacacaaaattccaaagagaaggaagaattgttggaactagctagaaaaatcattctcagatgtaagagaaaattgggtctcaaaaccctgggctctggaaggcatgtgcatcttcctgctgcatggactgaagtaatatatctggctcaatgcaaaggggaaatccaagatgaatctttaaatatgctttatgcatctctggaccatgcttcctttgattatgatcatctgcctgccttattttttgttgcggaatcggttttatacagactgtgttgtgatgcatccctcaaaacatatttatattcagttgaaataaagctagcaaagattggctatttggtcttcttacgactttttatatttttcctgcatggtcatctagaaagttttaaacaacatttacttaggcttcaaccatatttatacgcactttctttctctggagcatcatatcacaagtatccaaacatcttttcaaatgtgcaattcatcctgaaagcctcggaaattataggtaaaagagaactccgttctgaatccatttttagacctgtggaagataagaaaagatatgagaacacagattctgatatgggaggatatgaaattaaccacctgctctggcactgtgttgctgcttggtcttgtgttcagaataacagtcctcagttgaataacgtgcttgaacatctcgtcttccataagacacagcttcaaaagaaatgctggttggattcagtactggctttactggtccttggggaggctgccaaattaaacatggcctgcttgaaagctttaatggacgtagtgagagattttgtttcaagcattatgtctgttcaaaatcaggaagaaagttgcaaggtagatgatttttcctgggcctggaatgtagtctacatatatacagtaattcttgcagaaatctgcttgtatgcagccacttctgatttgcgaaaaactgctttaattggtttctgtcactgtaaaagttcacaaaaaaatattttatacttggacaaatcagtacctccagaattaaaggaaacaagtattttaagtcttttggaatatttctcttcaaaaatgtcagagaactgtgatcaagtagtctggactggttactatggcttagtgtataacctggtgaaaatttcatgggaacttcaaggagacgaagaacaggatggacttagaaacatgatatggcaaacattgcagaaaacaaaggattatgaggaagatgtacgaatccaaaatgcaatcaatatagctcaggctgagttaaatgacccaactgatcctttcactagatatagtacaaatatttcatcaaatgtaggagaagaagttttctccaaatatattgggtggagaattgccaacactctttccaaactattctttccccccattgaggcccattttcttcctttgaagaaaccatcaataaaaaaggatcaaacaaaatatccaaataaaaagctggagtctgtgaaaaagcaagttctacatttcactgtaagggaacatccttctgtatcagaaattcccatgtttccatatccagatttcttcaccaaggcagataaagagttggcaaaaatcattgaccatcactggcaggaagagctaaagatccgagaaaaagaagatgcaatatgcaaggcccaagaacttaaagataaaaagttagcagagaaaaatcactttcaagaagttatgaagaaaagagaagagaaactacataagcaaaccaagccctatgaacttccttataggaaggaagtaatttaattagaaaagaaaatgtcacctcccaaaattgaggactacatggcagaaatacataggatgaaaaataccaagatagctacatagtaagagaactttcttgtcattaaatggaggtattgtttagaaagaatttgttttcctgatacaagctgtttgtttaatagttatttcttagttctaaattaatgaccaacttttaatcacacttgaatgaagtgatttcactagtcaaaaatttccaagactacatctagtatttttctcaattgacctttatctcatgattgtacagcatacttgataactgattctcagaacattgatattcatcaaacaaacagtttgatggaaattcattacaaattaattaatgggtcaccagataagaattatttcttgaaaacagaatgaacataaactaacaatcctgtaattactattattcaaataaaaacagtatggcatcttatttgatt

SEQ ID NO: 194000 - DNA, 1024 bp, Homo sapiens
  Payload ID: 18320
  Gene Name: transmembrane protein 232
  ENST ID: ENST00000515278
  CDS Start-End: 533-1024
atagcctcttccggcaaccattaaagggcacggttgctagggagacgcggcggtaacctggaccttaaaagtttgttgtcgttagggaataggtgggaatatggttgtgggattaatgaaacacagtaccaaagagattccagaaagagaactggtgtaggaatagggcctgcatgggaggagttcaaagatgcttcttggagggagccgataacccgcgggtggagcctacccgagacagggcatcactgtgttgccaaggctggtcttgaactggctcaagcaatctgcccacctcggtctcccaaagtgctgggattacaggagtgagccactgcgccctgcctgaaattgaacacaaatgtggtggagacgggacagggcaggtggaaattcacttataagtcctgattggctaagccctggtcacgagaccgtaaaagagcaacgtctgtctcagagcgactcccacagcgtccttagcaaccagccttggttcccagcggctcagagcgcagcgaatttatgatttatgaatatgcctgttaacaaatcacctatgattaatacatgtggaggcatatcttccccttatcatgaagagctctggaaattaaattttcaacatttaagtggagaaaggggtcataaatcaaggccaacattttcaatcacaaaagaattcatcttgagattcaatcaaacacaaaattccaaagagaaggaagaattgttggaactagctagaaaaatcattctcagatgtaagagaaaattgggtctcaaaaccctgggctctggaaggcatgtgcatcttcctgctgcatggactgaagtaatatatctggctcaatgcaaaggggaaatccaagatgaatctttaaatatgctttatgcatctctggaccatgcttcctttgattatgatcatctgcctgccttattttttgttgcggaatcggttttatacagactgtgttgtgatgcatccctcaaaacatatttatattcagttgaaataaag

SEQ ID NO: 194001 - DNA, 822 bp, Homo sapiens
  Payload ID: 18320
  Gene Name: transmembrane protein 232
  ENST ID: ENST00000511883
  CDS Start-End: 80-822
agccttggttcccagcggctcagagcgcagcggaactctatgaggaaataccattctcattttacagaatttatgatttatgaatatgcctgttaacaaatcacctatgattaatacatgtggaggcatatcttccccttatcatgaagagctctggaaattaaattttcaacatttaagtggagaaaggggtcataaatcaaggccaacattttcaatcacaaaagaattcatcttgagattcaatcaaacacaaaattccaaagagaaggaagaattgttggaactagctagaaaaatcattctcagatgtaagagaaaattgggtctcaaaaccctgggctctggaaggcatgtgcatcttcctgctgcatggactgaagtaatatatctggctcaatgcaaaggggaaatccaagatgaatctttaaatatgctttatgcatctctggaccatgcttcctttgattatgatcatctgcctgccttattttttgttgcggaatcggttttatacagactgtgttgtgatgcatccctcaaaacatatttatattcagttgaaataaagctagcaaagattggctatttggtcttcttacgactttttatatttttcctgcatggtcatctagaaagttttaaacaacatttacttaggcttcaaccatatttatacgcactttctttctctggagcatcatatcacaagtatccaaacatcttttcaaatgtgcaattcatcctgaaagcctcggaaattataggtaaaagagaactccgttctgaatccatttttagacctgtggaagataagaaaag

SEQ ID NO: 194002 - DNA, 582 bp, Homo sapiens
  Payload ID: 18320
  Gene Name: transmembrane protein 232
  ENST ID: ENST00000512886
  CDS Start-End: 225-582
agatgcgaaccttgattgagagtgataatcaactttgttttgattgaactgacatttttttctgtggttttatcactttttattttttatgggtgtataagacagggcatcactgtgttgccaaggctggtcttgaactggctcaagcaatctgcccacctcggtctcccaaagtgctgggattacaggagtgagccactgcgccctgcctgaatttatgatttatgaatatgcctgttaacaaatcacctatgattaatacatgtggaggcatatcttccccttatcatgaagagctctggaaattaaattttcaacatttaagtggagaaaggggtcataaatcaaggccaacattttcaatcacaaaagaattcatcttgagattcaatcaaacacaaaattccaaagagaaggaagaattgttggaactagctagaaaaatcattctcagatgtaagagaaaattgggtctcaaaaccctgggctctggaaggcatgtgcatcttcctgctgcatggactgaagtaatatatctggctcaatgcaaaggggaaatccaagatggtacgtactttaaat

SEQ ID NO: 194003 - DNA, 1974 bp, Homo sapiens
  Payload ID: 18320
  Gene Name: transmembrane protein 232
  ENST ID: ENST00000512003
  CDS Start-End: 58-237
gtccttagcaaccagccttggttcccagcggctcagagcgcagcgaatttatgatttatgaatatgcctgttaacaaatcacctatgattaatacatgtggaggcatatcttccccttatcatgaagagctctggaaattaaattttcaacatttaagtggagaaaggggtcataaatcaagattggctatttggtcttcttacgactttttatatttttcctgcatggtcatctagaaagttttaaacaacatttacttaggcttcaaccatatttatacgcactttctttctctggagcatcatatcacaagtatccaaacatcttttcaaatgtgcaattcatcctgaaagcctcggaaattataggtaaaagagaactccgttctgaatccatttttagacctgtggaagataagaaaagatatgagaacacagattctgatatgggaggatatgaaattaaccacctgctctggcactgtgttgctgcttggtcttgtgttcagaataacagtcctcagttgaataacgtgcttgaacatctcgtcttccataagacacagcttcaaaagaaatgctggagcctattgaggcaaatcctgtgctttacctagagagaaacttcactttgagaagctctgcacaaatactatggctgctggtctacattttttcaaggttggattcagtactggctttactggtccttggggaggctgccaaattaaacatggcctgcttgaaagctttaatggacgtagtgagagattttgtttcaagcattatgtctgttcaaaatcaggaagaaagttgcaaggtagatgatttttcctgggcctggaatgtagtctacatatatacagtaattcttgcagaaatctgcttgtatgcagccacttctgatttgcgaaaaactgctttaattggtttctgtcactgtaaaagttcacaaaaaaatattttatacttggacaaatcagtacctccagaattaaaggaaacaagtattttaagtcttttggaatatttctcttcaaaaatgtcagagaactgtgatcaagtagtctggactggttactatggcttagtgtataacctggtgaaaatttcatgggaacttcaaggagacgaagaacaggatggacttagaaacatgatatggcaaacattgcagaaaacaaaggattatgaggaagatgtacgaatccaaaatgcaatcaatatagctcagggaacatccttctgtatcagaaattcccatgtttccatatccagatttcttcaccaaggcagataaagagttggcaaaaatcattgaccatcactggcaggaagagctaaagatccgagaaaaagaagatgcaatatgcaaggcccaagaacttaaagataaaaagttagcagagaaaaatcactttcaagaagttatgaagaaaagagaagagaaactacataagcaaaccaagccctatgaacttccttataggaaggaagtaatttaattagaaaagaaaatgtcacctcccaaaattgaggactacatggcagaaatacataggatgaaaaataccaagatagctacatagtaagagaactttcttgtcattaaatggaggtattgtttagaaagaatttgttttcctgatacaagctgtttgtttaatagttatttcttagttctaaattaatgaccaacttttaatcacacttgaatgaagtgatttcactagtcaaaaatttccaagactacatctagtatttttctcaattgacctttatctcatgattgtacagcatacttgataactgattctcagaacattgatattcatcaaacaaacagtttgatggaaattcattacaaattaattaatgggtcaccagataagaattatttcttgaaaacagaatgaacataaactaacaatcctgtaattactattattcaaataaaaacagtatggcatctta

SEQ ID NO: 194004 - DNA, 3081 bp, Homo sapiens
  Payload ID: 18321
  Gene Name: transmembrane protein 233
  Uniprot ID: B4DJY2
  ENST ID: ENST00000426426
  CDS Start-End: 391-720
aatttggaacttaatgggcctttgcgtcctccttccctgagcctccttttattccagacttctcagtgtgagtctgtgcgtccctccgacgatctcagggagtggggtgccttcatctgcctgttccctgttcctcaggctgacgctcccgctgtcctccccgcctcccctcactccttttctccctcccttcctccttgtggggaggctcttggccagggtccctgagcccgggcgggtgctggcagaggacgcagaaggggtgaggtcacgtctcccttgagccccgagccgctggcttttcagagcctcgccacaagccggcggccagagccccagaccacacagaccgtgcgctcctccgccctcccggcgccgccggcctcgcccatgtctcagtacgcccctagcccggacttcaagagggctttggacagcagtcccgaggccaacactgaagatgacaagaccgaggaggacgtgcccatgcccaagaactacctgtggctcaccatcgtctcgtgtttttgccctgcgtaccccatcaacatcgtggctttggtcttttccatcatgtctctgaacagctacaacgatggagactacgaaggagccaggcggcttgggcggaatgctaagtgggtagccatcgcctccatcatcattggccttctcatcatcggcatttcttgtgcagttcacttcacaaggaatgcctgaggaaccagcggtcagtgggctgtgagcgtggaggatggacctcatccacacacaccccaaaggagtttctaaggaatggatccttgacttcagactgtgagatcttttcctccaggactctccagaggcaggtccctggcaaatgaacaagaaaaaaaaaaaaaaaaagtccaaaatttaggcaatccaagctgcacagccggatcagccaaagtcattgatttgtaaaaatgaaaagaaaacagaaaaaagaaaaatgaagtctcactgtctcagtttagcgaatcccgttgtgtccactcctgtcctccagaggcgagcctcaggaaatcacataacttttcactgaggggatccagggggtctccatatagggggagatggaggtttctaggaagagcagcaggtgctggtatttacaatgttgagcacaaacatttgcagcatgtttaaaattgtctagtagagttcaagttgtggatttgcttttccttttattcttataaccttcagtaactcctcctctgggagtcagcactcccatgcccagagttcacccatctggtcatcaaacactcaaagaaggggcttttctggccttttgtcttgatgcttatatttccaaataggccccctcccttgcttgcatccacgttggtcaacttgaccaaaacctcactcttcactcaaacaggctctgagaatggacttagtggccaattctaggtacatgagcacttcctgtatcccagttttgggaataaactggctgtatttatagaatgtgctttttttttttcaatttctcactctctctcctatctctagcaagtctcaggcaagatctttgattttcctggatgccacctggaaatgccacccattgtgtttcttttctgtcaaatgtaaaccctttagatgtgaatgtactggtttaatgatgccattattctgcctgccagaacgcagtaacccagtgtctcacagagcacaaggggtgtgccactggtggtacacaagataatttttaagtagtttctaggaacaacattaagtaataccaaatcacaaagaatgtttccccttttctattcttttttcatcctgattacagcaaggaaaaagtctctgtttagtgctagcaggtcctttacacctttcagacactatggctcttttccctttttagcaaagaaagagcaggcctcagagtcttctgtctagatagaatttaatgatattgttttgtgtcatggtatttattttatttattaccttccatttacagcttcccacagtgggggatgtgacatattgtttctgttcaaataaattaagaaaaacaagagaactcaagaaaatatcaagtaattaacacaccagataagtatatgtggcaaaagtcacttcaaagaattaatgtcagaaagatggtgataatgaagcaaaagaaaggcagattatgctggccgggcgtggtggctcacgcctgtaatcccagcaatttgagaggctgagatcacttaaggtcaggagtttgagaccagcctgaccaacatggtgaaactccatctctactaaaaatacaaaaattagccaggcgtggtggtgcatgcctgtaatcccagctaatagagaggctgaggcaggagaatcacttgaatccagaaggcggaggttgccgtgagctgagactgtgccactacactccagcccggggtgacagagcaagactccatctcaaaaaaaaaagaaaagaaaacgaaagaaaaagaaaaaagaaaggcagattattctaattgaatgaataagaggctgagagtcaatacctagttccaacgcccttttgtttttgcagggtttttattggccactaactagctatgcaagctgattttaggcaagtttcatagcctctctgtgcctaaaattccttcacctgcaaaatggggataagaatgcctgcctacttacctcacagtgctgttatgagaattaattgttgtaatagttgtgactaaccattggcggggagaattctaagtactataccaatacaaatttcagcattttttcatatactgaaccctagcaaaaaaaaaaaaaattctgatgaacatcagattcaacctgtcattttacccggatgttgtgatgagccagcacttgtcccaggaggacgttgaatcagggacacgaaatctcagcacacagagattctagcatcattccaatagattggaccctgatttctgtttctgacatcctgttttttgtttgtgcgtgtttgggtccctggtcttttacccaaatcaaatgaaaagtgttgctcagaggcagaataaaaatggttttaagtaa

SEQ ID NO: 194005 - DNA, 1082 bp, Homo sapiens
  Payload ID: 18322
  Gene Name: transmembrane protein 234
  Uniprot ID: Q8WY98
  ENST ID: ENST00000309777
  CDS Start-End: 4-426
gccatggcggcgtctctggggcaggtgttggctctggtgctggtggccgctctgtggggtggcacgcagccgctgctgaagcgggcctccgccggcctgcagcgggttcatgagccgacctgggcccagcagttgctacaggagatgaagaccctcttcttgaatactgagtacctgatgccctttctcctcaaccagtgtggatcccttctctattacctcaccttggcatcgacagatctgaccctggctgtgcccatctgtaactctctggctatcatcttcacactgattgttgggaaggcccttggagaagatattggtggaaaacgagcagttgctggcatggtgctcaccgtgataggaatttcactctgcatcacaagctcagtgagtaagacccaggggcaacagtctaccctttgagtgggccgaacccacttccagctctgctgcctccaggaagcccctgggccatgaagtgctggcagtgagcggatggacctagcacttcccctctctggccttagcttcctcctctcttatggggataacagctacctcatggatcacaataagagaacaagagtgaaagagttttgtaaccttcaagtgctgttcagctgcggggatttagcacaggagactctacgctcaccctcagcaacctttctgccccagcagctctcttcctgctaacatctcaggctcccagcccagccaccattactgtggcctgatctggactatcatggtggcaggttccatggactgcagaactccagctgcatggaaagggccagctgcagactttgagccagaaatgcaaacgggaggcctctgggactcagtcagagcgctttggctgaatgaggggtggaaccgagggaagaaggtgcgtcggagtggcagatgcaggaaatgagctgtctattagccttgcctgccccacccatgaggtaggcagaaatcctcactgccagcccctcttaaacaggtagagagctgtgagccccagccccacctgactccagcacacctggcgagtagtagctgtcaataaatctatggtaaacagacaa

SEQ ID NO: 194006 - DNA, 721 bp, Homo sapiens
  Payload ID: 18322
  Gene Name: transmembrane protein 234
  Uniprot ID: Q8WY98
  ENST ID: ENST00000344461
  CDS Start-End: 17-511
agacagcggcgttgccatggcggcgtctctggggcaggtgttggctctggtgctggtggccgctctgtggggtggcacgcagccgctgctgaagcgggcctccgccggcctgcagcgggttcatgagccgacctgggcccagcagttgctacaggagatgaagaccctcttcttgaatactgagtacctgatgccctttctcctcaaccagtgtggatcccttctctattacctcaccttggcatcgacagatctgaccctggctgtgcccatctgtaactctctggctatcatcttcacactgattgttgggaaggcccttggagaagatattggtggaaaacgagcagttgctggcatggtgctcaccgtgataggaatttcactctgcatcacaagctcagttccatggactgcagaactccagctgcatggaaagggccagctgcagactttgagccagaaatgcaaacgggaggcctctgggactcagtcagagcgctttggctgaatgaggggtggaaccgagggaagaaggtgcgtcggagtggcagatgcaggaaatgagctgtctattagccttgcctgccccacccatgaggtaggcagaaatcctcactgccagcccctcttaaacaggtagagagctgtgagccccagccccacctgactccagcacacctggcgagtagtagctgtcaataaatctatggtaaacaga

SEQ ID NO: 194007 - DNA, 1411 bp, Homo sapiens
  Payload ID: 18322
  Gene Name: transmembrane protein 234
  Uniprot ID: Q8WY98
  ENST ID: ENST00000373593
  CDS Start-End: 22-564
gtagaagacagcggcgttgccatggcggcgtctctggggcaggtgttggctctggtgctggtggccgctctgtggggtggcacgcagccgctgctgaagcgggcctccgccggcctgcagcgggttcatgagccgacctgggcccagcagttgctacaggagatgaagaccctcttcttgaatactgagtacctgatgccctttctcctcaaccagtgtggatcccttctctattacctcaccttggcatcgacagatctgaccctggctgtgcccatctgtaactctctggctatcatcttcacactgattgttgggaaggcccttggagaagatattggtggaaaacgtaagttagactactgcgagtgcgggacgcagctctgtggatctcgacatacctgtgttagttccttcccagaacccatctccccagagtgggtgaggacacggccttttcccatcctgccctttcctctgcagctgttttgcttccttgtggccatcagagttcccttcccctggacagtctggagaaagacagaggctggggtttgggattgaagaccagaccccatctgagcccttcctccagccctgtaccagctcctactggcatggctgagctcagaccctcctgatttctgcctattatcccaggagcagttgctggcatggtgctcaccgtgataggaatttcactctgcatcacaagctcagtgagtaagacccaggggcaacagtctaccctttgagtgggccgaacccacttccagctctgctgcctccaggaagcccctgggccatgaagtgctggcagtgagcggatggacctagcacttcccctctctggccttagcttcctcctctcttatggggataacagctacctcatggatcacaataagagaacaagagtgaaagagttttgtaaccttcaagtgctgttcagctgcggggatttagcacaggagactctacgctcaccctcagcaacctttctgccccagcagctctcttcctgctaacatctcaggctcccagcccagccaccattactgtggcctgatctggactatcatggtggcaggttccatggactgcagaactccagctgcatggaaagggccagctgcagactttgagccagaaatgcaaacgggaggcctctgggactcagtcagagcgctttggctgaatgaggggtggaaccgagggaagaaggtgcgtcggagtggcagatgcaggaaatgagctgtctattagccttgcctgccccacccatgaggtaggcagaaatcctcactgccagcccctcttaaacaggtagagagctgtgagccccagccccacctgactccagcacacctggcgagtagtagctgtcaataaatctatggtaaacagacaa

SEQ ID NO: 194008 - DNA, 737 bp, Homo sapiens
  Payload ID: 18322
  Gene Name: transmembrane protein 234
  ENST ID: ENST00000484490
  CDS Start-End: 38-241
cccttcgttcccggaagtagaagacagcggcgttgccatggcggcgtctctggatctgaccctggctgtgcccatctgtaactctctggctatcatcttcacactgattgttgggaaggcccttggagaagatattggtggaaaacgagcagttgctggcatggtgctcaccgtgataggaatttcactctgcatcacaagctcagtgagtaagacccaggggcaacagtctaccctttgagtgggccgaacccacttccagctctgctgcctccaggaagcccctgggccatgaagtgctggcagtgagcggatggacctagcacttcccctctctggccttagcttcctcctctcttatggggataacagctacctcatggatcacaataagagaacaagagtgaaagagttttgtaaccttcaagtgctgttcagctgcggggatttagcacaggagactctacgctcaccctcagcaacctttctgccccagcagctctcttcctgctaacatctcaggctcccagcccagccaccattactgtggcctgatctggactatcatggtggcaggttccatggactgcagaactccagctgcatggaaagggccagctgcagactttgagccagaaatgcaaacgggaggcctctgggactcagtcagagcgctttggctgaatgaggggtggaaccgagggaagaaggtgcgtcggagtggcagatgcaggaaa

SEQ ID NO: 194009 - DNA, 1866 bp, Homo sapiens
  Payload ID: 18322
  Gene Name: transmembrane protein 234
  Uniprot ID: Q8WY98
  ENST ID: ENST00000461402
  CDS Start-End: 26-520
ggaagtagaagacagcggcgttgccatggcggcgtctctggggcaggtgttggctctggtgctggtggccgctctgtggggtggcacgcagccgctgctgaagcgggcctccgccggcctgcagcgggttcatgagccgacctgggcccagcagttgctacaggagatgaagaccctcttcttgaatactgagtacctgatgccctttctcctcaaccagtgtggatcccttctctattacctcaccttggcatcgacagatctgaccctggctgtgcccatctgtaactctctggctatcatcttcacactgattgttgggaaggcccttggagaagatattggtggaaaacgagcagttgctggcatggtgctcaccgtgataggaatttcactctgcatcacaagctcagttccatggactgcagaactccagctgcatggaaagggccagctgcagactttgagccagaaatgcaaacgggaggcctctgggactcagtcagagcgctttggctgaatgaggggtggaaccgagggaagaaggtagagagctgtgagccccagccccacctgactccagcacacctggcgagtagtagctgtcaataaatctatggtaaacagacaagaggaggtggaaggccatacagaatggagccgtgagtatggccagcctccagctctcagccaggaggtccccaaccccaaggaaggaagaaactggaaattaggaactgcttcctcatttaacaaggtaggaagttaggagatcatttactttcaatcacaagggaggagaactgttcctggggcccaaggctgccagtttccagctcagagctcctcccaccccaacatactgtttcctgatccaacagcttacctgatccaagggctcctctgtctgagtgtcttcatcatctgctacttccagggcccccgctgtctccttccttcggtggggagctccatatactcctataactcctaaagaggggaggcagcactgggtgatgcccaggctgaagagccctcagcattcctgccctggaccttcatgctagcccctttccctcccctgaacctggttctgcattccccaccacctcccaggatggcaaggaagtgagaggtgggcctttggtcccacccccatcccctctatatcccacccctgaagtcttatcgctttaagcactgccctttccaggtgcttcttttcatgtgatgaggccctgtgaagaagggacaggatatacagacgggggcagctggagacagttatgatgagtgccggctttgtgtctgagcattctgctcccatggacatccccaacaacagcagggaccaacctatgtcactgtcaaagggcagctgagaagggcctgagccccagggacccctcacctgatgggaatgagagtgtggggagcttgcttcttggctgaatggtctgctggggtctggcatagaaagcagatggcttaattcggtctggttcctttggagagggctgggttacctgggccctgtggccttgggcctagagaagggacactgggcttggaccctgattgctggccattcttacctttcctactccccagttcaggcttcagagagcccctgacgcctgcaggaacatggcagaggagacaccgtctgtcttcacaaagtacgtcctccctccttgctgcctcttcccaccagcctgacttatccagggacagagcagtagatgcctggcactcctcgatgcccagtgaaaccagactgtgcttccccacccccaccaccatgccccatgctcactggctcatttcttgggagggcttagagctggataatataagttcccttgg

SEQ ID NO: 194010 - DNA, 969 bp, Homo sapiens
  Payload ID: 18322
  Gene Name: transmembrane protein 234
  Uniprot ID: Q8WY98
  ENST ID: ENST00000483001
  CDS Start-End: 14-508
cagcggcgttgccatggcggcgtctctggggcaggtgttggctctggtgctggtggccgctctgtggggtggcacgcagccgctgctgaagcgggcctccgccggcctgcagcgggttcatgagccgacctgggcccagcagttgctacaggagatgaagaccctcttcttgaatactgagtacctgatgccctttctcctcaaccagtgtggatcccttctctattacctcaccttggcatcgacagatctgaccctggctgtgcccatctgtaactctctggctatcatcttcacactgattgttgggaaggcccttggagaagatattggtggaaaacgagcagttgctggcatggtgctcaccgtgataggaatttcactctgcatcacaagctcagttccatggactgcagaactccagctgcatggaaagggccagctgcagactttgagccagaaatgcaaacgggaggcctctgggactcagtcagagcgctttggctgaatgaggggtggaaccgagggaagaaggtagagagctgtgagccccagccccacctgactccagcacacctggcgagtagtagctgtcaataaatctatggtaaacagacaagaggttagtaagtattcttttattgtgacaaaccctctcccaggcttagtcagctactcctttctctggccagagaatcccataaggaaatagcccccacagccagggctgctctgctcagaggaagggaaggctgggctgtgggtttaggagcaggagaacggggagggctgaggaggccgcagtgtaccctgtgagcccagcggaggtgctggctcctgaggaacaagctgctggaggctaaggacaaaaggtggccagagtagtggtccccagttgccctctggagctgctggctctcaagatggcagagctggggctgaggctgagatagcagccccagccccagg

SEQ ID NO: 194011 - DNA, 1538 bp, Homo sapiens
  Payload ID: 18322
  Gene Name: transmembrane protein 234
  Uniprot ID: Q8WY98
  ENST ID: ENST00000491434
  CDS Start-End: 12-302
gcggcgttgccatggcggcgtctctggggcaggtgttggctctggtgctggtggccgctctgtggggtggcacgcagccgctgctgaagcgggcctccgccggcctgcagcgggttcatgagccgacctgggcccagcagttgctacaggagatgaagaccctcttcttgaatactgagtacctgatgccctttctcctcaaccagtgtggatcccttctctattacctcaccttggcatcgacaggctggtcccagacctcagagttcaggtcttcatgctggaatcctgggaagcactgaacgtggagtcaggagatgtgggtttgagtcctgagatttgctgtgacttcatctggaagatggggttttgataccttttttaaagatctgaccctggctgtgcccatctgtaactctctggctatcatcttcacactgattgttgggaaggcccttggagaagatattggtggaaaacgagcagttgctggcatggtgctcaccgtgataggaatttcactctgcatcacaagctcagttccatggactgcagaactccagctgcatggaaagggccagctgcagactttgagccagaaatgcaaacgggaggcctctgggactcagtcagagcgctttggctgaatgaggggtggaaccgagggaagaaggtagagagctgtgagccccagccccacctgactccagcacacctggcgagtagtagctgtcaataaatctatggtaaacagacaagaggaggtggaaggccatacagaatggagccgtgagtatggccagcctccagctctcagccaggaggtccccaaccccaaggaaggaagaaactggaaattaggaactgcttcctcatttaacaaggtgcttcttttcatgtgatgaggccctgtgaagaagggacaggatatacagacgggggcagctggagacagttatgatgagtgccggctttgtgtctgagcattctgctcccatggacatccccaacaacagcagggaccaacctatgtcactgtcaaagggcagctgagaagggcctgagccccagggacccctcacctgatgggaatgagagtgtggggagcttgcttcttggctgaatggtctgctggggtctggcatagaaagcagatggcttaattcggtctggttcctttggagagggctgggttacctgggccctgtggccttgggcctagagaagggacactgggcttggaccctgattgctggccattcttacctttcctactccccagttcaggcttcagagagcccctgacgcctgcaggaacatggcagaggagacaccgtctgtcttcacaaagtacgtcctccctccttgctgcctcttcccaccagcctgacttatccagggacagagcagtagatgcctggcactcctcgatgcccagtgaaaccagactgtgcttccccacccccaccaccatgccccatgctcactggctcatttcttgggagggcttagagctggataatataagttcccttgga

SEQ ID NO: 194012 - DNA, 1412 bp, Homo sapiens
  Payload ID: 18322
  Gene Name: transmembrane protein 234
  Uniprot ID: Q8WY98
  ENST ID: ENST00000489170
  CDS Start-End: 27-521
cggaagtagaagacagcggcgttgccatggcggcgtctctggggcaggtgttggctctggtgctggtggccgctctgtggggtggcacgcagccgctgctgaagcgggcctccgccggcctgcagcgggttcatgagccgacctgggcccagcagttgctacaggagatgaagaccctcttcttgaatactgagtacctgatgccctttctcctcaaccagtgtggatcccttctctattacctcaccttggcatcgacagatctgaccctggctgtgcccatctgtaactctctggctatcatcttcacactgattgttgggaaggcccttggagaagatattggtggaaaacgagcagttgctggcatggtgctcaccgtgataggaatttcactctgcatcacaagctcagttccatggactgcagaactccagctgcatggaaagggccagctgcagactttgagccagaaatgcaaacgggaggcctctgggactcagtcagagcgctttggctgaatgaggggtggaaccgagggaagaaggtagagagctgtgagccccagccccacctgactccagcacacctggcgagtagtagctgtcaataaatctatggtaaacagacaagaggaggtggaaggccatacagaatggagccgtgagtatggccagcctccagctctcagccaggaggtccccaaccccaaggaaggaagaaactggaaattaggaactgcttcctcatttaacaaggtgcttcttttcatgtgatgaggccctgtgaagaagggacaggatatacagacgggggcagctggagacagttatgatgagtgccggctttgtgtctgagcattctgctcccatggacatccccaacaacagcagggaccaacctatgtcactgtcaaagggcagctgagaagggcctgagccccagggacccctcacctgatgggaatgagagtgtggggagcttgcttcttggctgaatggtctgctggggtctggcatagaaagcagatggcttaattcggtctggttcctttggagagggctgggttacctgggccctgtggccttgggcctagagaagggacactgggcttggaccctgattgctggccattcttacctttcctactccccagttcaggcttcagagagcccctgacgcctgcaggaacatggcagaggagacaccgtctgtcttcacaaagtacgtcctccctccttgctgcctcttcccaccagcctgacttatccagggacagagcagtagatgcctggcactcctcgatgcccagtgaaaccagactgtgcttccccacccccaccaccatgccccatgctcactggctcatttcttgggagggcttagagctggataatataagttcccttgga

SEQ ID NO: 194013 - DNA, 2409 bp, Homo sapiens
  Payload ID: 18323
  Gene Name: transmembrane protein 235
  Uniprot ID: A6NFC5
  ENST ID: ENST00000374946
  CDS Start-End: 625-1215
gtcctagaaggttctttctgcctgttttctccccccccgcccggctgtggggcccagccactgcacttcaccggatgccgtctggttggtcctcaggactgatacagaccaggaccccagggccagcccgtgccaggctcctatgcttccaggagcacgggtgggtggtcctgctgcctggccggccatcctcctggggtcggtctctggccgatcctccctcctcctctcaagccctgcacagcccggccaggcaggtgcatcttgtttggctgctgaggagccgggggttcagggaaattaaggaacgtgcccagggacccggggccagcccgtggggacgctgggattggagcccaagccccaggttcgccgcgcggctctcgacttcctctcctttcccccaggggcgagctcagcgaccgcagagaggtggggtcgatctccctgcgaccccagggggcccgcgaggccagtgcgcgggcaggagcggggacgtgctcagaagagccgggcgccgccgcgcccgcccgccccccgtcccccggctcccggctccgcgcgccccccgccgcccccggggccctgctacccccgacccgtcccctcccgccggccgcccccatggcccggctgggcgcgctgctcctggccgccgccctgggtgcactgctcagcttcgcgctcctggccgccgcggtcgccagcgactactggtacatcctggaggtggcggacgccggcaatggcagcgcctggcccgggcgcgcagagctgctctcctcgcactcggggctctggcgcatctgcgaagtgctgcaccgtgcagtcattgtggtcctgcccctgagcctggtccttctcgtgtgtggctggatctgcggcctgctcagctccctggcccagagcgtgtctctgctgcttttcaccggctgctacttcctgctggggagtgtcctgacactggcgggggtcagcatctacatcagctactcgcacctggcctttgcggagacggtgcagcagtatggcccgcagcacatgcagggcgtccgcgtcagcttcggctggtccatggccctggcctggggctcctgtgccttggaggcattcagcggaaccctcctgctctcagctgcctggaccctcagcctgagccccccaatctgtggtcatctgagtccccagcaggtgggagggagagggggagactgaggcccagagcggcagagggacccacccagatcgcctggcgccagagagatgccgtctcaggccaaggcctccctggcctctgttctgtccactctccccgaagggcaggcttggtggagaagaggctgatgagagggcccgagagcccctccgatttgcaggggtggggggcaaggagctgagcgatccagatgtacccctctgccccctcccttgttctcaagcctgctaggtacttttcactgagcacttccgggaagagcaggcacccagatctctgtccttgtcctggcacaggctgctgctgcttccggcccccgacccttcctctctgcagcaacccgggggaggtatgccactgtgagtgccctggtgggcacactgagctggcagagatggaagtcccagaagggtggggtgggggtgtcatgccatggtggaggagtttggggccactccttgcctgcctcaaagggggcctggctgagggtgcttcttgaccacaggggccagggctgcctagggtggcgcagggctgggcctggagtttgggatgcaggcttgttaaacacagggcagaaccccaggttgggaggggctcagtttgcaggcccaggcccgcaggcccactgctggtcccagggtgagacaggtgagaagagggatggccagcacacacttgagtccccttgggccacaaaggctggggcacgcccaccgttatgcagatggacagttgaggtggctgcaggagaagggttcccagggcctgtacaacacgtggaagcactaaacggccccgtttggggtttgggggcccttcccgagtcttgagaggtcttgagaggtgtgctggggaaggtggcagcctcttgtagcttgatcttcctccaccctgccccacccctaggtctctttattgattcaaaggttaaggaagctcctgggggcttgagggggtggcacagttttggtggggcccagtgaggacaaatctggggggtgagcagggcctcctcttcctcctggtgtttgaacgtttaccattccatgtgggaccattgtgccaatttgtccttaagtaaatcacttgtgctgtgtgcagtataagccttttatttttcttagaacttttcaaaataggtaacacatgcctgtctgtcataaacagtacaaacgtgagcaaacactgtc

SEQ ID NO: 194014 - DNA, 2490 bp, Homo sapiens
  Payload ID: 18323
  Gene Name: transmembrane protein 235
  Uniprot ID: A6NFC5
  ENST ID: ENST00000421688
  CDS Start-End: 625-1296
gtcctagaaggttctttctgcctgttttctccccccccgcccggctgtggggcccagccactgcacttcaccggatgccgtctggttggtcctcaggactgatacagaccaggaccccagggccagcccgtgccaggctcctatgcttccaggagcacgggtgggtggtcctgctgcctggccggccatcctcctggggtcggtctctggccgatcctccctcctcctctcaagccctgcacagcccggccaggcaggtgcatcttgtttggctgctgaggagccgggggttcagggaaattaaggaacgtgcccagggacccggggccagcccgtggggacgctgggattggagcccaagccccaggttcgccgcgcggctctcgacttcctctcctttcccccaggggcgagctcagcgaccgcagagaggtggggtcgatctccctgcgaccccagggggcccgcgaggccagtgcgcgggcaggagcggggacgtgctcagaagagccgggcgccgccgcgcccgcccgccccccgtcccccggctcccggctccgcgcgccccccgccgcccccggggccctgctacccccgacccgtcccctcccgccggccgcccccatggcccggctgggcgcgctgctcctggccgccgccctgggtgcactgctcagcttcgcgctcctggccgccgcggtcgccagcgactactggtacatcctggaggtggcggacgccggcaatggcagcgcctggcccgggcgcgcagagctgctctcctcgcactcggggctctggcgcatctgcgaagggcagaacggctgcatcccgctggtcgacccttttgccagtgagagcctggacgtctccacctcggtgcagcacctcatcttgctgcaccgtgcagtcattgtggtcctgcccctgagcctggtccttctcgtgtgtggctggatctgcggcctgctcagctccctggcccagagcgtgtctctgctgcttttcaccggctgctacttcctgctggggagtgtcctgacactggcgggggtcagcatctacatcagctactcgcacctggcctttgcggagacggtgcagcagtatggcccgcagcacatgcagggcgtccgcgtcagcttcggctggtccatggccctggcctggggctcctgtgccttggaggcattcagcggaaccctcctgctctcagctgcctggaccctcagcctgagccccccaatctgtggtcatctgagtccccagcaggtgggagggagagggggagactgaggcccagagcggcagagggacccacccagatcgcctggcgccagagagatgccgtctcaggccaaggcctccctggcctctgttctgtccactctccccgaagggcaggcttggtggagaagaggctgatgagagggcccgagagcccctccgatttgcaggggtggggggcaaggagctgagcgatccagatgtacccctctgccccctcccttgttctcaagcctgctaggtacttttcactgagcacttccgggaagagcaggcacccagatctctgtccttgtcctggcacaggctgctgctgcttccggcccccgacccttcctctctgcagcaacccgggggaggtatgccactgtgagtgccctggtgggcacactgagctggcagagatggaagtcccagaagggtggggtgggggtgtcatgccatggtggaggagtttggggccactccttgcctgcctcaaagggggcctggctgagggtgcttcttgaccacaggggccagggctgcctagggtggcgcagggctgggcctggagtttgggatgcaggcttgttaaacacagggcagaaccccaggttgggaggggctcagtttgcaggcccaggcccgcaggcccactgctggtcccagggtgagacaggtgagaagagggatggccagcacacacttgagtccccttgggccacaaaggctggggcacgcccaccgttatgcagatggacagttgaggtggctgcaggagaagggttcccagggcctgtacaacacgtggaagcactaaacggccccgtttggggtttgggggcccttcccgagtcttgagaggtcttgagaggtgtgctggggaaggtggcagcctcttgtagcttgatcttcctccaccctgccccacccctaggtctctttattgattcaaaggttaaggaagctcctgggggcttgagggggtggcacagttttggtggggcccagtgaggacaaatctggggggtgagcagggcctcctcttcctcctggtgtttgaacgtttaccattccatgtgggaccattgtgccaatttgtccttaagtaaatcacttgtgctgtgtgcagtataagccttttatttttcttagaacttttcaaaataggtaacacatgcctgtctgtcataaacagtacaaacgtgagcaaacactgtc

SEQ ID NO: 194015 - DNA, 1187 bp, Homo sapiens
  Payload ID: 18323
  Gene Name: transmembrane protein 235
  Uniprot ID: A6NFC5
  ENST ID: ENST00000551068
  CDS Start-End: 122-793
agaagagccgggcgccgccgcgcccgcccgccccccgtcccccggctcccggctccgcgcgccccccgccgcccccggggccctgctacccccgacccgtcccctcccgccggccgcccccatggcccggctgggcgcgctgctcctggccgccgccctgggtgcactgctcagcttcgcgctcctggccgccgcggtcgccagcgactactggtacatcctggaggtggcggacgccggcaatggcagcgcctggcccgggcgcgcagagctgctctcctcgcactcggggctctggcgcatctgcgaagggcagaacggctgcatcccgctggtcgacccttttgccagtgagagcctggacgtctccacctcggtgcagcacctcatcttgctgcaccgtgcagtcattgtggtcctgcccctgagcctggtccttctcgtgtgtggctggatctgcggcctgctcagctccctggcccagagcgtgtctctgctgcttttcaccggctgctacttcctgctggggagtgtcctgacactggcgggggtcagcatctacatcagctactcgcacctggcctttgcggagacggtgcagcagtatggcccgcagcacatgcagggcgtccgcgtcagcttcggctggtccatggccctggcctggggctcctgtgccttggaggcattcagcggaaccctcctgctctcagctgcctggaccctcagcctgagccccccaatctgtggtcatctgagtccccagcaggtgggagggagagggggagactgaggcccagagcggcagagggacccacccagatcgcctggcgccagagagatgccgtctcaggccaaggcctccctggcctctgttctgtccactctccccgaagggcaggcttggtggagaagaggctgatgagagggcccgagagcccctccgatttgcaggggtggggggcaaggagctgagcgatccagatgtacccctctgccccctcccttgttctcaagcctgctaggtacttttcactgagcacttccgggaagagcaggcacccagatctctgtccttgtcctggcacaggctgctgctgcttccggcccccgacccttcctctctgcagcaacccgggggaggtatgccactgtgagtgccctggtgggcacactgagctggcaga

SEQ ID NO: 194016 - DNA, 1786 bp, Homo sapiens
  Payload ID: 18323
  Gene Name: transmembrane protein 235
  Uniprot ID: A6NFC5
  ENST ID: ENST00000550981
  CDS Start-End: 1-591
atggcccggctgggcgcgctgctcctggccgccgccctgggtgcactgctcagcttcgcgctcctggccgccgcggtcgccagcgactactggtacatcctggaggtggcggacgccggcaatggcagcgcctggcccgggcgcgcagagctgctctcctcgcactcggggctctggcgcatctgcgaagtgctgcaccgtgcagtcattgtggtcctgcccctgagcctggtccttctcgtgtgtggctggatctgcggcctgctcagctccctggcccagagcgtgtctctgctgcttttcaccggctgctacttcctgctggggagtgtcctgacactggcgggggtcagcatctacatcagctactcgcacctggcctttgcggagacggtgcagcagtatggcccgcagcacatgcagggcgtccgcgtcagcttcggctggtccatggccctggcctggggctcctgtgccttggaggcattcagcggaaccctcctgctctcagctgcctggaccctcagcctgagccccccaatctgtggtcatctgagtccccagcaggtgggagggagagggggagactgaggcccagagcggcagagggacccacccagatcgcctggcgccagagagatgccgtctcaggccaaggcctccctggcctctgttctgtccactctccccgaagggcaggcttggtggagaagaggctgatgagagggcccgagagcccctccgatttgcaggggtggggggcaaggagctgagcgatccagatgtacccctctgccccctcccttgttctcaagcctgctaggtacttttcactgagcacttccgggaagagcaggcacccagatctctgtccttgtcctggcacaggctgctgctgcttccggcccccgacccttcctctctgcagcaacccgggggaggtatgccactgtgagtgccctggtgggcacactgagctggcagagatggaagtcccagaagggtggggtgggggtgtcatgccatggtggaggagtttggggccactccttgcctgcctcaaagggggcctggctgagggtgcttcttgaccacaggggccagggctgcctagggtggcgcagggctgggcctggagtttgggatgcaggcttgttaaacacagggcagaaccccaggttgggaggggctcagtttgcaggcccaggcccgcaggcccactgctggtcccagggtgagacaggtgagaagagggatggccagcacacacttgagtccccttgggccacaaaggctggggcacgcccaccgttatgcagatggacagttgaggtggctgcaggagaagggttcccagggcctgtacaacacgtggaagcactaaacggccccgtttggggtttgggggcccttcccgagtcttgagaggtcttgagaggtgtgctggggaaggtggcagcctcttgtagcttgatcttcctccaccctgccccacccctaggtctctttattgattcaaaggttaaggaagctcctgggggcttgagggggtggcacagttttggtggggcccagtgaggacaaatctggggggtgagcagggcctcctcttcctcctggtgtttgaacgtttaccattccatgtgggaccattgtgccaatttgtccttaagtaaatcacttgtgctgtgtgcagtataagccttttatttttcttagaacttttcaaaataggtaacacatgcctgtctgtcataaacagtacaaacgtgagcaaacactgtca

SEQ ID NO: 194017 - DNA, 1481 bp, Homo sapiens
  Payload ID: 18323
  Gene Name: transmembrane protein 235
  ENST ID: ENST00000591033
  CDS Start-End: 1-766
gctgctcctggccgccgccctgggtgcactgctcagcttcgcgctcctggccgccgcggtcgccagcgactactggtacatcctggaggtggcggacgccggcaatggcagcgcctggcccgggcgcgcagagctgctctcctcgcactcggggctctggcgcatctgcgaagggcagaacggctgcatcccgctggtcgacccttttgccagtgagagcctggacgtctccacctcggtgcagcacctcatctgcagctcccagcttggctggatcctgcgggccttgcagactcctggctccccatttaggactcgattcttccagatggcctgctgtctacctggctggcaccttccacctgtgctgcaccgtgcagtcattgtggtcctgcccctgagcctggtccttctcgtgtgtggctggatctgcggcctgctcagctccctggcccagagcgtgtctctgctgcttttcaccggctgctacttcctgctggggagtgtcctgacactggcgggggtcagcatctacatcagctactcgcacctggcctttgcggagacggtgcagcagtatggcccgcagcacatgcagggcgtccgcgtcagcttcggctggtccatggccctggcctggggctcctgtgccttggaggcattcagcggaaccctcctgctctcagctgcctggaccctcagcctgagccccccaatctgtggtcatctgagtccccagcaggtgggagggagagggggagactgaggcccagagcggcagagggacccacccagatcgcctggcgccagagagatgccgtctcaggccaaggcctccctggcctctgttctgtccactctccccgaagggcaggcttggtggagaagaggctgatgagagggcccgagagcccctccgatttgcaggggtggggggcaaggagctgagcgatccagatgtacccctctgccccctcccttgttctcaagcctgctaggtacttttcactgagcacttccgggaagagcaggcacccagatctctgtccttgtcctggcacaggctgctgctgcttccggcccccgacccttcctctctgcagcaacccgggggaggtatgccactgtgagtgccctggtgggcacactgagctggcagagatggaagtcccagaagggtggggtgggggtgtcatgccatggtggaggagtttggggccactccttgcctgcctcaaagggggcctggctgagggtgcttcttgaccacaggggccagggctgcctagggtggcgcagggctgggcctggagtttgggatgcaggcttgttaaacacagggcagaaccccaggttgggaggggctcagtttgcaggcccaggcccgcaggcccactgctggtcccagggtgagacaggtgagaagagggatggccagcacacacttgagtccccttgggccacaaaggctggggcacgcc

SEQ ID NO: 194018 - DNA, 2272 bp, Homo sapiens
  Payload ID: 18323
  Gene Name: transmembrane protein 235
  Uniprot ID: A6NFC5
  ENST ID: ENST00000586400
  CDS Start-End: 625-1077
gtcctagaaggttctttctgcctgttttctccccccccgcccggctgtggggcccagccactgcacttcaccggatgccgtctggttggtcctcaggactgatacagaccaggaccccagggccagcccgtgccaggctcctatgcttccaggagcacgggtgggtggtcctgctgcctggccggccatcctcctggggtcggtctctggccgatcctccctcctcctctcaagccctgcacagcccggccaggcaggtgcatcttgtttggctgctgaggagccgggggttcagggaaattaaggaacgtgcccagggacccggggccagcccgtggggacgctgggattggagcccaagccccaggttcgccgcgcggctctcgacttcctctcctttcccccaggggcgagctcagcgaccgcagagaggtggggtcgatctccctgcgaccccagggggcccgcgaggccagtgcgcgggcaggagcggggacgtgctcagaagagccgggcgccgccgcgcccgcccgccccccgtcccccggctcccggctccgcgcgccccccgccgcccccggggccctgctacccccgacccgtcccctcccgccggccgcccccatggcccggctgggcgcgctgctcctggccgccgccctgggtgcactgctcagcttcgcgctcctggccgccgcggtcgccagcgactactggtacatcctggaggtggcggacgccggcaatggcagcgcctggcccgggcgcgcagagctgctctcctcgcactcggggctctggcgcatctgcgaaggtgtcctgacactggcgggggtcagcatctacatcagctactcgcacctggcctttgcggagacggtgcagcagtatggcccgcagcacatgcagggcgtccgcgtcagcttcggctggtccatggccctggcctggggctcctgtgccttggaggcattcagcggaaccctcctgctctcagctgcctggaccctcagcctgagccccccaatctgtggtcatctgagtccccagcaggtgggagggagagggggagactgaggcccagagcggcagagggacccacccagatcgcctggcgccagagagatgccgtctcaggccaaggcctccctggcctctgttctgtccactctccccgaagggcaggcttggtggagaagaggctgatgagagggcccgagagcccctccgatttgcaggggtggggggcaaggagctgagcgatccagatgtacccctctgccccctcccttgttctcaagcctgctaggtacttttcactgagcacttccgggaagagcaggcacccagatctctgtccttgtcctggcacaggctgctgctgcttccggcccccgacccttcctctctgcagcaacccgggggaggtatgccactgtgagtgccctggtgggcacactgagctggcagagatggaagtcccagaagggtggggtgggggtgtcatgccatggtggaggagtttggggccactccttgcctgcctcaaagggggcctggctgagggtgcttcttgaccacaggggccagggctgcctagggtggcgcagggctgggcctggagtttgggatgcaggcttgttaaacacagggcagaaccccaggttgggaggggctcagtttgcaggcccaggcccgcaggcccactgctggtcccagggtgagacaggtgagaagagggatggccagcacacacttgagtccccttgggccacaaaggctggggcacgcccaccgttatgcagatggacagttgaggtggctgcaggagaagggttcccagggcctgtacaacacgtggaagcactaaacggccccgtttggggtttgggggcccttcccgagtcttgagaggtcttgagaggtgtgctggggaaggtggcagcctcttgtagcttgatcttcctccaccctgccccacccctaggtctctttattgattcaaaggttaaggaagctcctgggggcttgagggggtggcacagttttggtggggcccagtgaggacaaatctggggggtgagcagggcctcctcttcctcctggtgtttgaacgtttaccattccatgtgggaccattgtgccaatttgtccttaagtaaatcacttgtgctgtgtgcagtataagccttttatttttcttagaacttttcaaaataggtaacacatgcctgtctgtcataaacagtacaaacgtgagcaaacactgtca

SEQ ID NO: 194019 - DNA, 5464 bp, Homo sapiens
  Payload ID: 18324
  Gene Name: transmembrane protein 236
  Uniprot ID: Q5W0B7
  ENST ID: ENST00000377495
  CDS Start-End: 45-1100
caaagagggagtcccaggttcttggcagcttgcttttcctcaggatggcttctggaaggctcattaagttcgtggtttttgagctcctagagtttgccgctttctccatccccacactcgtgatcacagaacagtttgccaccgcctaccaaggaacaagggctagatctgacaacacacactactggctgatcatctcctgttctattgcctatgttgcgttagtgactctactgatctgggttcctgtaaaagttatcctgcacaagaaacgttatatttacagaaaaattaaaggatggagacctgttctgatgatgtgtgtggtcctcaccacactgccctgcctcaccttttccatagcagtgactgaggttcaaaagagcattaatgggtccgctgatgtcttacctgatatgttacctgacctgcccgtatctctggttctgttatccctgatcatggttgatattattgaaaaactcaggatatatcctcttagagggagtcaaaagagtagtgaaaatggacacatccattcaacctctttgcaacacataaaaactgtgacggagcaagtgaggcaaagtccagaaaacgctgcatctccccaggcaaccaacagcacccaggtgtcgcagccatcaggagccatgacacggagccaggagtctgtgttcatgggaccccaggagccctcctgtgactccggaatcctgagaatgatgtcccggcgagatgtccgggcagagttattcttatggagctttctcctgtggtctgacacgatagaaatggtgcgtgtggctggtcaccccaacgtgtacaagtcaagctggctatacccagtctacatattcagttttatttctctccttcgaattacattcactccccaaaaccctcttctcaattccctgagcgtcctgctgcaagatttaccattcgtttttgttagacttggtttaatcattgccctggggactatcacacccgtactgggcctgtgtaaaaatatcctcgtgactctctcttacatttacttcaattacctaaccagaatcaggattttttctgcctttgaaatgtctccattttaaaaaggaaatgggatctagtaaggcctctttgtgatacctgtgtgcacatttgtaatccttctttttttcttggggcgtaggtgtttgcactataaaggaaatgactagattgtagagaataagccatttttactaactctagcatatcagtttttttttttacatatacaaatggtgctaaatttaagtaaagtaatattcttataagttggctctcaggtatttctagaaaatgttagcagctaattttagttagttatgtatactgaggtccccaacccctggaccatggtcccagtactggtccgtgatctgttagcaagcagaccgcacagcacgtggtgaacctcaaactgagcgttcccgcctgcattccgcctcctgtcagatcagcagcagcattagatcctcataggagcccaaaccctattgtgaactgcgtatgcaagggatctagctttcgctctttaagaaaatctaatacctgatgatctgaggtgggacagtttcatcccagaacccaaccccacccccaaccctggctgtggaaaaattgtcttccacaaaactagtccctggtgccaaaaaggttggggaccactgatgtataccacgctttttctaagaatactcttcaacggagccctttaaaaaactaagaaccttttccatcaagttagcccaagaataagatttttatcttttatatagatagcattatatgaattgattgattaaatttagttttaaaaaacacacttgaaattattgaataatttttaggttatacttttttttttttttttgagacgatgtctcgctcttgtcccctaggctggagtgcgatggcgcgttctcagctcactgcaacctgtatctcccgggttcaagcgattctcctgcctcagcctcccaagtagctgggaatacaggcacctgccaccacgctggctaatttttgtatttttagtagagacgaggtttcaccatgttggccaggctggtctcaaactcctgacctcaggtgatctgcccacctcggccttccaaagtgctgggattacaggtgtgagccaccacgcccggctggattatactttttaaaaatttgaaaattgtagttttaggggttccttcaaaggtggaattatattctttattccattgtggcaagggacttttattcaataaattgatttcagcataaaaagcaattcactttaacagatatttggctcagtttaaggcttagctgtattgccagtactgaagtactaatatgagtgttgtttagtataatgaagtcaaggtacatcagtaataccaagataaagtttcataataaaaagccataaagtgaagacagagatttcaaagtaaaagaatattttatttgtggaatttgatactttgataaataatcaaagtacaagccctgtttaaaattaaaagttcggcttacaaatataatagccaatgtatcagtgtcttatgtgatactatatcatggatatattgatgttataaaataattagatacagagtcatgcaacttgctttcaccctgttgggacactctgaacagtcagcactgttcatttgatagtaattttcagatgctagagagatttgtgagaggctgataatgcaagagtaatgatttatgtagccagtttcttcaatgatctgtgataacaaatcattaagaatgagacatatggcttaagaatgaagcttaagaatttgacatatggccggctgtggtggctcacacgtgtaatcccagcactttgggaggttgaggcaggtagatcactggagtccaggagtctgagaccagcctgggcaacatggagagattctacctctacaaaaaatacaaaaattagctgggcatggtgatctgcaactatagtcccagctacttaggaggctggggcaggaagattgcttgagcccaggaggtcaaggctacagtgagctatgatcatgccactgcactccagactgggcaacagagtgacacccatctaaaaaaaataaaagagaatttgacgttgtgttattctacgctccaccaaatacctctccccttgccaccctgtctccctttccctctgttttaggatttttctcacactgtaaaagaagatttactcacagttgttaaaagcttgccttccagctttctaatttgaggtaggttctataacctctgtgggtccccgtttccacatgtaaaagatgaacataatactagtactacattaatagggttaggagggttaaagggtaaagagtcctttgagcacattttctggcaaaccataataacttgataaatgctaagcattggaacgggtaccaagtctccaagaaacaagtatctcaatgcagttttagaaatttcctgttttattcttttctgtggccctgctcaccctctgggaataatcatttcaactttgcatttgtgaaaaataatacatacaatcttaaggttacttcagactatactttttcatcgaggagtattgtattcaaaagtgatcgatctgctgaatatataaattaaaatggacacaagccttcattcatcagacatttgagtgtctgtcctctgagttcccatagaatctgaattacaccactttattcacacttacattatgtgtttacttttctgagtgtcctattaatctttattccttaaaggaaagcctgagggcatcttgtttaacaatgcatctctctcttcatcaatcaacgctgcaggtgcttacaagacttataacttaaaaaaattataatacaaggctcagcgcagtgcctcaagtgccaacagtttcggaggccttggcaggcggatcacttgaggccaagagttcgagactagcctggccaacatggtgaaacaccgtctgtactaaaaatacaaaaattagctgggtgtggtggcacgcgcctgtagtctcagctacttgggaggctgaggcaggagaatcacttgaacctgggaggcagaggttgcaatgagctgagattgcgccattgcacaccagcctgggtgacaagagtctcaaaaaaaaaattataatacaagtaattactttcgaattctgccatgggtatctttttattattaagaaaagcctgtcatcaagggattcatttatgatattcctaaatatgaaaatattttgtgtaagtatatatttatctccatattagaacttagcaacagtgctcagataaactcaaaagtattacttgagtttagaatgcattttgtatctaatattttaatatgaatgtgcctgatattttcggaagtcacaacactatacaaataatgaaggcatgtacagaagattatgtgtaggaggaaaattgagtagctaatttaatttcatttaatattttacttagagtgtatacatgtttatagactgcaagtctatgggatttaatagatattacagcaaattacactgcgaaaacattgatagttctacactgtaattaaatgttatatatattattaaaattattaggttggtgcaaaagtaattgaggtttttgccattgaaagtggtggtgcatgcctgtaatcccagctactcgggaggctgaatcagaattgcttgaacccggagggcagaggttgcagtgagctgagatctcgccactatgctccagcctgggcaacagattgagactctgtctcaaaaaaaaaaaaaagtcaagtacagttagttaaaggaatgtgcatttaaaaattaatctatgattaggctattaatatatagtctaataattttattgcattataattataaagtagttttataattttataaaattttattgatgctgtaatttttataaaattttatttattttataattttacaaaaaattctaatacctgtaatacactttttagtgccttttctttctaaaagttaatgtttgaaattacaatgtgtaaatgttatctcgtcttgtttttcttattagggccccatttcactgaatgacaattgcaatgaggcataggaaagaaaagggaaatgaaattgcttgctgaagtcctactatgttctgggcactatgctgtttgcctaatacataattgccttgtgctgtgtaccttggagcagggccttacatagtgaatatatcaatagttgttcacaaaaagagcaatataccacttagaagctacaaaacttaaaaatggctacttatactccatagaagatatagtaaataatagaagaaaaaaatgaaatggctaaagacattttgttttacaatggggctgtttttacatgttaattaaaattctatgtttaaacaaa

SEQ ID NO: 194020 - DNA, 1805 bp, Homo sapiens
  Payload ID: 18325
  Gene Name: transmembrane protein 237
  ENST ID: ENST00000286196
  CDS Start-End: 159-515
caggtcccggaggccgctgcgtcgcggggagctgggctcgggccgccggcggttgcgccggggcagccccgcggggagagcaccatgaggactgactcgggggctcggctggaggagggccacctgcgtcctccacgagctcttccacctgtgccaagatgatattccacttagtcgtcctaagaaaaagaagcccagaacaaaaaacacaccagcaagtgcttctttggaaggccttgctcagactgctggtcgaaggccctctgagggcaatgagccatcaactaaagaactcaaagagcacccagaggctcctgttcaaagaagacagaaaaagacaaggctacctcttgaattggagacttcctccacccaaaagaagtcatctagttcatctttattacgaaatgaaaatggtattgatgcggagccagctgaggaggcagttattcaaaaacctcggaggaagacaaagaaaacccagccagcagaattacagtatgccaatgagctaggagtagaagatgaagacataatcactgatgagcaaactactgtggaacagcagtctgtattcactgcacccactggcattagccagcctgtaggcaaagtatttgtggaaaaaagccggagattccaggctgctgatcgttcagagttgataaagaccacagaaaacatagatgtgtcaatggacgtgaagccttcctggaccaccagagatgtggcacttacagtgcaccgggctttcaggatgattggtctcttttctcatggattcttggctggctgtgctgtgtggaatattgttgtgatatatgttctagcaggagatcagctatccaacctctcaaaccttctgcaacaatacaagaccctagcgtatccattccagagtcttctgtacttgcttttggctctgagtacaatttcagcttttgacaggattgactttgctaaaatatcagtagcaatccgaaattttttggccctggatcctacagctttagcatctttcttgtactttactgctcttatactatctctgagtcagcaaatgacaagtgacagaatccacctttacacaccttcttctgttaatggtagcctctgggaagcaggaattgaggaacagattctccagccatggattgtggtgaatctcgtggtggctcttctggttggattatcttggctatttttgtcttataggccaggcatggatcttagtgaagagttaatgttctcctcagaggtggaagaatatcctgataaagagaaagaaatcaaagcctcttcataataccagctcacctttggaggaataatgacccagtatttgtcccatttttgtttttaaatgtatttttataagatgtatacatgtgtatttgtaatagattttttgattatataatactgaaacatctctcaatattatgaaaaatgttaaaattgtgtttgctgtttatgtctaaacattaatttgtctagcattatcatcttaatgacaaagggaataatgaactagaaaccagcaagtgaaagtgtttatttcctattttctcaaaacagttgtatttataactattaccttaaaaagcactggtttagaaaaagccataacttaaatagtgttataaaatatatatcaggtttaaacataaatttagcgaatatggtagaagggaaaaaagccttcatttttgacctccccttactgaataaattgaaatatgaagtttgtcttttctgaaactggcttagtgattgagtatcatgtaataattataatataattt

SEQ ID NO: 194021 - DNA, 5415 bp, Homo sapiens
  Payload ID: 18325
  Gene Name: transmembrane protein 237
  Uniprot ID: Q96Q45
  ENST ID: ENST00000409883
  CDS Start-End: 118-1344
cctcgccaggcgccacgaagccccggcgtcccacaggtcccggaggccgctgcgtcgcggggagctgggctcgggccgccggcggttgcgccggggcagccccgcggggagagcaccatgaggactgactcgggggctcggctggaggagggccacctgcgtcctccacgagctcttccacctgtgccaagtcaagatgatattccacttagtcgtcctaagaaaaagaagcccagaacaaaaaacacaccagcaagtgcttctttggaaggccttgctcagactgctggtcgaaggccctctgagggcaatgagccatcaactaaagaactcaaagagcacccagaggctcctgttcaaagaagacagaaaaagacaaggctacctcttgaattggagacttcctccacccaaaagaagtcatctagttcatctttattacgaaatgaaaatggtattgatgcggagccagctgaggaggcagttattcaaaaacctcggaggaagacaaagaaaacccagccagcagaattacagtatgccaatgagctaggagtagaagatgaagacataatcactgatgagcaaactactgtggaacagcagtctgtattcactgcacccactggcattagccagcctgtaggcaaagtatttgtggaaaaaagccggagattccaggctgctgatcgttcagagttgataaagaccacagaaaacatagatgtgtcaatggacgtgaagccttcctggaccaccagagatgtggcacttacagtgcaccgggctttcaggatgattggtctcttttctcatggattcttggctggctgtgctgtgtggaatattgttgtgatatatgttctagcaggagatcagctatccaacctctcaaaccttctgcaacaatacaagaccctagcgtatccattccagagtcttctgtacttgcttttggctctgagtacaatttcagcttttgacaggattgactttgctaaaatatcagtagcaatccgaaattttttggccctggatcctacagctttagcatctttcttgtactttactgctcttatactatctctgagtcagcaaatgacaagtgacagaatccacctttacacaccttcttctgttaatggtagcctctgggaagcaggaattgaggaacagattctccagccatggattgtggtgaatctcgtggtggctcttctggttggattatcttggctatttttgtcttataggccaggcatggatcttagtgaagagttaatgttctcctcagaggtggaagaatatcctgataaagagaaagaaatcaaagcctcttcataataccagctcacctttggaggaataatgacccagtatttgtcccatttttgtttttaaatgtatttttataagatgtatacatgtgtatttgtaatagattttttgattatataatactgaaacatctctcaatattatgaaaaatgttaaaattgtgtttgctgtttatgtctaaacattaatttgtctagcattatcatcttaatgacaaagggaataatgaactagaaaccagcaagtgaaagtgtttatttcctattttctcaaaacagttgtatttataactattaccttaaaaagcactggtttagaaaaagccataacttaaatagtgttataaaatatatatcaggtttaaacataaatttagcgaatatggtagaagggaaaaaagccttcatttttgacctccccttactgaataaattgaaatatgaagtttgtcttttctgaaactggcttagtgattgagtatcatgtaataattataatataatttagcttgaaagatgctctacattatgaccaataaaaagggaatgtatgttttgtttgaaaaattatataacctaaattttttacctagaagtaactaaaaagttgcttctcattataatctgtactagtggttctcatatctggttgtacatcaggatcatagagggagattttaaaaatctatgtagcaaaagaggctgagcagggcaaggctcaggggaataaaggagagacctgtgagcttgtgggctcccagttgacatctgcagtaccctttcctctgtcccttttttctgagtgacaagaaataggagtagaaattcaccatctctgttctccagctctttgtcagagaggtttctggttttccaggaaatccccctcttgagatgggtcctgcactgggaaagatctcttcagaactatatccaatggtacctcagctgttgtatatgagaccctaaagctcaagttgaggagaagactagctatgggaaaaaatgtttcaaaggctgttgagcacatcaataaaactattgagcctgccctgattagcaagcacctgaatgttatagaacagaagaggattgacaaattgatgatagagacagttgaccctgacaataggtctaaatttggagtgaacattatactgggaatctcttttgctgtttgtaaggctggagctgccgaaaagggattctccctgctgtcacagaattgtgaatttgctggcaattctgaaggcatcctgctagttccagctttcactgtgaccagcaatggttctcaatctggcaataagctggcagtataggagttcataatcttccccgtcagcaaacttcagggaagccatgctcgttagagccaaggcttagcacacttgagccgtgtcatcaaagagaaatgtgagaaagctgctgccaatgtgggggattgtggtaggctgcataatgtctcctaaagatgtccatgtcctaatccctggaacttgtgaatatactactttacttggccaaagggatttgcagatatgattaaggttatgaaccttaaaacggggacattatcctgtattatccagaagggtccagtgtaatcttatgagtccttaaaagcagagaagaaagccttttatgtctgtggtcagagaggtcagaagttatgatattgctggctttgaagatggaagagggggccatgagccaaggagagtgatgaccttgcagctgagtacggcccttggccaacaatgagcaaggaaatggatttcagtcacataaccacaaggaactgagttctatgagtatcccaaatgagcaaggaaacaaatcctcccctagagccaagaaaggaaggcagctctgtggataccttggttttggcctggtgctgcccatgtcatacttttgacatacagaactgtaagatagcaagtgtatgttgactaagctgctaaattggtggtgattgcttatggcagcaatagaaagctatatatcctagagaataaagaaggctagagctgctgtggaatgcacttgggaaagctggctacattgataatatgtaactgccatgggcatagttgcctttgtattcttccaggtctgggaagtacaacttagacttcagatctcgtaatgacccaggaggcatataaacctgagcagctagtggccctgtacaagtccttcatcagggaaaaacattgagtattccctgattaaggacttgtacagaggactctgttttccctggtgtttctggtgtgtctcaaaaattgtttgactgtgatgacagggaagtttggaagaagttcactgctaatgcatgtctccaggaagcagggaatgatctcacagtgacacttgaggcacattgctgaggccgtcgatgagaattcatgtaactttctccagcttacagtggactagattgacatgcaagctgatccagtccaattggtagggcatcatggtttctcattactcactgacttaaaatacttttattgccatcctggtgaagcactgcactgggtagataacacaggggcaccttgctgatcagagcccttggccaggtacaaagagctcagtttctaaaactctgtcatttcaataatgttataaattgaatcatacagtatgtaattttatgggattcgctttttttctgttgatctctttttttctgagtcatctcagctgttgtgtgtatcaatagttcatttccttttactgttttgtttggtttaactcattgacctattgaaggatatctgggctcattccagtctgtgaataatgctgctgtggacattcatgtgcaagtttttgtgtgaacattaagttttcatttctttaagataaatgcccaggagtgaaactgatgggttgtatgtagttacaaactgccaagctgttttccagagttggcggtaccattctaatttcccatgacaattttttgaagagtccaagctagttgctttagagtgcctcacctacattttttaattgtctgactttttcctaatgacatcacttaatttgttcctcaatctcctgaatttcctatagactggaggttaggtctggtggtttgattagattttttaaaaaaatatgacttcatctgtgatgctgtgtactttatgttgcataacatgaaccctaagaacagagtgagctgctggacagcaagtttcatggggtgcagtaattaacacaccacatagtataaatctgaaataatgacaaatgtgttaagggccttgggatattgggccatgtactctgaggagcacaaggtgaggtgcaggttcctgcccctaaagaactctatcttttgagattagcaactaacagtgtgagcccactaataggatgtgaaagttgtcaaaatcaagttctggtcattgtgttaaaaatcctaacaaatagagctggggaaggccgtgaaaggacgattttcatgcacagatgtctgataatgaggactatcattaaaagactgcacaaaaccacaccttgcacaaaggccatcacaacctgacacacacaaaaaatacttctatgaggacatttgcccagcaactccctgtccaatgtccaactggcaacatccttgttattgatccttgtagccaaggataattctctcaaaacaatcatttttgctttaaaaaccgttgtcttccttgacctccctgtatatgcacatagtttactgtggcacttgtattcttattgcaatgcctactcctgaataaacatcattttctttcagagagtctccctctctgttatttaggctgacaaggatatgccaagaagtagcttggatatagcagttaactctgcctttaggatatgtgtatggggatataagagttaactaaaagctgacctttgagttggtccttgaataaaagaagaatagattccaaaaataagaggaataaataatgatcctgagctaggagagtacattttgcagacctttggtttccatattaagaaattcagatttttatgtacaataaagaagttctggaattctctg

SEQ ID NO: 194022 - DNA, 5592 bp, Homo sapiens
  Payload ID: 18325
  Gene Name: transmembrane protein 237
  Uniprot ID: Q96Q45
  ENST ID: ENST00000409444
  CDS Start-End: 319-1521
ttcccgcaaacaaatcaccgccaccacttaggaaaccacgggaaagctgtgattgcagcgccacggtcgccagatttctgctcctgggcacattacccccaactccgaggccccctttttggcagggctagtctggactggccaatccaggtccctgcacgcctctcaccgcaacatccccgcagggcgctgcgcgcggggtactagccaggcggcgcggcccgatgacgcattgcgcctgcgcgcgcgaccgagccgggaggggtggggcgccaggtgcttgggggccggcggccgccgaggccggctaaacgcagaatggggaagaatcctgtgcgtcctccacgagctcttccacctgtgccaagtcaagatgatattccacttagtcgtcctaagaaaaagaagcccagaacaaaaaacacaccagcaagtgcttctttggaaggccttgctcagactgctggtcgaaggccctctgagggcaatgagccatcaactaaagaactcaaagagcacccagaggctcctgttcaaagaagacagaaaaagacaaggctacctcttgaattggagacttcctccacccaaaagaagtcatctagttcatctttattacgaaatgaaaatggtattgatgcggagccagctgaggaggcagttattcaaaaacctcggaggaagacaaagaaaacccagccagcagaattacagtatgccaatgagctaggagtagaagatgaagacataatcactgatgagcaaactactgtggaacagcagtctgtattcactgcacccactggcattagccagcctgtaggcaaagtatttgtggaaaaaagccggagattccaggctgctgatcgttcagagttgataaagaccacagaaaacatagatgtgtcaatggacgtgaagccttcctggaccaccagagatgtggcacttacagtgcaccgggctttcaggatgattggtctcttttctcatggattcttggctggctgtgctgtgtggaatattgttgtgatatatgttctagcaggagatcagctatccaacctctcaaaccttctgcaacaatacaagaccctagcgtatccattccagagtcttctgtacttgcttttggctctgagtacaatttcagcttttgacaggattgactttgctaaaatatcagtagcaatccgaaattttttggccctggatcctacagctttagcatctttcttgtactttactgctcttatactatctctgagtcagcaaatgacaagtgacagaatccacctttacacaccttcttctgttaatggtagcctctgggaagcaggaattgaggaacagattctccagccatggattgtggtgaatctcgtggtggctcttctggttggattatcttggctatttttgtcttataggccaggcatggatcttagtgaagagttaatgttctcctcagaggtggaagaatatcctgataaagagaaagaaatcaaagcctcttcataataccagctcacctttggaggaataatgacccagtatttgtcccatttttgtttttaaatgtatttttataagatgtatacatgtgtatttgtaatagattttttgattatataatactgaaacatctctcaatattatgaaaaatgttaaaattgtgtttgctgtttatgtctaaacattaatttgtctagcattatcatcttaatgacaaagggaataatgaactagaaaccagcaagtgaaagtgtttatttcctattttctcaaaacagttgtatttataactattaccttaaaaagcactggtttagaaaaagccataacttaaatagtgttataaaatatatatcaggtttaaacataaatttagcgaatatggtagaagggaaaaaagccttcatttttgacctccccttactgaataaattgaaatatgaagtttgtcttttctgaaactggcttagtgattgagtatcatgtaataattataatataatttagcttgaaagatgctctacattatgaccaataaaaagggaatgtatgttttgtttgaaaaattatataacctaaattttttacctagaagtaactaaaaagttgcttctcattataatctgtactagtggttctcatatctggttgtacatcaggatcatagagggagattttaaaaatctatgtagcaaaagaggctgagcagggcaaggctcaggggaataaaggagagacctgtgagcttgtgggctcccagttgacatctgcagtaccctttcctctgtcccttttttctgagtgacaagaaataggagtagaaattcaccatctctgttctccagctctttgtcagagaggtttctggttttccaggaaatccccctcttgagatgggtcctgcactgggaaagatctcttcagaactatatccaatggtacctcagctgttgtatatgagaccctaaagctcaagttgaggagaagactagctatgggaaaaaatgtttcaaaggctgttgagcacatcaataaaactattgagcctgccctgattagcaagcacctgaatgttatagaacagaagaggattgacaaattgatgatagagacagttgaccctgacaataggtctaaatttggagtgaacattatactgggaatctcttttgctgtttgtaaggctggagctgccgaaaagggattctccctgctgtcacagaattgtgaatttgctggcaattctgaaggcatcctgctagttccagctttcactgtgaccagcaatggttctcaatctggcaataagctggcagtataggagttcataatcttccccgtcagcaaacttcagggaagccatgctcgttagagccaaggcttagcacacttgagccgtgtcatcaaagagaaatgtgagaaagctgctgccaatgtgggggattgtggtaggctgcataatgtctcctaaagatgtccatgtcctaatccctggaacttgtgaatatactactttacttggccaaagggatttgcagatatgattaaggttatgaaccttaaaacggggacattatcctgtattatccagaagggtccagtgtaatcttatgagtccttaaaagcagagaagaaagccttttatgtctgtggtcagagaggtcagaagttatgatattgctggctttgaagatggaagagggggccatgagccaaggagagtgatgaccttgcagctgagtacggcccttggccaacaatgagcaaggaaatggatttcagtcacataaccacaaggaactgagttctatgagtatcccaaatgagcaaggaaacaaatcctcccctagagccaagaaaggaaggcagctctgtggataccttggttttggcctggtgctgcccatgtcatacttttgacatacagaactgtaagatagcaagtgtatgttgactaagctgctaaattggtggtgattgcttatggcagcaatagaaagctatatatcctagagaataaagaaggctagagctgctgtggaatgcacttgggaaagctggctacattgataatatgtaactgccatgggcatagttgcctttgtattcttccaggtctgggaagtacaacttagacttcagatctcgtaatgacccaggaggcatataaacctgagcagctagtggccctgtacaagtccttcatcagggaaaaacattgagtattccctgattaaggacttgtacagaggactctgttttccctggtgtttctggtgtgtctcaaaaattgtttgactgtgatgacagggaagtttggaagaagttcactgctaatgcatgtctccaggaagcagggaatgatctcacagtgacacttgaggcacattgctgaggccgtcgatgagaattcatgtaactttctccagcttacagtggactagattgacatgcaagctgatccagtccaattggtagggcatcatggtttctcattactcactgacttaaaatacttttattgccatcctggtgaagcactgcactgggtagataacacaggggcaccttgctgatcagagcccttggccaggtacaaagagctcagtttctaaaactctgtcatttcaataatgttataaattgaatcatacagtatgtaattttatgggattcgctttttttctgttgatctctttttttctgagtcatctcagctgttgtgtgtatcaatagttcatttccttttactgttttgtttggtttaactcattgacctattgaaggatatctgggctcattccagtctgtgaataatgctgctgtggacattcatgtgcaagtttttgtgtgaacattaagttttcatttctttaagataaatgcccaggagtgaaactgatgggttgtatgtagttacaaactgccaagctgttttccagagttggcggtaccattctaatttcccatgacaattttttgaagagtccaagctagttgctttagagtgcctcacctacattttttaattgtctgactttttcctaatgacatcacttaatttgttcctcaatctcctgaatttcctatagactggaggttaggtctggtggtttgattagattttttaaaaaaatatgacttcatctgtgatgctgtgtactttatgttgcataacatgaaccctaagaacagagtgagctgctggacagcaagtttcatggggtgcagtaattaacacaccacatagtataaatctgaaataatgacaaatgtgttaagggccttgggatattgggccatgtactctgaggagcacaaggtgaggtgcaggttcctgcccctaaagaactctatcttttgagattagcaactaacagtgtgagcccactaataggatgtgaaagttgtcaaaatcaagttctggtcattgtgttaaaaatcctaacaaatagagctggggaaggccgtgaaaggacgattttcatgcacagatgtctgataatgaggactatcattaaaagactgcacaaaaccacaccttgcacaaaggccatcacaacctgacacacacaaaaaatacttctatgaggacatttgcccagcaactccctgtccaatgtccaactggcaacatccttgttattgatccttgtagccaaggataattctctcaaaacaatcatttttgctttaaaaaccgttgtcttccttgacctccctgtatatgcacatagtttactgtggcacttgtattcttattgcaatgcctactcctgaataaacatcattttctttcagagagtctccctctctgttatttaggctgacaaggatatgccaagaagtagcttggatatagcagttaactctgcctttaggatatgtgtatggggatataagagttaactaaaagctgacctttgagttggtccttgaataaaagaagaatagattccaaaaataagaggaataaataatgatcctgagctaggagagtacattttgcagacctttggtttccatattaagaaattcagatttttatgtacaataaagaagttctggaattctctg

SEQ ID NO: 194023 - DNA, 779 bp, Homo sapiens
  Payload ID: 18325
  Gene Name: transmembrane protein 237
  ENST ID: ENST00000444047
  CDS Start-End: 3-293
ccatgaggactgactcgggggctcggctggaggagggccacctgcgtcctccacgagctcttccacctgtgccaagtcaagatgatattccacttagtcgtcctaagaaaaagaagcccagaacaaaaaacacaccagcaagtgcttctttggaaggccttgctcagactgctggtcgaaggccctctgagggcaatgagccatcaactaaagaactcaaagagcacccagaggctcctgttcaaagaagacagaaaaagacaaggctacctcttgaaaacggcgtgtcttgattggatggaagaattataggagtagaagggcaggaactagaaaagtcaggagaatggagcataattttggaaggatgaccaatgaattggagacttcctccacccaaaagaagtcatctagttcatctttattacgaaatgaaaatggtattgatgcggagccagctgaggaggcagttattcaaaaacctcggaggaagacaaagaaaacccagccagcagaattacagtatgccaatgagctaggagtagaagatgaagacataatcactgatgagcaaactactgtggaacagcagtctgtattcactgcacccactggcattagccagcctgtaggcaaagtatttgtggaaaaaagccggagattccaggctgctgatcgttcagagttgataaagaccacagaaaacatagatgtgtcaatggacgtgaagccttcctggaccaccagagatgtggcacttacagtgcaccgggctttca

SEQ ID NO: 194024 - DNA, 1071 bp, Homo sapiens
  Payload ID: 18325
  Gene Name: transmembrane protein 237
  ENST ID: ENST00000432684
  CDS Start-End: 171-461
agcagcgcctggcaggacagaggcgggcggggacctggctcagggggcggctgcctcgccaggcgccacgaagccccggcgtcccacaggtcccggaggccgctgcgtcgcggggagctgggctcgggccgccggcggttgcgccggggcagccccgcggggagagcaccatgaggactgactcgggggctcggctggaggagggccacctgcgtcctccacgagctcttccacctgtgccaagtcaagatgatattccacttagtcgtcctaagaaaaagaagcccagaacaaaaaacacaccagcaagtgcttctttggaaggccttgctcagactgctggtcgaaggccctctgagggcaatgagccatcaactaaagaactcaaagagcacccagaggctcctgttcaaagaagacagaaaaagacaaggctacctcttgaaaacggcgtgtcttgattggatggaagaattataggagtagaagggcaggaactagaaaagtcaggagaatggagcataattttggaagaattggagacttcctccacccaaaagaagtcatctagttcatctttattacgaaatgaaaatggtattgatgcggagccagctgaggaggcagttattcaaaaacctcggaggaagacaaagaaaacccagccagcagaattacagtatgccaatgagctaggagtagaagatgaagacataatcactgatgagcaaactactgtggaacagcagtctgtattcactgcacccactggcattagccagcctgtaggcaaagtatttgtggaaaaaagccggagattccaggctgctgatcgttcagagttgataaagaccacagaaaacatagatgtgtcaatggacgtgaagccttcctggaccaccagagatgtggcacttacagtgcaccgggctttcaggatgattggtctcttttctcatggattcttggctggctgtgctgtgtggaatattgttgtgatatatgttctagcaggagatcagctatccaacctctcaaaccttctgcaacaatacaagaccctagcgtatc

SEQ ID NO: 194025 - DNA, 1824 bp, Homo sapiens
  Payload ID: 18325
  Gene Name: transmembrane protein 237
  ENST ID: ENST00000621467
  CDS Start-End: 67-1269
gagccgggaggggtggggcgccaggtgcttgggggccggcggccgccgaggccggctaaacgcagaatggggaagaatcctgtgcgtcctccacgagctcttccacctgtgccaagtatagatgatattccacttagtcgtcctaagaaaaagaagcccagaacaaaaaacacaccagcaagtgcttctttggaaggccttgctcagactgctggtcgaaggccctctgagggcaatgagccatcaactaaagaactcaaagagcacccagaggctcctgttcaaagaagacagaaaaagacaaggctacctcttgaattggagacttcctccacccaaaagaagtcatctagttcatctttattacgaaatgaaaatggtattgatgcggagccagctgaggaggcagttattcaaaaacctcggaggaagacaaagaaaacccagccagcagaattacagtatgccaatgagctaggagtagaagatgaagacataatcactgatgagcaaactactgtggaacagcagtctgtattcactgcacccactggcattagccagcctgtaggcaaagtatttgtggaaaaaagccggagattccaggctgctgatcgttcagagttgataaagaccacagaaaacatagatgtgtcaatggacgtgaagccttcctggaccaccagagatgtggcacttacagtgcaccgggctttcaggatgattggtctcttttctcatggattcttggctggctgtgctgtgtggaatattgttgtgatatatgttctagcaggagatcagctatccaacctctcaaaccttctgcaacaatacaagaccctagcgtatccattccagagtcttctgtacttgcttttggctctgagtacaatttcagcttttgacaggattgactttgctaaaatatcagtagcaatccgaaattttttggccctggatcctacagctttagcatctttcttgtactttactgctcttatactatctctgagtcagcaaatgacaagtgacagaatccacctttacacaccttcttctgttaatggtagcctctgggaagcaggaattgaggaacagattctccagccatggattgtggtgaatctcgtggtggctcttctggttggattatcttggctatttttgtcttataggccaggcatggatcttagtgaagagttaatgttctcctcagaggtggaagaatatcctgataaagagaaagaaatcaaagcctcttcataataccagctcacctttggaggaataatgacccagtatttgtcccatttttgtttttaaatgtatttttataagatgtatacatgtgtatttgtaatagattttttgattatataatactgaaacatctctcaatattatgaaaaatgttaaaattgtgtttgctgtttatgtctaaacattaatttgtctagcattatcatcttaatgacaaagggaataatgaactagaaaccagcaagtgaaagtgtttatttcctattttctcaaaacagttgtatttataactattaccttaaaaagcactggtttagaaaaagccataacttaaatagtgttataaaatatatatcaggtttaaacataaatttagcgaatatggtagaagggaaaaaagccttcatttttgacctccccttactgaataaattgaaatatgaagtttgtcttttctgaaactggcttagtgattgagtatcatgtaataattataatataatttagcttgaaagatgctctacattatgaccaataaaaagggaatgtatgttttgtttg

SEQ ID NO: 194026 - DNA, 1000 bp, Homo sapiens
  Payload ID: 18326
  Gene Name: transmembrane protein 238
  Uniprot ID: C9JI98
  ENST ID: ENST00000444469
  CDS Start-End: 340-870
cggacactgagcagaaacaacgccacgcccggctccgagtgtcccatgctgccaccactaaaatgccctgatttttggccatatgtgacctccctgggtggcacgggccctaggcacccgtggctgtgcgcctggctaccaccagctcaggcctctgagcaatagcccctgcacggaaaccacgaccagggtaaccccggccgcgccggttcgcgcccagcccggttcaggtgaccaggcgggagcttggcacacctggcgccgtcccctgaccccgccccggaccgggccgcaccccggaacgctctctctgggcgccagcggcggcggtgcagggccatggcggcggcgccagcggtgtgcgcctcgcaggggagcccgccgggtgcaccgtccgcgccggcggccgcgccagcacccgcggccggcctgggccgctgccggatggcgctgctgctggccgtggcgctggatgtggcgggcatggcggcgctgctgaccggcgtgttcgcgcagctgcaggtgcgcggccgcgacttcggggacctgctcatctactcgggcgcgctgctggtgttcctgagcctgctgggctggatcctctggtacaccggcaacatcgagatctcgcgccaggagctggagcgcgactacggcctgcggccctcggcgctcgcccgcctggcgcgcaagctctcccgccgctggtcggcgcccgccgccgcgggccagcgccccgcgcccggctcccggagagcgcgccgagccgcccgcgcgcccccgccgcccgccgccggctcccgccgcgtgcgcctgcagctcgccacgctcgaggccgggcccggggcggcgggcgcgggcagcgagtgaggcccagacaaccccttggctccagctgtcaggaccagactgagatgtgcagctgcccctacatccgtggccagacggacgctccctgtaccccctccctcctcacttggataaaaagcagatttgcctt

SEQ ID NO: 194027 - DNA, 3892 bp, Homo sapiens
  Payload ID: 18327
  Gene Name: transmembrane protein 239
  Uniprot ID: Q8WW34
  ENST ID: ENST00000361033
  CDS Start-End: 34-621
acaaaggggctcctctggggagggtgggggtagatgagagtggggacttggatctgcctgccaggccgtcctgggcgctgcaggaagcaacatgacttaggtaactgcccagaggtcccaggcatcttcaagaccctggccctctccccaggtgcaccagacatgatgcagcagccgcgagtggagacagataccatcggggctggcgaggggccacagcaggcagtgccctggtcagcctgggtcacgaggcatggctgggtgcgctggtgggtgagccacatgcccccgagctggatccagtggtggagcacctcgaactggcggcaaccgctgcagcgcctgctgtggggtctggaggggatactctacctgctgctggcactgatgttgtgccatgcactcttcaccactggctcccacctgctgagctccttgtggcctgtcgtggccgcggtgtggcgccacctgctaccggctctcctgctgctggtgctcagtgctctgcctgccctcctcttcacggcctccttcctgctgctcttctccacactgctgagccttgtgggcctcctcacctccatgactcacccaggcgacactcaggatttggatcaatagaagggcaaccccatcccactgcctgtgtctgttgagccctggcctagggcctgagaccccacggggagagggagggcaatgggatcagggctccctgccttggcagggcccagacccctagtccctaacaggtagactggcctgaccccggactccttcctcaagtcaatgctgcaggttcctggtgtgaggggctgggggctttgagaagagggggcaagacagatggcttagccattggtgaaaattgcttagccaggggcagagcttgaccaagccactgatagcgcccatatggatgtgatgatacccgtggggcccccttggcaactgacagcatctttttctcatagccactcagctgtctcagcttcagactcactgagaacttctacctgggtaccactggccttgccattcctcccaccaatcccctctttccacttccaggagaaccacagactctagagagggtcccagtgacaaaaatctatcagggagaaggctggccagaagccccaggagacctcaactcactcgctctccaaaccttgcagcccacgcatcctcctccctagacttcctacttcctgcctcagtctgcatccccaagtctgagaaatgggccaactggggtcagacagcacctactcactctctaagaatcccaaggtctgttatggaaaaatgatcaagaaatcccatttcacccacttacacaatgtgtggccttggccaattaattcatttgagcctcaatgttacgtgggccacttctgtcatggggttgttgtgagtcaaagacaatatctatttgtgaagcattttgtagaagccaaaaacctgtaagatgttgttttgagctctaagaactttctgtaggcgcataagatcttttgaccccaaagactgttgaaggaacaggaagcttctctgggctttcagatcaactctctgtcctggatagaattttggccctaaaatggtaaacaagaggtcggttaagtgtgtacaagatgtaaaaggtcatgtgccatgaaatctcaaaatgtgcagatgttgaactattttgattatgaaatgcttgggcctggggctgggtgccagatgcttgcacagctgtgtgagtggggacagcacagccccagggtttccaaaactgacccagcaagccgctcaggcaccagaagggctttggaaagggcaatcctttgatgccctgaatgctggccgttcgttcacttgctggcccctccaacaaaacattgagtgatcggtaattaccaagtaaggtacatgatagacaactttatccacacctgacccccacccaagccctggccatccccaactcctgcccagttctgatccctgctttatgtataaccctaaaatccttgctcttgaagccccagacccaaggtccccctcttttgtcccataaatactcagggccttggggctagcccctagaaccctggttcatttttgccttagacttttgcaaccctccatgccacggattagatgccttcagcatcagtgccaaaacccaaggtccagtccttcctttctgtttctttgtatttctcccgcattatggcatggtagtgagagcgaggtaggacatggggctgatgtggtctcatggttggatgggttttggtgcatgagctgaggctgggcgtgagtcccagcactctcacttactaactccatgcccttagtggaaatcgctaaaccttcctcaacttcactttcctcatgggtaaaactaaggcaagaacccctgtcttagggctctggcatgtgagtgaaggacctgggaccactcctagcaccacaaattatagctatgctgtgaccatcccattttagagatgagaagtcaggcccaggatagccagttgccagtggcaaggccaggccatctgagtcctaccaggctactcaagggaaggtgaagggggcaaaggaaacacaaacaacctaactaactgaagaccccaaggcttctcaagagctcctatcagagctaaagcccaggcctagggaagtcatgagtcaagccaatctagatggcaagctgaggattcaggatcccatgtggtgagggcagagaccaggctgcctggcctagatccatcattgacttggccatgcattgctagccagggacgttgctctggagccttgggtccattccaatgaagggagagaggagtttggggccctgaccagatgctctagtggatgggatgtgggcagcagcaaggagaagaccttcttcctttccccacagactatataccttttaccctcctgcccagctggtatggggtaaggaggtgcacccagactagagagctgatgggcaatactcatcaaattagatccacatataccctaggacccagaaccccagaatgaattttcacagaggtccataagggccttgcccctcaaaatgtagtcccagaatcagcaacacaggcatcacctggaagctggttggaaatacagtctcaggccctgctccagacaggccgaatcagagtctgcatttttttttttttttttttgagacagagtcttgctctgttgtccaggctggagtgcagtggtgcaatctcggctcactgcgctccacctcccaggtccaagcaattctcctgcctcagcctcctgagtagctgggattacaggcgcctgccaccgagtccgacaaacttttgtatttttagtagagacagggtttcaccatgttggccaggctggtcttgaatccctgacctcaggtgatctgcccaccatagcctcccaaagtgctgggattacaggcgtgagccaccgtgcctggccaagagcctgcattttaacaagattcccaggtgatacattgtaccctgtttgagaagtgaagcataagggggtattatgagaatgcctattgcactgttactagtgggagcaggataggtaaagggaagggtaaaacaaggcagatgggcccaaggggcagtaattagaaggggcagaaggtacatgaaccaatcttaaaatcttagcattgaaaaagaaatggaatgagaatacaattcctcttacacaaatttaaaagcatgtcagcaaaacaagacaatttttggcaagaacacataaaaacgaaagataaacagaatggaatggacaactctaggggcaggcaagtgggagtagggtatagagataacaggcaataaagctagagagcttgcagaggcgaaacgtg

SEQ ID NO: 194028 - DNA, 571 bp, Homo sapiens
  Payload ID: 18327
  Gene Name: transmembrane protein 239
  Uniprot ID: Q8WW34
  ENST ID: ENST00000380585
  CDS Start-End: 95-553
agatgagagtggggacttggatctgcctgccaggccgtcctgggcgctgcaggaagcaacatgacttaggtaactgcccagaggtgcaccagacatgatgcagcagccgcgagtggagacagataccatcggggctggcgaggggccacagcaggcagtgccctggtcagcctgggtcacgaggcatggctgggtgcgctggtgggtgagccacatgcccccgagctggatccagtggtggagcacctcgaactggcggcaaccgctgcagcgcctgctgtggggtctggaggggatactctacctgctgctggcactgatgttgtgccatgcactcttcaccactggctcccacctgctgagctccttgtggcctgtcgtggccgcggtgtggcgccacctgctaccggctctcctgctgctggtgctcagtgctctgcctgccctcctcttcacggcctccttcctgctgctcttctccacactgctgagccttgtgggcctcctcacctccatgactcacccaggcgacactcaggatttggatcaatagaagggcaaccccatccca

SEQ ID NO: 194029 - DNA, 718 bp, Homo sapiens
  Payload ID: 18328
  Gene Name: transmembrane protein 240
  Uniprot ID: Q5SV17
  ENST ID: ENST00000378733
  CDS Start-End: 12-533
ggccccgcccgatgtccatgagcgcgaacaccatgatcttcatgattctgggggcgtcggtcgtgatggccatcgcgtgcttgatggacatgaacgcgctgctggaccgattccacaactacatcctcccgcacctgcggggcgaggaccgcgtctgccactgcaactgtggccggcaccatatccactacgtgatcccgtacgacggggaccagtcggtggtggacgcctccgagaactactttgtgacggacagtgtgaccaagcaggagatcgacctcatgctggggctgctgctgggcttttgcatcagctggttcctggtgtggatggacggcgtcctgcactgcgccgtgcgcgcctggagagccggacggcgctacgatggctcgtggacctggctgcccaagctgtgcagcctgcgggagctgggccggcggccgcacaggcccttcgaggaggccgccgggaacatggtacacgtgaagcagaaactctaccacaatggccaccccagcccgcggcacctgtgagccgcacggggacttaccggggccaccgagccaaccggctgctgtacagatgtaaaagggacctcgtggacgcccgggccggcgggactggacagcagccctgggcccaggttgtccggggctgtggccggccgggagagtccagtggaaggtgctgtctcttctttttataaagggggttgggg

SEQ ID NO: 194030 - DNA, 717 bp, Homo sapiens
  Payload ID: 18328
  Gene Name: transmembrane protein 240
  Uniprot ID: Q5SV17
  ENST ID: ENST00000425828
  CDS Start-End: 44-565
agggaagcgctgacctctgcggaggcggcgggggccccgcccgatgtccatgagcgcgaacaccatgatcttcatgattctgggggcgtcggtcgtgatggccatcgcgtgcttgatggacatgaacgcgctgctggaccgattccacaactacatcctcccgcacctgcggggcgaggaccgcgtctgccactgcaactgtggccggcaccatatccactacgtgatcccgtacgacggggaccagtcggtggtggacgcctccgagaactactttgtgacggacagtgtgaccaagcaggagatcgacctcatgctggggctgctgctgggcttttgcatcagctggttcctggtgtggatggacggcgtcctgcactgcgccgtgcgcgcctggagagccggacggcgctacgatggctcgtggacctggctgcccaagctgtgcagcctgcgggagctgggccggcggccgcacaggcccttcgaggaggccgccgggaacatggtacacgtgaagcagaaactctaccacaatggccaccccagcccgcggcacctgtgagccgcacggggacttaccggggccaccgagccaaccggctgctgtacagatgtaaaagggacctcgtggacgcccgggccggcgggactggacagcagccctgggcccaggttgtccggggctgtggccggccgggagagtccagtggaagg

SEQ ID NO: 194031 - DNA, 796 bp, Homo sapiens
  Payload ID: 18328
  Gene Name: transmembrane protein 240
  ENST ID: ENST00000624426
  CDS Start-End: 5-172
cccgatgtccatgagcgcgaacaccatgatcttcatgattctgggggcgtcggtcgtgatggccatcgcgtgcttgatggacatgaacgcgctgctggaccgattccacaactacatcctcccgcacctgcggggcgaggaccgcgtctgccactgcaactgtggccggtgagtccacaaccggcgccggctcgacacgcgtgagcgcacatgtgtggcggggcccactcggggcgcgggggaaccagccccacgcaggccgcgagccgccttccacccttgagggctgccaggtgcgcagggggaggagctgtctcaaggtgggcgggggtctcctgggggcgcatggctttaggacgccgttcctagaggcctccagggtgatggcggaatgggtcacggggcctcctggtccagcctggaggccggaaagccgcagcccagtgtgatgtccacagtggagacccaagccagcctcatcagggctggggcaggaagcgcctgctggcacagggctgggccctgcactgagtccctgggcaggggaatgcaggtcaaggcgggaagggcctgccttgaggggcactgggcaccacccccgggctggagaggagctgagggatgggctgggggggcagcggggaggtggagcttcctcaaggtcattcagattgaggggagcgcccagaccccccgcacccaccgtgtgaccccctctgtgcacgtgtagcgatgggatcctcttggccatgcatgtttgtacgtccatgtacgaaataaacatcttctcatgaga

SEQ ID NO: 194032 - DNA, 2934 bp, Homo sapiens
  Payload ID: 18329
  Gene Name: transmembrane protein 241
  Uniprot ID: Q24JQ0
  ENST ID: ENST00000383233
  CDS Start-End: 54-944
ccaggggatttgggcaggcaccgtggatccccgagaaggggacgagttgacagatgtgcgtgaggaggtctctggtcggcctcaccttttgtacctgctacctggcttcttacctcacgaacaagtatgtgctgtctgtcttgaaatttacctaccctacattattccaagggtggcagacgctcattggtggacttttgcttcatgtgtcctggaaactgggctgggtagagatcaacagcagttcaagatctcatgttcttgtgtggcttcctgcttcagtgctgtttgtgggtataatctatgctgggtccagagcattgtccagactggccattcctgtgtttctcactttgcataatgtagctgaagttatcatctgtgggtaccagaagtgttttcagaaagagaaaacatctcctgcaaagatctgtagtgccctcctcctcctggccgcagcaggatgccttcccttcaatgactcccagtttaatccagatggatatttttgggctataattcacttactctgtgtaggggcttataaaattctacagaagtcccagaaacccagtgcattaagtgacattgaccagcaatacttaaactatatattcagtgtggtgctcctggcatttgcatctcatcccacaggtgatctcttcagcgtcctggacttcccattcctgtacttctacagattccatggtagctgctgtgccagtggatttttgggattctttctcatgttcagtacagtgaagctaaaaaaccttctggccccagggcagtgtgcagcctggattttctttgctaagataatcacagctggcttatcaatattgctgtttgatgcgatcctgaccagtgcaaccacgggatgcctcctgctcggtgcgcttggagaggccttgctggttttctcagagcggaagagctcctgaacaagacggtcaagagaaagactcacaggctgctgcgggagaacagcttgtacacctgtgtacgagcccctggtctcatagctccctgttggatgtgtcagaaagaggaatgcaaggacagtgaggccaggtgggcagtgccatcaccctcacccaagtgaatgtggtggtggctgatgaggccgaggccctggtgcttcaaggagcaccctttctgggggtctgcaggtcactgcagaggagcggtctgttacatcttcccatttggagaacctctctcaaccgtgctgtagctggttctgcagaaacaggaagtacaggatttcatgggctggctctgctcgcctcgactgagcttcacacctctggatgccacatgctctctcccaaacactgctttcagtgcaaggtagtgggcctaaggggtttggttgtcttttttttttttcatttttaaaattttaaatttttatttattattattttttagagacaaggcctcactctatcgcctaggctgaagcacagtggtgcgatcacagctcgctacagccttgacctcctaggatcaagccatcctcctgcctcagcatccacagtagctgatgtgcaccaccagacccgtctcattttttctatttttattattttagagatggggatctcactgtgttggccaggctggtctcaaactcctgggctcaagcaatcctcccaccttggcctcaaagtattgagattacaggcatgagccactgcacccggcctttctcatttttatttttaaattgacagacgtaacagtgcgcatttatcacgcacaacacaatgctttgggaatggttaaatctagctcacaaatgcattacctcacacggttgtcatttttgtggtgaggcttggttgtatgttttgtttcattcatgtttttacatccttggagtctcctctgggtccgtcctttctttgctgtcatgctggcttgcctaaggcccaccgccacctgcgtacgagcattttaaactctagagtgagtgacagcctttttatggttggtgttactatttatttcctgcctctaaacttctcgtggtccttataaacttgtcaggatgtgtgttgcgttgaattctgcatgtcctttttttgcccaccctcaggttaagctggtactaacttatccccagaggaaacagggtttatgagcactgacagatgtcttccctgggcaaaaaaaaaaaaaatagtatatgtatacacacacacatacacatttatatttatatttcttaaagcttttaatccctttcattccctgatatctcagagatttcaaatcattgaacactgaagtatatttttcaggccagatgaaaaattgtattaaaaccctattcctggtcaggcgcagtggctcacgcctataatcccagcactttgggaggccgaagtaagcagatcacctgaggtcgggagttcaagacaaacctggccaacatggtgaaaccctgtctctactaaaactacaaaaaaattagcctgatgtggtgttgtgtgcctgtagtcccagctacttaggaggctgaggtaggagaattgcttgaacctgggaggcggaggttgcagtgagccaaaattacgccactgcactccagcctgggcaacagagcgagacagtctcaaaaacaacaacaacaacaaaaaccctattccttgcctttgtaggagtcaaaataaatgaacttcttttttcttttttttattattatactttaagttctggggtacacgtgcagaatgtgcaggtttgttacataggtatgcacgtgccatggtggtttgctgcacccatcaacctgtcacctacattaggtatttcccctaatgttatccctcccctagccctccatcccctgacaggccctggtgtgtgatgttcccctccctatgtccatgtgttctcattgctccaaaataaatgaatttacac

SEQ ID NO: 194033 - DNA, 2941 bp, Homo sapiens
  Payload ID: 18329
  Gene Name: transmembrane protein 241
  Uniprot ID: Q24JQ0
  ENST ID: ENST00000473688
  CDS Start-End: 110-589
gtctctgggcggctgctgccgctgccgctgctgctgctgcgggggtcgggcggcggccaggggatttgggcaggcaccgtggatccccgagaaggggacgagttgacagatgtgcgtgaggaggtctctggtcggcctcaccttttgtacctgctacctggcttcttacctcacgaacaagtatgtgctgtctgtcttgaaatttacctaccctacattattccaagggtggcagacgctcattggtggacttttgcttcatgtgtcctggaaactgggctgggtagagatcaacagcagttcaagatctcatgttcttgtgtggcttcctgcttcagtgctgtttgtgggtataatctatgctgggtccagagcattgtccagactggccattcctgtgtttctcactttgcataatgtagctgaagttatcatctgtgggtaccagaagtgttttcagaaagagaaaacatctcctgcaaagatctgtagtgccctcctcctcctggccgcagcaggatgccttcccttcaatgactcccaggggcttataaaattctacagaagtcccagaaacccagtgcattaagtgacattgaccagcaatacttaaactatatattcagtgtggtgctcctggcatttgcatctcatcccacaggtgatctcttcagcgtcctggacttcccattcctgtacttctacagattccatggtagctgctgtgccagtggatttttgggattctttctcatgttcagtacagtgaagctaaaaaaccttctggccccagggcagtgtgcagcctggattttctttgctaagataatcacagctggcttatcaatattgctgtttgatgcgatcctgaccagtgcaaccacgggatgcctcctgctcggtgcgcttggagaggccttgctggttttctcagagcggaagagctcctgaacaagacggtcaagagaaagactcacaggctgctgcgggagaacagcttgtacacctgtgtacgagcccctggtctcatagctccctgttggatgtgtcagaaagaggaatgcaaggacagtgaggccaggtgggcagtgccatcaccctcacccaagtgaatgtggtggtggctgatgaggccgaggccctggtgcttcaaggagcaccctttctgggggtctgcaggtcactgcagaggagcggtctgttacatcttcccatttggagaacctctctcaaccgtgctgtagctggttctgcagaaacaggaagtacaggatttcatgggctggctctgctcgcctcgactgagcttcacacctctggatgccacatgctctctcccaaacactgctttcagtgcaaggtagtgggcctaaggggtttggttgtcttttttttttttcatttttaaaattttaaatttttatttattattattttttagagacaaggcctcactctatcgcctaggctgaagcacagtggtgcgatcacagctcgctacagccttgacctcctaggatcaagccatcctcctgcctcagcatccacagtagctgatgtgcaccaccagacccgtctcattttttctatttttattattttagagatggggatctcactgtgttggccaggctggtctcaaactcctgggctcaagcaatcctcccaccttggcctcaaagtattgagattacaggcatgagccactgcacccggcctttctcatttttatttttaaattgacagacgtaacagtgcgcatttatcacgcacaacacaatgctttgggaatggttaaatctagctcacaaatgcattacctcacacggttgtcatttttgtggtgaggcttggttgtatgttttgtttcattcatgtttttacatccttggagtctcctctgggtccgtcctttctttgctgtcatgctggcttgcctaaggcccaccgccacctgcgtacgagcattttaaactctagagtgagtgacagcctttttatggttggtgttactatttatttcctgcctctaaacttctcgtggtccttataaacttgtcaggatgtgtgttgcgttgaattctgcatgtcctttttttgcccaccctcaggttaagctggtactaacttatccccagaggaaacagggtttatgagcactgacagatgtcttccctgggcaaaaaaaaaaaaaatagtatatgtatacacacacacatacacatttatatttatatttcttaaagcttttaatccctttcattccctgatatctcagagatttcaaatcattgaacactgaagtatatttttcaggccagatgaaaaattgtattaaaaccctattcctggtcaggcgcagtggctcacgcctataatcccagcactttgggaggccgaagtaagcagatcacctgaggtcgggagttcaagacaaacctggccaacatggtgaaaccctgtctctactaaaactacaaaaaaattagcctgatgtggtgttgtgtgcctgtagtcccagctacttaggaggctgaggtaggagaattgcttgaacctgggaggcggaggttgcagtgagccaaaattacgccactgcactccagcctgggcaacagagcgagacagtctcaaaaacaacaacaacaacaaaaaccctattccttgcctttgtaggagtcaaaataaatgaacttcttttttcttttttttattattatactttaagttctggggtacacgtgcagaatgtgcaggtttgttacataggtatgcacgtgccatggtggtttgctgcacccatcaacctgtcacctacattaggtatttcccctaatgttatccctcccctagccctccatcccctgacaggccctggtgtgtgatgttcccctccctatgtccatgtgttctcattgctccaaaataaatgaatttacac

SEQ ID NO: 194034 - DNA, 669 bp, Homo sapiens
  Payload ID: 18329
  Gene Name: transmembrane protein 241
  ENST ID: ENST00000497608
  CDS Start-End: 81-311
gctgctgctgcgggggtcgggcggcggccaggggatttgggcaggcaccgtggatccccgagaaggggacgagttgacagatgtgcgtgaggaggtctctggtcggcctcaccttttgtacctgctacctggcttcttacctcacgaacaagtatgtgctgtctgtcttgaaatttacctaccctacattattccaagggtggcagacgctcattggtggacttttgcttcatgtgtcctggaaactgggctgggtagagatcaacagcagttcaaggccattcctgtgtttctcactttgcataatgtagctgaagttatcatctgtgggtaccagaagtgttttcagaaagagaaaacatctcctgcaaagatctgtagtgccctcctcctcctggccgcagcaggatgccttcccttcaatgactcccagtttaatccagatggatatttttgggctataattcacttactctgtgtaggggcttataaaattctacagaagtcccagaaacccagtgcattaagtgacattgaccagcaatacttaaactatatattcagtgtggtgctcctggcatttgcatctcatcccacaggtgatctcttcagcgtcctggacttcccattcctgtacttctacagattccatggtagctgctgtgccag

SEQ ID NO: 194035 - DNA, 889 bp, Homo sapiens
  Payload ID: 18329
  Gene Name: transmembrane protein 241
  ENST ID: ENST00000460322
  CDS Start-End: 95-247
ctgccgctgccgctgctgctgctgcgggggtcgggcggcggccaggggatttgggcaggcaccgtggatccccgagaaggggacgagttgacagatgtgcgtgaggaggtctctggtcggcctcaccttttgtacctgctacctggcttcttacctcacgaacaagtatgtgctgtctgtcttgaaatttacctaccctacattattccaagggccattcctgtgtttctcactttgcataatgtagctgaagttatcatctgtgggtaccagaagtgttttcagaaagagaaaacatctcctgcaaagatctgtagtgccctcctcctcctggccgcagcaggatgccttcccttcaatgactcccaggggcttataaaattctacagaagtcccagaaacccagtgcattaagtgacattgaccagcaatacttaaactatatattcagtgtggtgctcctggcatttgcatctcatcccacaggtgatctcttcagcgtcctggacttcccattcctgtacttctacagattccatggtagctgctgtgccagtggatttttgggattctttctcatgttcagtacagtgaagctaaaaaaccttctggccccagggcagtgtgcagcctggattttctttgctaagataatcacagctggcttatcaatattgctgtttgatgcgatcctgaccagtgcaaccacgggatgcctcctgctcggtgcgcttggagaggccttgctggttttctcagagcggaagagctcctgaacaagacggtcaagagaaagactcacaggctgctgcgggagaacagcttgtacacctgtgtacgagcccctggtctcatagctccctgttggatgtgtcagaaagaggaatgc

SEQ ID NO: 194036 - DNA, 667 bp, Homo sapiens
  Payload ID: 18329
  Gene Name: transmembrane protein 241
  ENST ID: ENST00000482411
  CDS Start-End: 88-348
tgccgctgctgctgctgcgggggtcgggcggcggccaggggatttgggcaggcaccgtggatccccgagaaggggacgagttgacagatgtgcgtgaggaggtctctggtcggcctcaccttttgtacctgctacctggcttcttacctcacgaacaaggtggcagacgctcattggtggacttttgcttcatgtgtcctggaaactgggctgggtagagatcaacagcagttcaagatctcatgttcttgtgtggcttcctgcttcagtgctgtttgtgggtataatctatgctgggtccagagcattgtccagactggccattcctgtgtttctcactttgcataatgtagctgaagttatcatctgtgggtaccagaagtgttttcagaaagagaaaacatctcctgcaaagatctgtagtgccctcctcctcctggccgcagcaggatgccttcccttcaatgactcccaggggcttataaaattctacagaagtcccagaaacccagtgcattaagtgacattgaccagcaatacttaaactatatattcagtgtggtgctcctggcatttgcatctcatcccacaggtgatctcttcagcgtcctggacttcccattcctgtacttctacagattccatggtagctgctgtgccagtggat

SEQ ID NO: 194037 - DNA, 2859 bp, Homo sapiens
  Payload ID: 18329
  Gene Name: transmembrane protein 241
  Uniprot ID: Q24JQ0
  ENST ID: ENST00000477053
  CDS Start-End: 108-479
ctctgggcggctgctgccgctgccgctgctgctgctgcgggggtcgggcggcggccaggggatttgggcaggcaccgtggatccccgagaaggggacgagttgacagatgtgcgtgaggaggtctctggtcggcctcaccttttgtacctgctacctggcttcttacctcacgaacaagtatgtgctgtctgtcttgaaatttacctaccctacattattccaaggatctcatgttcttgtgtggcttcctgcttcagtgctgtttgtgggtataatctatgctgggtccagagcattgtccagactggccattcctgtgtttctcactttgcataatgtagctgaagttatcatctgtgggtaccagaagtgttttcagaaagagaaaacatctcctgcaaagatctgtaggttgcaccttgaaagaacaagacaaaaccaaacttcaagactatcctcctgtttaaaaggagactagcaggtgtcaaagagaggcggtaaagctcatgatacctgatgtaatcagtgccctcctcctcctggccgcagcaggatgccttcccttcaatgactcccaggtgatctcttcagcgtcctggacttcccattcctgtacttctacagattccatggtagctgctgtgccagtggatttttgggattctttctcatgttcagtacagtgaagctaaaaaaccttctggccccagggcagtgtgcagcctggattttctttgctaagataatcacagctggcttatcaatattgctgtttgatgcgatcctgaccagtgcaaccacgggatgcctcctgctcggtgcgcttggagaggccttgctggttttctcagagcggaagagctcctgaacaagacggtcaagagaaagactcacaggctgctgcgggagaacagcttgtacacctgtgtacgagcccctggtctcatagctccctgttggatgtgtcagaaagaggaatgcaaggacagtgaggccaggtgggcagtgccatcaccctcacccaagtgaatgtggtggtggctgatgaggccgaggccctggtgcttcaaggagcaccctttctgggggtctgcaggtcactgcagaggagcggtctgttacatcttcccatttggagaacctctctcaaccgtgctgtagctggttctgcagaaacaggaagtacaggatttcatgggctggctctgctcgcctcgactgagcttcacacctctggatgccacatgctctctcccaaacactgctttcagtgcaaggtagtgggcctaaggggtttggttgtcttttttttttttcatttttaaaattttaaatttttatttattattattttttagagacaaggcctcactctatcgcctaggctgaagcacagtggtgcgatcacagctcgctacagccttgacctcctaggatcaagccatcctcctgcctcagcatccacagtagctgatgtgcaccaccagacccgtctcattttttctatttttattattttagagatggggatctcactgtgttggccaggctggtctcaaactcctgggctcaagcaatcctcccaccttggcctcaaagtattgagattacaggcatgagccactgcacccggcctttctcatttttatttttaaattgacagacgtaacagtgcgcatttatcacgcacaacacaatgctttgggaatggttaaatctagctcacaaatgcattacctcacacggttgtcatttttgtggtgaggcttggttgtatgttttgtttcattcatgtttttacatccttggagtctcctctgggtccgtcctttctttgctgtcatgctggcttgcctaaggcccaccgccacctgcgtacgagcattttaaactctagagtgagtgacagcctttttatggttggtgttactatttatttcctgcctctaaacttctcgtggtccttataaacttgtcaggatgtgtgttgcgttgaattctgcatgtcctttttttgcccaccctcaggttaagctggtactaacttatccccagaggaaacagggtttatgagcactgacagatgtcttccctgggcaaaaaaaaaaaaaatagtatatgtatacacacacacatacacatttatatttatatttcttaaagcttttaatccctttcattccctgatatctcagagatttcaaatcattgaacactgaagtatatttttcaggccagatgaaaaattgtattaaaaccctattcctggtcaggcgcagtggctcacgcctataatcccagcactttgggaggccgaagtaagcagatcacctgaggtcgggagttcaagacaaacctggccaacatggtgaaaccctgtctctactaaaactacaaaaaaattagcctgatgtggtgttgtgtgcctgtagtcccagctacttaggaggctgaggtaggagaattgcttgaacctgggaggcggaggttgcagtgagccaaaattacgccactgcactccagcctgggcaacagagcgagacagtctcaaaaacaacaacaacaacaaaaaccctattccttgcctttgtaggagtcaaaataaatgaacttcttttttcttttttttattattatactttaagttctggggtacacgtgcagaatgtgcaggtttgttacataggtatgcacgtgccatggtggtttgctgcacccatcaacctgtcacctacattaggtatttcccctaatgttatccctcccctagccctccatcccctgacaggccctggtgtgtgatgttcccctccctatgtccatgtgttctcattgctccaaaataaatgaatttacac

SEQ ID NO: 194038 - DNA, 1022 bp, Homo sapiens
  Payload ID: 18329
  Gene Name: transmembrane protein 241
  ENST ID: ENST00000542162
  CDS Start-End: 18-467
aggggacgagttgacagatgtgcgtgaggaggtctctggtcggcctcaccttttgtacctgctacctggcttcttacctcacgaacaagtatgtgctgtctgtcttgaaatttacctaccctacattattccaagggtggcagacgctcattggtggacttttgcttcatgtgtcctggaaactgggctgggtagagatcaacagcagttcaagatctcatgttcttgtgtggcttcctgcttcagtgctgtttgtgggtataatctatgctgggtccagagcattgtccagactggccattcctgtgtttctcactttgcataatgtagctgaagttatcatctgtgggtaccagaagtgttttcagaaagagaaaacatctcctgcaaagatctgtaggttgcaccttgaaagaacaagacaaaaccaaacttcaagactatcctcctgtttaaaaggagactagcaggtgtcaaagagaggcggtaaagctcatgatacctgatgtaatcagtgccctcctcctcctggccgcagcaggatgccttcccttcaatgactcccagtttaatccagatggatatttttgggctataattcacttactctgtgtaggggcttataaaattctacagaagtcccagaaacccagtgcattaagtgacattgaccagcaatacttaaactatatattcagtgtggtgctcctggcatttgcatctcatcccacaggtgatctcttcagcgtcctggacttcccattcctgtacttctacagattccatggtagctgctgtgccagtggatttttgggattctttctcatgttcagtacagtgaagctaaaaaaccttctggccccagggcagtgtgcagcctggattttctttgctaagataatcacagctggcttatcaatattgctgtttgatgcgatcctgaccagtgcaaccacgggatgcctcctgctcggtgcgcttggagaggccttgctggttttctcagagcggaagagctcctg

SEQ ID NO: 194039 - DNA, 1404 bp, Homo sapiens
  Payload ID: 18329
  Gene Name: transmembrane protein 241
  ENST ID: ENST00000581444
  CDS Start-End: 81-311
gctgctgctgcgggggtcgggcggcggccaggggatttgggcaggcaccgtggatccccgagaaggggacgagttgacagatgtgcgtgaggaggtctctggtcggcctcaccttttgtacctgctacctggcttcttacctcacgaacaagtatgtgctgtctgtcttgaaatttacctaccctacattattccaagggtggcagacgctcattggtggacttttgcttcatgtgtcctggaaactgggctgggtagagatcaacagcagttcaaggccattcctgtgtttctcactttgcataatgtagctgaagttatcatctgtgggtaccagaagtgttttcagaaagagaaaacatctcctgcaaagatctgtaggttgcaccttgaaagaacaagacaaaaccaaacttcaagactatcctcctgtttaaaaggagactagcaggtgtcaaagagaggcggtaaagctcatgatacctgatgtaatcagtgccctcctcctcctggccgcagcaggatgccttcccttcaatgactcccagtttaatccagatggatatttttgggctataattcacttactctgtgtaggggcttataaaattctacagaagtcccagaaacccagtgcattaagtgacattgaccagcaatacttaaactatatattcagtgtggtgctcctggcatttgcatctcatcccacaggtgatctcttcagcgtcctggacttcccattcctgtacttctacagattccatggtagctgctgtgccagtggatttttgggattctttctcatgttcagtacagtgaagctaaaaaaccttctggccccagggcagtgtgcagcctggattttctttgctaagataatcacagctggcttatcaatattgctgtttgatgcgatcctgaccagtgcaaccacgggatgacagaggaccagagggatggcacggagagtaggctccacacacagagagacattttctctttcaccagtgtacccaaggcaggatggcagtgcccagcacacagtaggtgctcaccaggctgcagagacggggtttcaccacgctgcccaggctggtcttgaacttctgagctcaagcgatccacttgcctcagcctcccaaagttatcggattacaggcatgagccaccatgcctggtccaaaacaatgcatgttaaaaacttagagcctggcacccagcaaacaatcaaggcatctattaccatcttatcatccttgtaactttatcatctcttctggaaatatgctccaacccagaagaatctacttcttagtctaaactttctgcgaccgtgttcctaaaatccagtgttcttttccagctatgaagtccacaacatgacctccctccaggtcctga

SEQ ID NO: 194040 - DNA, 571 bp, Homo sapiens
  Payload ID: 18329
  Gene Name: transmembrane protein 241
  ENST ID: ENST00000580025
  CDS Start-End: 81-311
gctgctgctgcgggggtcgggcggcggccaggggatttgggcaggcaccgtggatccccgagaaggggacgagttgacagatgtgcgtgaggaggtctctggtcggcctcaccttttgtacctgctacctggcttcttacctcacgaacaagtatgtgctgtctgtcttgaaatttacctaccctacattattccaagggtggcagacgctcattggtggacttttgcttcatgtgtcctggaaactgggctgggtagagatcaacagcagttcaaggccattcctgtgtttctcactttgcataatgtagctgaagttatcatctgtgggtaccagaagtgttttcagaaagagaaaacatctcctgcaaagatctgtaggttgcaccttgaaagaacaagacaaaaccaaacttcaagactatcctcctgtttaaaaggagactagcaggtgtcaaagagaggcggtaaagctcatgatacctgatgtaatcagtgccctcctcctcctggccgcagcaggatgccttcccttcaatgactcccagtttaatccagatggatatttttg

SEQ ID NO: 194041 - DNA, 625 bp, Homo sapiens
  Payload ID: 18329
  Gene Name: transmembrane protein 241
  ENST ID: ENST00000582336
  CDS Start-End: 62-625
ggcggcggccaggggatttgggcaggcaccgtggatccccgagaaggggacgagttgacagatgtgcgtgaggaggtctctggtcggcctcaccttttgtacctgctacctggcttcttacctcacgaacaagtatgtgctgtctgtcttgaaatttacctaccctacattattccaagggtggcagacgctcattggtggacttttgcttcatgtgtcctggaaactgggctgggtagagatcaacagcagttcaagatctcatgttcttgtgtggcttcctgcttcagtgctgtttgtgggtataatctatgctgggtccagagcattgtccagactggccattcctgtgtttctcactttgcataatgtagctgaagttatcatctgtgggtaccagaagtgttttcagaaagagaaaacatctcctgcaaagatctgtagtgccctcctcctcctggccgcagcaggatgccttcccttcaatgactcccagtttaatccagatggatatttttgggctataattcacttactctgtgtaggggcttataaaattctacagaagtcccagaaacccagtgcattaagtgtggtgctcctggcatttgcatctcatcccaca

SEQ ID NO: 194042 - DNA, 590 bp, Homo sapiens
  Payload ID: 18329
  Gene Name: transmembrane protein 241
  ENST ID: ENST00000577531
  CDS Start-End: 1-309
gatgtgcgtgaggaggtctctggtcggcctcaccttttgtacctgctacctggcttcttacctcacgaacaagtatgtgctgtctgtcttgaaatttacctaccctacattattccaagggtggcagacgctcattggtggacttttgcttcatgtgtcctggaaactgggctgggtagagatcaacagcagttcaagatctcatgttcttgtgtggcttcctgcttcagtgctgtttgtgggtataatctatgctgggtccagagcattgtccagactggccattcctgtgtttctcactttgcataatgtagctgaagttatcatctgtgggtaccagaagtgttttcagaaagagaaaacatctcctgcaaagatctgtagtgccctcctcctcctggccgcagcaggatgccttcccttcaatgactcccagtttaatccagatggatatttttgggctataattcacttactctgtgtagtgacattgaccagcaatacttaaactatatattcagtgtggtgctcctggcatttgcatctcatcccacaggtgatctcttcagcgtcctggacttcccattcct

SEQ ID NO: 194043 - DNA, 692 bp, Homo sapiens
  Payload ID: 18329
  Gene Name: transmembrane protein 241
  ENST ID: ENST00000578520
  CDS Start-End: 104-692
gggcggctgctgccgctgccgctgctgctgctgcgggggtcgggcggcggccaggggatttgggcaggcaccgtggatccccgagaaggggacgagttgacagatgtgcgtgaggaggtctctggtcggcctcaccttttgtacctgctacctggcttcttacctcacgaacaagtatgtgctgtctgtcttgaaatttacctaccctacattattccaagggtggcagacgctcattggtggacttttgcttcatgtgtcctggaaactgggctgggtagagatcaacagcagttcaagatctcatgttcttgtgtggcttcctgcttcagtgctgtttgtgggtataatctatgctgggtccagagcattgtccagactggccattcctgtgtttctcactttgcataatgtagctgaagttatcatctgtgggtaccagaagtgttttcagaaagagaaaacatctcctgcaaagatctgtagtgccctcctcctcctggccgcagcaggatgccttcccttcaatgactcccagtttaatccagatggatatttttgggctataattcacttactctgtgtaggtgatctcttcagcgtcctggacttcccattcctgtacttctacagattccatggtagctgctgtgccagtggatttttgggattctttctcatgttcagtacag

SEQ ID NO: 194044 - DNA, 1030 bp, Homo sapiens
  Payload ID: 18330
  Gene Name: transmembrane protein 242
  ENST ID: ENST00000367144
  CDS Start-End: 103-489
agattgcacaggaggaggcggtagcggaacctttctcctccgcctggttctcgcttccacccgggcccagttggggacggacgcactagaggcgacctaaacatggagacagcgggcgctgcaactgggcagccggcctctgggctggaggctccggggtccacgaatgaccggcttttcctggttaaaggtggaattttccttggtaccgttgctgcagcgggaatgctagctggatttattacaacattatcattggctaaaaagaaaagccctgaatggttcaataagggaagtatggccacggctgcattaccggaaagcgggtcttcccttgccttgcgagctctgggctggggctccctgtatgcatggtgtggggttggtgtgattagcttcgcagtctggaaagctttaggagttcacagtgtaagtaactactgtcttgtccctggtatctacatgtttattctgcttactgtgttctaaatttttctggttttcaaatttatttgcatgtagtttggtcactgtctagggagatgatgacagagtacgtgactaaattcttacaaataactagacaacttcttattactaataaatacaatttttgaaggtggtaaaacttcaaatataattaagtaatgactaatttatagctaatgttctatataaattgacattagggcgagtgcagtgggttatgcctgtaatcccagcaccttgggagcctgcggcaggcaaatcacttgagctctgaagtccaaaaccagcctgggcaatgtaaagaaaccctgtctctataaaaaaattagctgggtgtggtggcatgcgcctatagtcctagctactcagaaggctgagggaggaggatcacctgagcctcacaggctgaggctgcagtgtgccaagatcattgcgcttcagccttggcagcggggtaagaccctgtctcaaaaacaaagtagaataaataaacaaattgacattagcgatttgttcaataaaattattaatttggaacaac

SEQ ID NO: 194045 - DNA, 4043 bp, Homo sapiens
  Payload ID: 18330
  Gene Name: transmembrane protein 242
  Uniprot ID: Q9NWH2
  ENST ID: ENST00000400788
  CDS Start-End: 103-528
agattgcacaggaggaggcggtagcggaacctttctcctccgcctggttctcgcttccacccgggcccagttggggacggacgcactagaggcgacctaaacatggagacagcgggcgctgcaactgggcagccggcctctgggctggaggctccggggtccacgaatgaccggcttttcctggttaaaggtggaattttccttggtaccgttgctgcagcgggaatgctagctggatttattacaacattatcattggctaaaaagaaaagccctgaatggttcaataagggaagtatggccacggctgcattaccggaaagcgggtcttcccttgccttgcgagctctgggctggggctccctgtatgcatggtgtggggttggtgtgattagcttcgcagtctggaaagctttaggagttcacagtatgaacgactttcgaagtaaaatgcaatcaatatttccaacaattcccaagaactccgaatcggctgttgagtgggaggaaacattgaaatccaaatgagatgagcatggatgaatttcaaaatgcttgttacagaaaggggtggctctggagacaccatgacagcaaaaggactgggactgatttctcccaggaacatgggcagattgctgactgaaccagtgcactggatagcattcagcctcatcacaggagagtatgtgtgtgcgtgctgggggagggtaaagttttcccacagttaagaagactatttaaaaatagtaattacaggaataacttccttatgtggaggggaccccataggaaatgattctgtttgtaacagttgaagcaaatttcatactaaaaaagtttataataaaagtatgataagaaaatatttataaaacagaccccctaatagcaatagtactgcaatgtgtctaattaaaggagtttcaagagcctttcttgtcaatatatgacagaacttggaagtcttattctgattagccagactacaaagtgacagtcacctggtaagtcctgtatggtaggaagtgggtgtggctctcgggtcctaaatgtggtctgtgctttacagccatcacacacatgctagttatttacctgatgcccttgcttgaaggccctataaattcttatacttaaaacaaaaagccagtaatgagttgtgatcaccccaaaaggcacagttgggctaaaataatgatgatatcaggggtaaacatatttttttgagaagttggtctggatctctgaacactgacaatttgtcattttgtctcagttgtcaaagtaaaaaaagcccagttgtcatccgtcttcaatatttttaaccagaaagtcacctgagtacggagtcccaatataaagtatttgggaccacctccctaacaaagctgttagggtaaattctgtgtgcacgcccaactccctcctgtcttccacagtctcctacaaaaaaaacagatggagaataatgtctacatgcaattgtttttactgcaattgtattttaaaatattttcaagaagagaaatactttaatatgtcaatatgtccagagaaaaaacctgtagttaaatatcagttgtgcaatttcttcctacttgcctaggctctaattagtcagcaatcaggtttaataaaggacatttgaaatttctgttatcatgaaaccttttattctaagggagatttttaaatgaaatgacaagaacttaatgtaatacttttctctagaccatgttaccctgttaaaattgctgtattgttaatgaaacaggtgtaatcagcatctggaattcatatgtaatctgttaaaaatccaagactgaaaggaaaggattgtgaaattggtcagtgaatgcgggtagcaaaaactcttcactgcctttcatttgtaactaaatctcctctgagaagagatctgtaggctttgaatgaaaggaaggaaaggcaggagccaaaggaacaggttttcgtccatacaattagtctgaatctaggttcctctgaatagaatgggcaccgcctgatccttttgtgcttcataaatgtgggtttccaacgtgcatgagatggccctcaaaccttgttacaacgatgcactttactcgtttgatgtggggggaaaaagaatgggcactacctaaaactgtttacagctagaatctgggttttatttttcatagatggagaatgcctagtggtttctaaaggcctccactgggtggagaaaggagacttgcccacctgtctggagtgttaaaaggagaaatcattgttaactgattctgttaatggattcctgccttgtaacctcccgaagggcagggacccctctcagggccttgtaaactggtgtcagcaccgctgcagaggctgctgcacatcaggctgatggcagctaggccctaggaaggagccaggggccatggtgggggctctgctttcccacagggctggcacagaggaggcctagacatatgttgctgaaagagtgtcctaatactagagtggcatgcctcgtgtctacaaaacccttatatgtcacctctgctgtccttgaccgatggcaggggaactcccattagaatgatgatgaatcccctgcagaggggaggctggcagggacaaattccctaaaagagggaccaagcgtcagctccaattgcatcttaaaagcaaaggtgaagtaatgcacagatggaaatttaaaaagaaaacaagcagtatgactcaagtggtgtttttcacagtcagaacttgaatatcagtagatttcgtcatttgtctattccttttgtaccagaggcatattgttaaattggttaatggaaaggaaaaatgttgaacagataatgttattctttatgagacgtaccatctgtgtattgagctctgaatgtccctggatatggaagagaggaaatgtgatggaatttcaagtttgccttctttgctgtctttatcttgggttgagtatgacaaacataatcacatttatctcctggagcataaagagttttaatcaccctattaaccaggatgacatttttcacagacttaaaaaggaatagaacagacattatctccctataagcaatccatttcatggaggctgagcactagaaatgctttaaaggatggataacgcaggccatttccatttcctgtctaagccaacattaaggaggctttcggtaaggctgttgcttccactgggtgagtgttaagctttacacttagagtctcagcgcccaaaagagctattagagaaagcacgggcagggaggagtggcttccgagaccccaggattcattcaagggaaaacatgtatcctggtaagttgctgctgccctgtgaaaaggagtccataggctgctgttatattcagagtcaagaaagtgtgggttcaggacaacctgagagtggaaagtgggggacgggagctgcctccgaagacgcccggcagcccatcaccaggaggaccatggcccaagggcatggaagcatgtggctgctgagagggtcgtgggccatctccaccaccaccctcgcgtcagggcatgggcccaggctggcgttaagggcactttgcctgcttagtcaaaaggtggcatcgaatcacctgggctgtcacatgttttgtttagtttcatggatagtatgggaccaaacttgcaaattaatcattgcaatctaaggggaaaatagaagaaattaaggtgggggtggggggacggggagcccatggggataaaagtaattaaaatccattgaatttagctatttcacttggggcaacatttaatctccaagattaaatcttggtttatggggaaggttatatattttcatctcatttttatgtatcatctttaagacaaattgttaagtacaaatgaaaatcaggtaacatacaaaggcatttcatcaaatagttaaatttcctatgaaagttagtaaaatacatatttttataataccatgttcaagtgaagtgtttttgctttctgccaagagtcattaaatgatatagcaagta

SEQ ID NO: 194046 - DNA, 1063 bp, Homo sapiens
  Payload ID: 18331
  Gene Name: transmembrane protein 243, mitochondrial
  Uniprot ID: Q9BU79
  ENST ID: ENST00000257637
  CDS Start-End: 231-587
cacttcctgcggcagctgctcaagatgaggaggtgcgcggggccggggcggagcagtcgcgttccccgcgtgtgagcccccacccatccctggcgccagcgcttccccgaccactcgggttcggctatgcgggagccgtgaggaggaggcttgcagtcgtggacctgagacctcgggaggtcatgctgtcttgcttttaagtggcttggggaaagtgaagaaaccccaaaatggaggactttgctaccaggacctacggcaccagtggcctggacaacagacctctgtttggggagacgtccgccaaggatcgaatcatcaatttagttgttggcagcttaacatccttattgattctagtaacgctgataagtgcttttgttttccctcaactacctccaaaaccgttgaatatattctttgctgtctgcatctctttgagtagtattactgcctgcatacttatctactggtatcgacaaggagacttagaaccgaaatttagaaagctaatttactatatcatattttctatcatcatgttgtgtatatgtgcaaacctgtacttccatgatgtgggaaggtgaggctgccaaggagaagtacttaccaggactcttcaaaatgatacattaggacagtgagtaatttttggataaggtatgctgaagaatctcctgcagaagtctgatacatgattttcatgttaattgtaaatgttaattccctcttgcaagggagacatatcctagatcactttgctttttctttaaggagctgatgttgcacctaaacattccaacccttaaagctaaaacagcacaaaaaaatttcacttttgaaatgaaatttttataattgtatggcaaaaggctatgtaaaaacaaatcttgcatcttaagacaaatattcttttatttctgttaaactgaatatacaattgttccctaggcaaccaacttttgcttataactacaatttaatttcacgttgacaaaacacagtgaaaagacaactttgtgaagatctaattacaataataaataaaataatttatacaagg

SEQ ID NO: 194047 - DNA, 1273 bp, Homo sapiens
  Payload ID: 18331
  Gene Name: transmembrane protein 243, mitochondrial
  Uniprot ID: Q9BU79
  ENST ID: ENST00000433078
  CDS Start-End: 443-799
gggcgggccgacttgcgacggaggcagcgggtccgggtcgggggacctgagaaggagccgggaggtgatccgcagcgctgcgacgggaccgcgcgattcctctcccacgcatctggcccgcgttcctgggcctcggcaccggatcccggcgggggtgtggacccagggcccactctccccggcgcggccagggccccccagcgtgcgagcgcctaggggatgccgagctgctcaagatgaggaggtgcgcggggccggggcggagcagtcgcgttccccgcgtgtgagcccccacccatccctggcgccagcgcttccccgaccactcgggttcggctatgcgggagccgtgaggaggaggcttgcagtcgtggacctgagacctcgggaggtcatgctgtcttgcttttaagtggcttggggaaagtgaagaaaccccaaaatggaggactttgctaccaggacctacggcaccagtggcctggacaacagacctctgtttggggagacgtccgccaaggatcgaatcatcaatttagttgttggcagcttaacatccttattgattctagtaacgctgataagtgcttttgttttccctcaactacctccaaaaccgttgaatatattctttgctgtctgcatctctttgagtagtattactgcctgcatacttatctactggtatcgacaaggagacttagaaccgaaatttagaaagctaatttactatatcatattttctatcatcatgttgtgtatatgtgcaaacctgtacttccatgatgtgggaaggtgaggctgccaaggagaagtacttaccaggactcttcaaaatgatacattaggacagtgagtaatttttggataaggtatgctgaagaatctcctgcagaagtctgatacatgattttcatgttaattgtaaatgttaattccctcttgcaagggagacatatcctagatcactttgctttttctttaaggagctgatgttgcacctaaacattccaacccttaaagctaaaacagcacaaaaaaatttcacttttgaaatgaaatttttataattgtatggcaaaaggctatgtaaaaacaaatcttgcatcttaagacaaatattcttttatttctgttaaactgaatatacaattgttccctaggcaaccaacttttgcttataactacaatttaatttcacgttgacaaaacacagtgaaaagacaactttgtgaagatctaattacaataataaataaaataatttatacaa

SEQ ID NO: 194048 - DNA, 544 bp, Homo sapiens
  Payload ID: 18331
  Gene Name: transmembrane protein 243, mitochondrial
  ENST ID: ENST00000455575
  CDS Start-End: 530-544
ccgggaggtgatccgcagcgctgcgacgggaccgcgcgattcctctcccacgcatctggcccgcgttcctgggcctcggcaccggatcccggcgggggtgtggacccagggcccactctccccggcgcggccagggccccccagcgtgcgagcgcctaggggatgccgaggtttggcgggcgcgggaccaatatgggcagggccgaggcgggattctccctctcgctgtgcctagaccgtactcctgctgcagttccggcagagagcgcggggagagcagcggcgggagctgcggcgagcacgccggccctgggctgctcaagatgaggaggtgcgcggggccggggcggagcagtcgcgttccccgcgtgtgagcccccacccatccctggcgccagcgcttccccgaccactcgggttcggctatgcgggagccgtgaggaggaggcttgcagtcgtggacctgagacctcgggaggtcatgctgtcttgcttttaagtggcttggggaaagtgaagaaaccccaaaatggaggactttgct

SEQ ID NO: 194049 - DNA, 601 bp, Homo sapiens
  Payload ID: 18331
  Gene Name: transmembrane protein 243, mitochondrial
  ENST ID: ENST00000423734
  CDS Start-End: 128-487
tccccgaccactcgggttcggctatgcgggagccgtgaggaggaggcttgcagtcgtggacctgagacctcgggaggtcatgctgtcttgcttttaagtggcttggggaaagtgaagaaaccccaaaatggaggactttgctaccaggacctacggcaccagtggcctggacaacagacctctgtttggggagacgtccgccaaggatcgaatcatcaatttagttgttggcagcttaacatccttattgattctagtaacgctgataagtgcttttgttttccctcaactacctccaaaaccgttgaatatattctttgctgtctgcatctctttgagtagtattactgcctgcatacttgtaagtactgttgagaatttaaacagtgttcttgagggtttaagttgcaatgcacaggacaaaaattttcagccttgggtctatacaaaagggtatctcttaattatatcctcatcctccccctaaaagtatgttagaattctcaataaaatctgagtcttctccttttctcctaaatcccaaagttgtaaccccaaagagaaattccactcccttgatagcttaaaaaaaaaaaaaaaa

SEQ ID NO: 194050 - DNA, 545 bp, Homo sapiens
  Payload ID: 18332
  Gene Name: transmembrane protein 244
  Uniprot ID: Q5VVB8
  ENST ID: ENST00000368143
  CDS Start-End: 84-470
cacggtgacaattgtgtcttcttccagatgtcatcgctataaggagtggggctttcatcacctccttgacgtaggatgtgtacatggctctccaggtcagagttgctccaagcaaggttgttttgcagaagtttcttctatgtgtcattcttttctacactgtgtactatgtgtccctgagcatgggctgcgtgatgtttgaggtgcatgagttgaatgtcctggctccatttgatttcaaaacaaatccctcatggctcaacataaactataaagttcttttagtttcaacagaggtcacctactttgtttgtggattgttttttgttccagttgtggaagaatgggtttgggattatgctatttcagtcactattcttcatgttgccatcacttcaactgttatgttggaattccccttgacatcacattggtgggctgctttaggtatatcaaaattgcttgtttagattctctaatgcacagaaataatgttaaatagaataactgtggaaatatattttattttctcatagattttacaa

SEQ ID NO: 194051 - DNA, 565 bp, Homo sapiens
  Payload ID: 18332
  Gene Name: transmembrane protein 244
  Uniprot ID: Q5VVB8
  ENST ID: ENST00000438392
  CDS Start-End: 182-565
gtttctaatttaagtatgagacagtaattactcatacagccagagaggattccaagtccctgcctatttgccgcactatctaaaaacaatcaactcatctttcaaatctgaccaaactacaaatgatgtcatcgctataaggagtggggctttcatcacctccttgacgtaggatgtgtacatggctctccaggtcagagttgctccaagcaaggttgttttgcagaagtttcttctatgtgtcattcttttctacactgtgtactatgtgtccctgagcatgggctgcgtgatgtttgaggtgcatgagttgaatgtcctggctccatttgatttcaaaacaaatccctcatggctcaacataaactataaagttcttttagtttcaacagaggtcacctactttgtttgtggattgttttttgttccagttgtggaagaatgggtttgggattatgctatttcagtcactattcttcatgttgccatcacttcaactgttatgttggaattccccttgacatcacattggtgggctgctttaggtatatcaaaattgcttgtt

SEQ ID NO: 194052 - DNA, 7980 bp, Homo sapiens
  Payload ID: 18333
  Gene Name: transmembrane protein 245
  Uniprot ID: Q9H330
  ENST ID: ENST00000374586
  CDS Start-End: 33-2672
cgcccctcgggggcggctgtggcggaggaacgatggccgacggcggcggccctaaggacgcgccaagcctgcggagctctcccgggccggcgccgcgggtcccgcgcgcggtcgggccgagtggcggtggcggggagaccccgcggaccgcggcgctggcgctgcgcttcgacaagcccattaagcaggccttctacaacaccggggccgtgctgttcgtgtgcctgtgctgcggcgccgcggtgctggtctacttcatcctggaggccttcctgcggccgctgctctgggccgtgctatgcggcacttttctgcaccccttcaagagctcgctgacgcgcctgggccgccactggctgcagcgcctgcaccgcgcgcacacgcccatcgtcctggccgcgctgctcctgccgctctgcttcgtcgactacggcgtcgaggccctgggcgagcaggcgctgcgccgccgccgcctgctcctgctgctcggcgccggcggcccgctcctgtacggcctctactgcctcggcagctacttgggcgtgcaggtgctgctggtgcacgctgccacgctcatctgccgcgggctggactacttcagcagcctgtggatctggacgttggtggttggctatgtgttgactgtttcattcaagtggaatgcaagcactgaacgctacttgagagcagtttcaattcctgtctggattatattgctttttcatttagcatccctggctggctcatggagaattccagtattcctggttattgttttcctgatgtctgtgggtaccctctatgaaaaacagaatggaaaagagtcttctggggcagagttaccagggcaggttatctccatggcagcttctactctggcaaacttggccatctctatcacagggtatgaatcaagcagtgaagaccagccctccactcagcctgcagaagcagtggacaggggagaatccgctccaacgttgtccacctccccttcaccctcctccccttcacccacttccccttcacctactctgggcagacgaaggcctgaaataggaacgtttcttagaaagaagaaaactagtgacatctactttgtgtctctagtttgggccattgtcgtcatgcagatctggttgaacctgtggattgtgcagttgctgccagtgccgattgcagtctggatactcaaaaagcttgtcattcactttggagttgtggatttcctagagaaacgctaccatgtgtggtggggcattatagaaagcttcctgaaggagcggcagggagctctcgcgccttggcccattgtcgggcttggaaaattcttgttaaaagttgatagcaagctctggcactggctaaataagaagatgatcatctggttggagaagatgttagataaaataattagcattttcatcatatttttgttagtgataggaactcttcttttagccctactcctgactgcaaaggtacatcaagagagtgtacacatgattgaagtcacaagtaatttgattaatgaaactctagcaaatcaccctgagtgggcaaattggcttcctgaggctcaggtagtccaaagagccctgaattctgcggctaacaacgtgtatcagtatggacgagaatggataactcacaagctccataaaattctaggagataaggtgaacaatactgctgtaattgaaaagcaagtactagaactttgggacagactgtatcactcttggtttgtaaagaatgtaacacactctggaaggcacaaaggacagaagttgcatgtcagtcgtcagaatagctggctgggagacattctggactggcaggatattgtttcctttgttcacgagaacattgagacatttctttcgatcttggagtctctgtggatcgttatgagccggaatgtgagcctgctgttcaccactgtcactacactcttgaccatcctcttctacagcgggacagcccttctcaattttgtactctctctgataattttcctgaccacactattttatctattaagttccagtgatgagtactacaagccagtgaagtgggtgataagcctgactccactatctcagccaggtccttcttctaatattattggccagtctgtggaagaagctatcagaggggtgtttgatgcttccctcaaaatggctggcttctatggattgtatacctggctgactcatactatgtttggcatcaatattgtcttcataccatcagcattagcagcaatccttggagcagtgccattcctggggacatactgggcagcagtacctgcagttcttgacctgtggctgacacaagggttaggatgcaaggccattttactgttgatttttcatctcttgccaacatactttgtagatactgcaatctactctgacatatcaggaggtggccatccttacctgacaggcttggcagtggccggtggagcatactacctaggcctggaaggagcaatcatcggtcctattcttctctgcatacttgtggttgcttccaatatctatagtgccatgctagtgagtcccacgaattcagttcccacgccaaaccagaccccatggcctgctcagcctcagcggactttccgtgacatttctgaagatctgaaatcttcagtaggttgatgtggtttcctctgcagtgatttttctaggaagttcaaatttgacagcgagttcagctcagctgtggccctctgcccttccagctgtgcctagcaagcaaaacccaggaaagaagcagaagcctcctggccttacatacagaatgcctggacaagagagaacttgctgcgggctgctttgtattttaaaacacagcttgagagttcagagttggtggtttgctcacttaactgttgttaagatggcttgaaaagtttcattttatacactggtaccctggcttgaaatttttccactttggttatctatgttactatattatatatttataaagttattttaagaactctaaactacctgctgttaaaagaatagatggtgtaattttttcctggtttaagaaatgtattgttaaacttttctaagacagtcacttttcaaggaagagggctttcacttttgagtgtgtagttgagtgagcaggaaaaatgaatcttctacccttctcccacaatgtattatacgctctttaagaaataataaatcataagtataagggtggggtggcttatttgatgttcagttttatattataaccctgggagatacaaagactgaagctcttcctcctcttccttttctcttcacgcttctttacactattgccaaattataaaacttggctgaccacgttgaagtgaaatacttattaagctgctatgaatggtaacagtatgataaaattcatgctgttattaggttttctccttccaggtggttgaagtgaaaaatctcaggtgtagcaatactctgatttgttaaatgtatccgtttcattatttggaactctgccaataagttagttttcagcagaattttgtatttatgtagtattttcccatctcttagcacagtgccttgcacatgactctaaatgaatgcttgttgaattgaattgcaactttaaaaatatctcagatatcacaataaccagcatagtgctttacattttacaaagtccttttgcacatactatttcacaagtacatcacatcagctttcatatagctttatattattttacatcagttttacactgatggagaagctaaggttcagaaaagtgaccaactcaaagtcgtaaagtgtagtaggatttggcctcagatctttgactccgttgtgtgcagattctgctgtattagtgttccttctaaatattgtatgcagttttcccagtgttacgagattggtgttgctatccatttgttgtgaatgaagacttgtcctatagtacatgacagggctgagagtggactgtagttcttagctgaaccctttctactgtttaaaacaatcatcaggcctatcctctgctcccaggggaatgtgggagagaaaagggttcttggccaggctgtaggtggtggctcacatctgtaatcccagcactttggaaggctgaggtgggtggattgcttgagcccagggatttgagatcagcctaggcaacatggcaaaaccccatctctacaaaaaaaaaaaaaaaaaaaaaaaaattagctgggcacggtggtgtggctatagtctgagctactcaggaggctgatgtatgaggatcacctgagtccaggaggtcgaggctgcagtgagccaagatggcgccactgcactccagcctgggtgagagagtgagacactgtcccaaggaaaaaaaaaagtgttggggggtagttcttaagcgttgaagatttcctttttggaaagtatttaaaggtagaaatattaataatttttcctaaaacatctccctaagaagtcactgataattataattagtttaaatttattcttacactacttaagaaaaatttcatttagaaaaggctaccatgagatcttttgactatatggagtagactgcatacagatctctttatttctattatgaatattttagcgattataatcagctattccactgagtattagatttggtcactaagtaactcatgtttttctttagtcaatcattcattcattcactaaaacatttgttgagagttggctaaactctagattctgtgccaggcactgtacagggtgatggagatcactcataagaaggcctcttgctcttagccagatcatatgtaatactaaatttaaattttttgcattaaaaggctaaaaaatcatttgtttttgttaattatatactggttgatttatagatgtaattagcacatattcataagagacaaatatatacaatgagttactatacatatacaaagtgattttagctgtataaagtgatattgcaaaaaactacagctaatgtttcttgctgggtaattattagcataaatatcaggttcttagaggtctttaagagaatactttagagctaccaaaattagcagcagtgatgtaatatcaccctgaaataccaggagcagaggtgccccagagtgcttcacagctatgatcaggaaacttgacctgccccattgctacagcaacggcataaggactaggaaggtccactagctggggaggtcttggaaccctccgagccagaaagaagcattccagcatgattcctcagatgcaatgaggaaggtttacagaattttcacagggcaacagagatcaagtggtatgaaaaggtaggagttttaagctcaagtctcaaagataacctacctttacattctcagtcagaatttgacccagaaagaggaagtttcttcaggaacagaccgtacgttgatgaagtagaagtcatttcagtaaaaacggagtacagaacttggtcataatatcttgcattttatagatttattaaagattagtttcaagttcacattcgctattcagttgtaaaccgaatggatgggaggggagaaaatacaagctctccacacaggtatgctcctctcttttctgagagagaaggcatgggattttcagcataaattccatgttatgtgagtgctgtttgagttctgaagttcctatcaatatctgttcctgcaagtgatctctgtaagaccaccttacatgctggtcttagttattgttaaaattgcaaggtttcttcacaccctctttgataagaagtgtttagctggcagagctttcccttgacttctgagtctagtgtgggttggcccatgacagtgggaagaaatccaacatgttacatggagaccttgtatgtaaacaaactctgtagcctttgaaagtggaactgctttttacagttaaagggctgctaaatggcttgcagatgagatcttctggctcaccttgatcttcacatgaacccattgtgacctatctggatttcctaggacctgtagtttccatttgggttatattagtgcctcaggaatgtgtcactactggtcaagcaatactcagaaattcaggctgtgaggggttagattagaggaaagtaatttaggtgagctatccagagctttcaacctcagggtttataggaaaaaaaaacaaaatacaaaaacccttaggacttctcatactctagccctgaccttgcagtctcctctgaggggcctcctaagacccttaaaataatattacaataggactttgagtgtgcatttcacagtggaaatagcctctggctagcattacttccaaatgctagttccagctaaaaacaagtactttttattagtttcttgtctttcaacattctgccatcaaaatatattcattttattaacttaccgattattgggaacctgcaaaaaaaaaaaaaaaaaaaaacacacatgctgtctgcagccactgtttggttatttttgatagtttaagagaattataaatcaagttgttctgtctactagagtcagaaattctgtgctagaatgggacttctaaaattaggtggtcctgtcactttctagagaaagacccaaattcataggtttaagtggcttgtctgacatacacatacagccagttagtaacagaattcagaatagaatagagttcttttttttctgtcagtccgttgttctacttctctttccttttcttcatggttgagcagcttttggcaaaatgtgttccatatagcagtagttccaagagatgttaatagatgtaagaaaaaaagtgtgtgtgtgttgggggtgggggattgcatggtcaattaaaatgaaggaatgctgagtttgtttccttactgtaggacttctaagagttttgaacatgctattacacattgtgaatttataaaaggggacaaacactgtttgaccttagactgcactccccttctttattcctcagagcatctcaaaggactacagggtcctttgagaaacatggcccttgatcaagtttacaactctttgagaagacatccctaatggaaatactgaatggcagatctattactgtggtaccatgtagtgtgtaataaatcttgaagtccagaaagcaagtatatttgctgtttagagctatacttaaggtatagagattcttttccacctgtggtgtgtaaaatcagtattgtgtttaattttgcaggtttttcaaggatcaactaatgtgcaaatacagtggtgatatattgatattacattttaataatgcttttgtatggcactttatagttttcagacaccttttgtaacagccctgtgagacagacaatattatccttattgtacagatgggggggctctggaggctctgaaaagtttttggtgatattcccctaagtttataccacaaaatgatggagccagaatttagttgcagaacttctgactccaagtccagagttctttactagacatctggtttcttactagctttttgctagctttttattttacagtgaaaagtatggaagcaaatcctgataattttggcttattatcaaatatcatttattttttattgcagagacccagcagatgtaactctcattgtagccatcccaaagaaaacccttctttgccctttgcagtgccacttatttaggtaactgaagtgtatttccagtacaatttgattttgaactaagatttgatatagagttgtaattgcttacataactctttgaaaatgtatcatccctgggttctcaggtgaaggaggcaattcaaaagtaaaaaagaatattcgaatacaataaataccctctgttctcacacaaatgctgtttcttagctaacttgctttgacaacctactgatgtaacttctttattaatgtgaaatatttatattttgaaataaaattactagtgttgaatgaa

SEQ ID NO: 194053 - DNA, 1973 bp, Homo sapiens
  Payload ID: 18333
  Gene Name: transmembrane protein 245
  ENST ID: ENST00000413712
  CDS Start-End: 1-1417
agagaaacgctaccatgtgtggtggggcattatagaaagcttcctgaaggagcggcagggagctctcgcgccttggcccattgtcgggcttggaaaattcttgttaaaagttgatagcaagatgatcatctggttggagaagatgttagataaaataattagcattttcatcatatttttgttagtgataggaactcttcttttagccctactcctgactgcaaaggtacatcaagagagtgtacacatgattgaagtcacaagtaatttgattaatgaaactctagcaaatcaccctgagtgggcaaattggcttcctgaggctcaggtagtccaaagagccctgaattctgcggctaacaacgtgtatcagtatggacgagaatggataactcacaagctccataaaattctaggagataaggtgaacaatactgctgtaattgaaaagcaagtactagaactttgggacagactgtatcactcttggtttgtaaagaatgtaacacactctggaaggcacaaaggacagaagttgcatgtcagtcgtcagaatagctggctgggagacattctggactggcaggatattgtttcctttgttcacgagaacattgagacatttctttcgatcttggagtctctgtggatcgttatgagccggaatgtgagcctgctgttcaccactgtcactacactcttgaccatcctcttctacagcgggacagcccttctcaattttgtactctctctgataattttcctgaccacactattttatctattaagttccagtgatgagtactacaagccagtgaagtgggtgataagcctgactccactatctcagccaggtccttcttctaatattattggccagtctgtggaagaagctatcagaggggtgtttgatgcttccctcaaaatggctggcttctatggattgtatacctggctgactcatactatgtttggcatcaatattgtcttcataccatcagcattagcagcaatccttggagcagtgccattcctggggacatactgggcagcagtacctgcagttcttgacctgtggctgacacaagggttaggatgcaaggccattttactgttgatttttcatctcttgccaacatactttgtagatactgcaatctactctgacatatcaggaggtggccatccttacctgacaggcttggcagtggccggtggagcatactacctaggcctggaaggagcaatcatcggtcctattcttctctgcatacttgtggttgcttccaatatctatagtgccatgctagtgagtcccacgaattcagttcccacgccaaaccagaccccatggcctgctcagcctcagcggactttccgtgacatttctgaagatctgaaatcttcagtaggttgatgtggtttcctctgcagtgatttttctaggaagttcaaatttgacagcgagttcagctcagctgtggccctctgcccttccagctgtgcctagcaagcaaaacccaggaaagaagcagaagcctcctggccttacatacagaatgcctggacaagagagaacttgctgcgggctgctttgtattttaaaacacagcttgagagttcagagttggtggtttgctcacttaactgttgttaagatggcttgaaaagtttcattttatacactggtaccctggcttgaaatttttccactttggttatctatgttactatattatatatttataaagttattttaagaactctaaactacctgctgttaaaagaatagatggtgtaattttttcctggtttaagaaatgtattgttaaacttttctaagacagtcacttttcaaggaagagggctttcacttttgagtgtgtagttgagtgagcaggaaaaatgaatcttctacccttctcccacaatgtattatacgctctttaagaaataataaatcataagtataa

SEQ ID NO: 194054 - DNA, 2435 bp, Homo sapiens
  Payload ID: 18333
  Gene Name: transmembrane protein 245
  ENST ID: ENST00000491854
  CDS Start-End: 90-851
caattcctgtctggattatattgctttttcatttagcatccctggctggctcatggagaattccagtattcctggttattgttttcctgatgtctgtgggtaccctctatgaaaaacagaatggaaaagagtcttctggggcagagttaccagggcaggttatctccatggcagcttctactctggcaaacttggccatctctatcacagggtatgaatcaagcagtgaagaccagccctccactcagcctgcagaagcagtggacaggggagaatccgctccaacgttgtccacctccccttcaccctcctccccttcacccacttccccttcacctactctgggcagacgaaggcctgaaataggaacgtttcttagaaagaagaaaactagtgacatctactttgtgtctctagtttgggccattgtcgtcatgcagatctggttgaacctgtggattgtgcagttgctgccagtgccgattgcagtctggatactcaaaaagcttgtcattcactttggagttgtggatttcctagagaaacgctaccatgtgtggtggggcattatagaaagcttcctgaaggagcggcagggagctctcgcgccttggcccattgtcgggcttggaaaattcttgttaaaagttgatagcaagatgatcatctggttggagaagatgttagataaaataattagcattttcatcatatttttgttagtgataggaactcttcttttagccctactcctgactgcaaaggtacatcaagagagtgtacacatgattgaagtcacaagtaatttgattaatgaaactctagcaaatcaccctgagtgggcaaagtaagaatattgttttgaaaaagaagagagatgaatggcctagtttcagcatctgtttgcacgaaatgaccttcattgatgcagctgcattggaagataaaagataggttggcttcctgaggctcaggtagtccaaagagccctgaattctgcggctaacaacgtgtatcagtatggacgagaatggataactcacaagctccataaaattctaggagataaggtgaacaatactgctgtaattgaaaagcaagtactagaactttgggacagactgtatcactcttggtttgtaaagaatgtaacacactctggaaggcacaaaggacagaagttgcatgtcagtcgtcagaatagctggctgggagacattctggactggcaggatattgtttcctttgttcacgagaacattgagacatttctttcgatcttggagtctctgtggatcgttatgagccggaatgtgagcctgctgttcaccactgtcactacactcttgaccatcctcttctacagcgggacagcccttctcaattttgtactctctctgataattttcctgaccacactattttatctattaagttccagtgatgagtactacaagccagtgaagtgggtgataagcctgactccactatctcagccaggtccttcttctaatattattggccagtctgtggaagaagctatcagaggggtgtttgatgcttccctcaaaatggctggcttctatggattgtatacctggctgactcatactatgtttggcatcaatattgtcttcataccatcagcattagcagcaatccttggagcagtgccattcctggggacatactgggcagcagtacctgcagttcttgacctgtggctgacacaagggttaggatgcaaggccattttactgttgatttttcatctcttgccaacatactttgtagatactgcaatctactctgacatatcaggaggtggccatccttacctgacaggcttggcagtggccggtggagcatactacctaggcctggaaggagcaatcatcggtcctattcttctctgcatacttgtggttgcttccaatatctatagtgccatgctagtgagtcccacgaattcagttcccacgccaaaccagaccccatggcctgctcagcctcagcggactttccgtgacatttctgaagatctgaaatcttcagtaggttgatgtggtttcctctgcagtgatttttctaggaagttcaaatttgacagcgagttcagctcagctgtggccctctgcccttccagctgtgcctagcaagcaaaacccaggaaagaagcagaagcctcctggccttacatacagaatgcctggacaagagagaacttgctgcgggctgctttgtattttaaaacacagcttgagagttcagagttggtggtttgctcacttaactgttgttaagatggcttgaaaagtttcattttatacactggtaccctggcttgaaatttttccactttggttatctatgttactatattatatatttataaagttattttaagaactctaaactacctgctgttaaaagaa

SEQ ID NO: 194055 - DNA, 4223 bp, Homo sapiens
  Payload ID: 18334
  Gene Name: transmembrane protein 246
  Uniprot ID: Q9BRR3
  ENST ID: ENST00000374847
  CDS Start-End: 302-1513
agctgcgaggcgggaggaggtgaggctccggcgcacacccaaaccgcgctgcgcccgctccttccgggccccggagatggcgcctccaccgggatgagctagccagcctgggcaataccagaggcggccctcggcgcgcgcaggggaccgagctggtcgccccaaccggcaaagcagtcatctaatcttgaatgaaggatctgatcccagctcctgtgtcctaggtttgatttctgatgactctggcctgagttccaggatggttttttcttgggaccagacatgaacaaaagttgacctcatgagcacttcaacctctccagctgccatgctcctccggaggctgcggcgactctcctggggcagcactgctgtccagctcttcatcctaacagtggtgacgtttggcctgctggcccccctggcctgtcaccgacttctacactcttacttctatctgcgccattggcatctgaaccaaatgagccaagagttcctgcagcaaagcttgaaagagggtgaggctgccctccactattttgaggagcttccctctgccaatggctcagtgcccattgtctggcaggccaccccccggccctggctggtgatcaccatcatcactgtggacaggcagcctggcttccactacgtcctgcaggttgtgtcccagttccaccggcttcttcagcaatgtggcccccagtgcgaggggcaccaactcttcctgtgcaacgtggagcgtagtgtgagccattttgatgccaagttgctctccaagtatgtccctgtggccaatcgctatgagggcactgaggatgattatggtgatgacccttcgaccaactcgtttgagaaagagaagcaggactatgtctattgcctggagtcatccctgcagacctacaacccagactacgtcctgatggtagaagacgatgctgtaccagaagagcagatcttcccagtcttggagcaccttctgcgggctcgcttctctgagccacatctcagagatgccctttatctcaagctgtatcaccccgagaggctccagcactacatcaatccagagcccatgcggatcctggaatgggttggtgtaggcatgttgctggggcccttactaacctggatatacatgaggtttgccagccgcccagggtttagctggcctgtaatgctcttcttctccctgtatagcatgggtctggtggagctggtgggtcggcactatttcctggaactgcggcggctgagtccttccctgtacagtgtggttcctgcctctcagtgttgcaccccagccatgctcttcccggcacctgcggcccgccggaccctcacctacctgtcccaagtgtactgccacaagggctttggcaaggacatggcactgtactcgctgttgagggccaagggagagagggcctatgtagtggagccgaacctcgtgaaacacatcgggctcttctccagtctccggtacaactttcatcccagtctcctctagggtgccaagagatgcctttctgaagttggccacttcttgaagattcaaatatttatctctttatttagacatggttgcctgcaggtatttcactgtttactgttgttagagatataggcactggggcagctgaggaacctcaatatgttaagagccttggctttggtagcctcctggcaggagcagcagtttgccacaggtccggacctctccctccacacagccacactgcctcatgcagtctgacccacccagtgagggtgcatttgaacactgattatattctccatttgtttttaagctctgctttgtgttagagcttgtgactgccaaaaattttgtgcacagtgatatgactgttttaggatcttaagggtagaattttgtgaaaggtgagatcctttggaattgagttctttctcattgggtatgaaaatggatgtatgtttagaatatatgcccaacgaggcaggaccatgtggatagattccatttgtttccttgacctgatgtaataaaaactgataaaagccgtgcagtgcccggcatcttggaggcaggtgatctggcttttctgttacctgggattttcttttcctatatatctgtagtgcactgataattgatattgttagtgagaactttaaggcacgacaagatctggaagagcttgtgaaccatcaaagtcagattgcttatgttgagtagtgatttaacattgaacatttctgtactactctgactctttgaaaattggacatttcagaatgatacaatataggggagctctttacaagtagcatatcatttttcctgactttcctggctgactgcttaccttcatttctttttcttctaggtagcatgatgttatagaaaaaaaaaaaaaaaaatcatggactgaagtcagaagacctgaccttttatttcagatctctgccatggcctaacgacgtgaccaccttgggcaggtcatataatcactctgggtctcaatttcttcacctgtaaaatgaggacagtaatacttacatgttaaagttgccttgaggattaaatggcagaatatatgtaaaacacctagcaagtgcttagtccatagaagacgcttggcaaacttttctctcctataataaacatatacaactcaagcttatttcggaaaaagatattggtgatgttgtttaaagtatgagatagggcatggagctgccacctatgtaccagctattccagatgaccaagccctgctagaataaagactgacttttcattgtgacctctgaaggatgtgcagctcagctttcacctatccccacgttcacccaagccaaaaagaagaattgttcattcaaactggaaatgatctccagcttggaaatgagactcctcatgagcttattctaagatcagagtctgaaaattattttctcaaaagttacaaataaatgtcttttaacagtactgtcagactagtgaccaacaagttactttatgaggatggatgatgatattagagttcaagcaattgtccagtttgtttcgatgccacagtttgcttttaaattcccatagtgagcttccatcttgagacccactcaacacagaaggattacataaaggttgatcacccacgctctacagatgaacaaattgagacccagagatgctaaactgctctgcaggtcacaaacctgaacagcagcatagccaaaatgggaacggagctcttctgacttcaagcccctgcacttttttcttaaccacattaattttatgaatatctatgtggtcaaagtctcttttgtaaaatctgagtataagctgaactagatcatgtctctgtaagctaagatggcagaaacacattgtcatgttagtttggaggagcaaacagatataagtatgtgttgtaatgttatagtgagctgttatgtatcccccagcaatgtccaaagtgatcagagctactagatgacttattacaatgttcagatcccactccttcattcctcctctctcagtgacctgtctacccccaagctttagaactgagctctctccaacttagaactcattagagtttgttgcattagtgattggatctcctcatgaaagttttttgaccaatgacagtagagcccctttaagctagccaggcccaagatagggaagcactgctggtttacatttctgctctttctaattcagttgtctattgcatgcagacatcccctgcccgacttctccattatggaaggctaaggccatccttccttgtccagtttctctacctacacactaacatgccttttccccatggagtgaactctgccagttgtctttggacattttctgcagatgcaggctcagttctgctcttttgttcccacccacttctagatcttcctccatttaatcccttattcttataaggagtctaatttttgtgtattgtccttgattagggcagctgacagctttacaccaaagctgaagtctctcacttaatcctaagcaaggggctagggagaactaagatatccttcccatatcaagggatataggttactagaagggtggaggtctcttaacaggctcactcacctttcagagtttaaattatggtcaggcttaagaagctctctcttgtgactgagtgtattgcatagacatgtctgtgaaaataaaagcacccattttgctaagg

SEQ ID NO: 194056 - DNA, 4244 bp, Homo sapiens
  Payload ID: 18334
  Gene Name: transmembrane protein 246
  Uniprot ID: Q9BRR3
  ENST ID: ENST00000374848
  CDS Start-End: 323-1534
gccgctttgggggccgcggtctctccgcagctcgcgggtcacatggcccgcctgagcaaggggagccctgcgcctgagctgcgaggcgggaggaggtgaggctccggcgcacacccaaaccgcgctgcgcccgctccttccgggccccggagatggcgcctccaccgggatgagctagccagcctgggcaataccagaggcggccctcggcgcgcgcaggggaccgagctggtcgccccaaccgggtttgatttctgatgactctggcctgagttccaggatggttttttcttgggaccagacatgaacaaaagttgacctcatgagcacttcaacctctccagctgccatgctcctccggaggctgcggcgactctcctggggcagcactgctgtccagctcttcatcctaacagtggtgacgtttggcctgctggcccccctggcctgtcaccgacttctacactcttacttctatctgcgccattggcatctgaaccaaatgagccaagagttcctgcagcaaagcttgaaagagggtgaggctgccctccactattttgaggagcttccctctgccaatggctcagtgcccattgtctggcaggccaccccccggccctggctggtgatcaccatcatcactgtggacaggcagcctggcttccactacgtcctgcaggttgtgtcccagttccaccggcttcttcagcaatgtggcccccagtgcgaggggcaccaactcttcctgtgcaacgtggagcgtagtgtgagccattttgatgccaagttgctctccaagtatgtccctgtggccaatcgctatgagggcactgaggatgattatggtgatgacccttcgaccaactcgtttgagaaagagaagcaggactatgtctattgcctggagtcatccctgcagacctacaacccagactacgtcctgatggtagaagacgatgctgtaccagaagagcagatcttcccagtcttggagcaccttctgcgggctcgcttctctgagccacatctcagagatgccctttatctcaagctgtatcaccccgagaggctccagcactacatcaatccagagcccatgcggatcctggaatgggttggtgtaggcatgttgctggggcccttactaacctggatatacatgaggtttgccagccgcccagggtttagctggcctgtaatgctcttcttctccctgtatagcatgggtctggtggagctggtgggtcggcactatttcctggaactgcggcggctgagtccttccctgtacagtgtggttcctgcctctcagtgttgcaccccagccatgctcttcccggcacctgcggcccgccggaccctcacctacctgtcccaagtgtactgccacaagggctttggcaaggacatggcactgtactcgctgttgagggccaagggagagagggcctatgtagtggagccgaacctcgtgaaacacatcgggctcttctccagtctccggtacaactttcatcccagtctcctctagggtgccaagagatgcctttctgaagttggccacttcttgaagattcaaatatttatctctttatttagacatggttgcctgcaggtatttcactgtttactgttgttagagatataggcactggggcagctgaggaacctcaatatgttaagagccttggctttggtagcctcctggcaggagcagcagtttgccacaggtccggacctctccctccacacagccacactgcctcatgcagtctgacccacccagtgagggtgcatttgaacactgattatattctccatttgtttttaagctctgctttgtgttagagcttgtgactgccaaaaattttgtgcacagtgatatgactgttttaggatcttaagggtagaattttgtgaaaggtgagatcctttggaattgagttctttctcattgggtatgaaaatggatgtatgtttagaatatatgcccaacgaggcaggaccatgtggatagattccatttgtttccttgacctgatgtaataaaaactgataaaagccgtgcagtgcccggcatcttggaggcaggtgatctggcttttctgttacctgggattttcttttcctatatatctgtagtgcactgataattgatattgttagtgagaactttaaggcacgacaagatctggaagagcttgtgaaccatcaaagtcagattgcttatgttgagtagtgatttaacattgaacatttctgtactactctgactctttgaaaattggacatttcagaatgatacaatataggggagctctttacaagtagcatatcatttttcctgactttcctggctgactgcttaccttcatttctttttcttctaggtagcatgatgttatagaaaaaaaaaaaaaaaaatcatggactgaagtcagaagacctgaccttttatttcagatctctgccatggcctaacgacgtgaccaccttgggcaggtcatataatcactctgggtctcaatttcttcacctgtaaaatgaggacagtaatacttacatgttaaagttgccttgaggattaaatggcagaatatatgtaaaacacctagcaagtgcttagtccatagaagacgcttggcaaacttttctctcctataataaacatatacaactcaagcttatttcggaaaaagatattggtgatgttgtttaaagtatgagatagggcatggagctgccacctatgtaccagctattccagatgaccaagccctgctagaataaagactgacttttcattgtgacctctgaaggatgtgcagctcagctttcacctatccccacgttcacccaagccaaaaagaagaattgttcattcaaactggaaatgatctccagcttggaaatgagactcctcatgagcttattctaagatcagagtctgaaaattattttctcaaaagttacaaataaatgtcttttaacagtactgtcagactagtgaccaacaagttactttatgaggatggatgatgatattagagttcaagcaattgtccagtttgtttcgatgccacagtttgcttttaaattcccatagtgagcttccatcttgagacccactcaacacagaaggattacataaaggttgatcacccacgctctacagatgaacaaattgagacccagagatgctaaactgctctgcaggtcacaaacctgaacagcagcatagccaaaatgggaacggagctcttctgacttcaagcccctgcacttttttcttaaccacattaattttatgaatatctatgtggtcaaagtctcttttgtaaaatctgagtataagctgaactagatcatgtctctgtaagctaagatggcagaaacacattgtcatgttagtttggaggagcaaacagatataagtatgtgttgtaatgttatagtgagctgttatgtatcccccagcaatgtccaaagtgatcagagctactagatgacttattacaatgttcagatcccactccttcattcctcctctctcagtgacctgtctacccccaagctttagaactgagctctctccaacttagaactcattagagtttgttgcattagtgattggatctcctcatgaaagttttttgaccaatgacagtagagcccctttaagctagccaggcccaagatagggaagcactgctggtttacatttctgctctttctaattcagttgtctattgcatgcagacatcccctgcccgacttctccattatggaaggctaaggccatccttccttgtccagtttctctacctacacactaacatgccttttccccatggagtgaactctgccagttgtctttggacattttctgcagatgcaggctcagttctgctcttttgttcccacccacttctagatcttcctccatttaatcccttattcttataaggagtctaatttttgtgtattgtccttgattagggcagctgacagctttacaccaaagctgaagtctctcacttaatcctaagcaaggggctagggagaactaagatatccttcccatatcaagggatataggttactagaagggtggaggtctcttaacaggctcactcacctttcagagtttaaattatggtcaggcttaagaagctctctcttgtgactgagtgtattgcatagacatgtctgtgaaaataaaagcacccattttgctaagg

SEQ ID NO: 194057 - DNA, 5070 bp, Homo sapiens
  Payload ID: 18334
  Gene Name: transmembrane protein 246
  Uniprot ID: Q9BRR3
  ENST ID: ENST00000374851
  CDS Start-End: 1149-2360
gttggtacccctacgtgctgaaatgaagagttctggagagaatctgagggatttgaggaatttcagatgttggggattttttcccccgcacagggagcggtattctgccctgtctacacattagaatcacttggcctggacaaaagcttttttaaaaaagcgttcccctcatctcctccccccaaaccccgcatttccatccactagattctaatgcgtaagcaggagtgacaactactgcccttgtgcttttttgggaacaagaaattgtccagggaaaagataaacgccaatcagtctctgatctcagtactagtctattttaagctaattaagcattgatttttttttttaagtttatgacaaactgctattttccattcagttaaactaaatgcgttttaatgataggacggtaattaatctaacctattaatgaaaagctgtatgtctcgcagaactatgataaactacctaatgacgtcagctaagggtctagaaatggaagaatgatcgctatatcttttttaaaaaatagaatttaggcatcttgggaaaaaaagaagctaatctacactggatttctgttagtgtgaagacttttgtccctgtacctgctagggcttacctgtaaatgaagtaagatggtcaacaccagggaaacaagtgttcctggtgcctggcagtggaacaccttgactatcttggaaagaattaactggccccaagtggacttcacatttcattccgtgaagtgggagcctgagaacatattttctgtgtgaggctgaaactgttggaggcttcctgagatcattcttgagaatggagcgaccacataggggtgagcagaaccaagagaatctcagggaaatggagccaatcaactgagttaggtcacccctaacttcaacccacacttgagtgttagagaagattctacaaagagagcagacttttctagtacctttcaattctcaccataaatatagcatgttgattaagagaatggactctgaagccggatttcatcagtttggattttggcttttcctctttctagcagtttgggtttgatttctgatgactctggcctgagttccaggatggttttttcttgggaccagacatgaacaaaagttgacctcatgagcacttcaacctctccagctgccatgctcctccggaggctgcggcgactctcctggggcagcactgctgtccagctcttcatcctaacagtggtgacgtttggcctgctggcccccctggcctgtcaccgacttctacactcttacttctatctgcgccattggcatctgaaccaaatgagccaagagttcctgcagcaaagcttgaaagagggtgaggctgccctccactattttgaggagcttccctctgccaatggctcagtgcccattgtctggcaggccaccccccggccctggctggtgatcaccatcatcactgtggacaggcagcctggcttccactacgtcctgcaggttgtgtcccagttccaccggcttcttcagcaatgtggcccccagtgcgaggggcaccaactcttcctgtgcaacgtggagcgtagtgtgagccattttgatgccaagttgctctccaagtatgtccctgtggccaatcgctatgagggcactgaggatgattatggtgatgacccttcgaccaactcgtttgagaaagagaagcaggactatgtctattgcctggagtcatccctgcagacctacaacccagactacgtcctgatggtagaagacgatgctgtaccagaagagcagatcttcccagtcttggagcaccttctgcgggctcgcttctctgagccacatctcagagatgccctttatctcaagctgtatcaccccgagaggctccagcactacatcaatccagagcccatgcggatcctggaatgggttggtgtaggcatgttgctggggcccttactaacctggatatacatgaggtttgccagccgcccagggtttagctggcctgtaatgctcttcttctccctgtatagcatgggtctggtggagctggtgggtcggcactatttcctggaactgcggcggctgagtccttccctgtacagtgtggttcctgcctctcagtgttgcaccccagccatgctcttcccggcacctgcggcccgccggaccctcacctacctgtcccaagtgtactgccacaagggctttggcaaggacatggcactgtactcgctgttgagggccaagggagagagggcctatgtagtggagccgaacctcgtgaaacacatcgggctcttctccagtctccggtacaactttcatcccagtctcctctagggtgccaagagatgcctttctgaagttggccacttcttgaagattcaaatatttatctctttatttagacatggttgcctgcaggtatttcactgtttactgttgttagagatataggcactggggcagctgaggaacctcaatatgttaagagccttggctttggtagcctcctggcaggagcagcagtttgccacaggtccggacctctccctccacacagccacactgcctcatgcagtctgacccacccagtgagggtgcatttgaacactgattatattctccatttgtttttaagctctgctttgtgttagagcttgtgactgccaaaaattttgtgcacagtgatatgactgttttaggatcttaagggtagaattttgtgaaaggtgagatcctttggaattgagttctttctcattgggtatgaaaatggatgtatgtttagaatatatgcccaacgaggcaggaccatgtggatagattccatttgtttccttgacctgatgtaataaaaactgataaaagccgtgcagtgcccggcatcttggaggcaggtgatctggcttttctgttacctgggattttcttttcctatatatctgtagtgcactgataattgatattgttagtgagaactttaaggcacgacaagatctggaagagcttgtgaaccatcaaagtcagattgcttatgttgagtagtgatttaacattgaacatttctgtactactctgactctttgaaaattggacatttcagaatgatacaatataggggagctctttacaagtagcatatcatttttcctgactttcctggctgactgcttaccttcatttctttttcttctaggtagcatgatgttatagaaaaaaaaaaaaaaaaatcatggactgaagtcagaagacctgaccttttatttcagatctctgccatggcctaacgacgtgaccaccttgggcaggtcatataatcactctgggtctcaatttcttcacctgtaaaatgaggacagtaatacttacatgttaaagttgccttgaggattaaatggcagaatatatgtaaaacacctagcaagtgcttagtccatagaagacgcttggcaaacttttctctcctataataaacatatacaactcaagcttatttcggaaaaagatattggtgatgttgtttaaagtatgagatagggcatggagctgccacctatgtaccagctattccagatgaccaagccctgctagaataaagactgacttttcattgtgacctctgaaggatgtgcagctcagctttcacctatccccacgttcacccaagccaaaaagaagaattgttcattcaaactggaaatgatctccagcttggaaatgagactcctcatgagcttattctaagatcagagtctgaaaattattttctcaaaagttacaaataaatgtcttttaacagtactgtcagactagtgaccaacaagttactttatgaggatggatgatgatattagagttcaagcaattgtccagtttgtttcgatgccacagtttgcttttaaattcccatagtgagcttccatcttgagacccactcaacacagaaggattacataaaggttgatcacccacgctctacagatgaacaaattgagacccagagatgctaaactgctctgcaggtcacaaacctgaacagcagcatagccaaaatgggaacggagctcttctgacttcaagcccctgcacttttttcttaaccacattaattttatgaatatctatgtggtcaaagtctcttttgtaaaatctgagtataagctgaactagatcatgtctctgtaagctaagatggcagaaacacattgtcatgttagtttggaggagcaaacagatataagtatgtgttgtaatgttatagtgagctgttatgtatcccccagcaatgtccaaagtgatcagagctactagatgacttattacaatgttcagatcccactccttcattcctcctctctcagtgacctgtctacccccaagctttagaactgagctctctccaacttagaactcattagagtttgttgcattagtgattggatctcctcatgaaagttttttgaccaatgacagtagagcccctttaagctagccaggcccaagatagggaagcactgctggtttacatttctgctctttctaattcagttgtctattgcatgcagacatcccctgcccgacttctccattatggaaggctaaggccatccttccttgtccagtttctctacctacacactaacatgccttttccccatggagtgaactctgccagttgtctttggacattttctgcagatgcaggctcagttctgctcttttgttcccacccacttctagatcttcctccatttaatcccttattcttataaggagtctaatttttgtgtattgtccttgattagggcagctgacagctttacaccaaagctgaagtctctcacttaatcctaagcaaggggctagggagaactaagatatccttcccatatcaagggatataggttactagaagggtggaggtctcttaacaggctcactcacctttcagagtttaaattatggtcaggcttaagaagctctctcttgtgactgagtgtattgcatagacatgtctgtgaaaataaaagcacccattttgctaagg

SEQ ID NO: 194058 - DNA, 680 bp, Homo sapiens
  Payload ID: 18335
  Gene Name: transmembrane protein 247
  Uniprot ID: A6NEH6
  ENST ID: ENST00000434431
  CDS Start-End: 22-680
ggcagcgttctggttttctggatggcagcagaggacagggagatgatggaagcccggggtgcgggagaaagttgcccgaccttccccaagatggtgcctggtgactccaagtctgaagggaagccaagggcttatctggaggcagagtcccagaagccagactcctcctatgactacttggaagagatggaagcttgtgaggacggaggctgccaagggccgcttaaatcgctgtcccccaagtcctgccgtgctaccaaaggccaggctggcgacggacccaaacccgcagagctgcccccgacccctgggactgagcgcaatcccgagatggagctggagaaggtgcgcatggagttcgagctcacgcggctcaagtacctgcatgagaagaaccagcggcagcggcagcacgaggtggtgatggagcagctgcagcgggagcggcagcacgaggtggtgatggagcagctgcagcaagaggcggcgccccgcctgttttcaggaggcctccagaacttcctgctgccccagaaccagtttgccatgttcctgtactgcttcatcttcattcacatcatctatgtcaccaaggagatggtcttctttctcttcgccaagcactacctattctgcattgcagccattttgctctgtttgattaaaactttctggtcata

SEQ ID NO: 194059 - DNA, 4229 bp, Homo sapiens
  Payload ID: 18336
  Gene Name: transmembrane protein 248
  Uniprot ID: Q9NWD8
  ENST ID: ENST00000341567
  CDS Start-End: 256-1200
acccggaaaccgcggttgccggagcccgaactgaggcggcggcgggagcccggttggcgtctggtcttcgcgtcggccccgcggagccagacgctgcccccggcgcggggagaagatggtgcctagcggcctcgggcccgccacgcgccgccacgagtgagcccagcgcgaccgcgggcgtccgccgagcagctggcccggctgggcccggggcgcgcagctgcccgccggggcggggtggagctgatcagaataatgttcagcatcaaccccctggagaacctgaaggtgtacatcagcagtcggcctcccctggtggtcttcatgatcagcgtaagcgccatggccatagctttcctgaccctgggctacttcttcaaaatcaaggagattaaatccccagaaatggcagaggattggaatacttttctgctacggttcaatgatttggacttgtgtgtatcagagaatgaaaccctcaagcatctcacaaacgacaccacaactccggaaagtacaatgaccagcgggcaggcccgagcttccacccagtccccccaggccctggaggactcgggcccggtgaatatctcagtctcaatcaccctaaccctggacccactgaaacccttcggagggtattcccgcaacgtcacccatctgtactcaaccatcttagggcatcagattggactttcaggcagggaagcccacgaggagataaacatcaccttcaccctgcctacagcgtggagctcagatgactgcgccctccacggtcactgtgagcaggtggtattcacagcctgcatgaccctcacggccagccctggggtgttccccgtcactgtacagccaccgcactgtgttcctgacacgtacagcaacgccacgctctggtacaagatcttcacaactgccagagatgccaacacaaaatacgcccaagattacaatcctttctggtgttataagggggccattggaaaagtctatcatgctttaaatcccaagcttacagtgattgttccagatgatgaccgttcattaataaatttgcatctcatgcacaccagttacttcctctttgtgatggtgataacaatgttttgctatgctgttatcaagggcagacctagcaaattgcgtcagagcaatcctgaattttgtcccgagaaggtggctttggctgaagcctaattccacagctccttgttttttgagagagactgagagaaccataatccttgcctgctgaacccagcctgggcctggatgctctgtgaatacattatcttgcgatgttgggttattccagccaaagacatttcaagtgcctgtaactgatttgtacatatttataaaaatctattcagaaattggtccaataatgcacgtgctttgccctgggtacagccagagcccttcaaccccaccttggacttgaggacctacctgatgggacgtttccacgtgtctctagagaaggattcctggatctagctggtcacgacgatgttttcaccaaggtcacaggagcattgcgtcgctgatggggttgaagtttggtttggttcttgtttcagcccaatatgtagagaacatttgaaacagtctgcacctttgatacggtattgcatttccaaagccaccaatccattttgtggattttatgtgtttgtggcttaataatcatagtaacaacaataatacctttttctccattttgcttgcaggaaacataccttaagttttttttgttttgtttttgtttttttgttttttgttttcctttatgaagaaaaaataaaatagtcacattttaatactactctagttaggacagacttgtgcttttatcctgactaaaaagttaaatatttaagtcacatacatggtaaagatctaagtttcattttccacatggatgaccaggaacctggtcttgttggagctggcataggaggttctactgtcttgtcgtccactcttgtccctcccttctgttatcaaagttaaagcgcctcttcactcaaaagggcttcaaaatgtaaatggctctagagttagagtgactgtttgctcttctgctttctggaatgcagatgacagtatggaaagaaagaataatgattctatctaataggaaaggatttcttctttcttttttaaagagtgggtggattttctcccttttgttttgcttttattttcatgctactaacatatcttcagaaggaaatggcaactagtagatcagtaaaattacgaaaacgatgcctgcaaaatttgaaggaatgcaattctgatttgccatttatcagggaaaactgaaagcatttttcttataactttttttctttttctttttttttggaggggggaggcagggtcttgctctgtccctcaggctggagcttagctcagtgcagcctccaactcctgggctcaagcaatcctcccactttagcctcctgagtagctgggactacaggcgtgtgccagcgcgcctggctaattttaaaatttttttgtagagacagagtctccctctgttgcccaggctggtctggaactcctagcttcaaatgatcctctcacctcggcctcccaaaatcctgggattccaggcgtcagccactgctctcggccctcttacaccattttgtttgattgtctagtccctgtttctttttctttctaatccttattcatttaagcaaaaccatacattatcttttccagtcctttcttgtattcttactgtttttttaaaataactttttgccttaatagctcattgtcactaataacttctgtgttctcccaggcagtgttataacagaagggcaatgaaaacattggacatgaccatgagtgcttcctttccttaactctaggtttgtagtctgttttaaattaggattagttcctgcattctgaaatacattggcctagaacattttatcccaggcatttttgaatagaaaacagttgcgtgcttttattgaagattgttaaaataatcaccatagtaacttgatatgttagtatttttctttttccttttagtatgtttcaagtgcagtaatcgtacttgtctatccagtttctatgtatgatacgagttgcttacacgatgcatggctaacttgttaatttagttttctccttagagactttgagacccttaagagacaagattgagaaagagccatgtggcttggctctagaaacgtcattatcattaggaccatcagattttagattaagctgctattgaattaataaaatcccaatgaagcagagttatagggatagatttatagctggcagagtggtatcaaaggagaaaaacagtgaaaaagccaatttcactggttcgttcaatccagcttgttgctaatattagttacccttgttttaatgacagagagtggctggaatctgtagctaggggaggggcaacactgttagatgtgaggaaaggaagtgccaaaaatgcctggacagatggcttgtcccaaggccaggacacacactttaaaatccaacattcacctaagcaagtaattcttaaagatcttacagaaacgcagagtcaatcaggtttataaaggaaggctgaggggagagaggaggcctgggggcctggacgaagaggcctaggacctgaagagactccagcgagtctcgggaagcccaggggacctgtcaccatctgggcacttcccaggctcaatgctcagccagagtttgctggtggacctcaggattcgaagtgtgcaacagacggagtgcgcttgctgttcagggcggccccgtgcaggagcaccagctcaccctcaggcatctcggactggagggccagcagaaggtcagcaacttactcttaaaacgattgtttcggatcatattgatctctttcctttttccttttgtcctttcactgtatgacttgaatcagttttgattctatttgtaagtgtttcttgtcgtgaggcacctgccatgtctgttgcgttttcctcggcagcgtgtagggcttcagcttcctgggttttcacccttcctgcaggcactgtggggtcctgagggccagtgggtccatttcacctcttgctgcatgatggtcagtagctgatctgttatggcattcacttccagattaattttccgtgtttgaagtatgtgcatatgtgctttacagaataaaacatctgaattta

SEQ ID NO: 194060 - DNA, 536 bp, Homo sapiens
  Payload ID: 18336
  Gene Name: transmembrane protein 248
  ENST ID: ENST00000424964
  CDS Start-End: 119-536
attctgcctgcactgctttgcggtggggcaggaagatggtttctgcgcagtgcttggggcagctgggtgctggagcttgcacagggtttctttgataccagtggagctgatcagaataatgttcagcatcaaccccctggagaacctgaaggtgtacatcagcagtcggcctcccctggtggtcttcatgatcagcgtaagcgccatggccatagctttcctgaccctgggctacttcttcaaaatcaaggagattaaatccccagaaatggcagaggattggaatacttttctgctacggttcaatgatttggacttgtgtgtatcagagaatgaaaccctcaagcatctcacaaacgacaccacaactccggaaagtacaatgaccagcgggcaggcccgagcttccacccagtccccccaggccctggaggactcgggcccggtgaatatctcagtctcaatcaccctaaccctggacccactgaaacccttcggagggtattcccgcaacgtcacccatctgtactcaacca

SEQ ID NO: 194061 - DNA, 1610 bp, Homo sapiens
  Payload ID: 18336
  Gene Name: transmembrane protein 248
  Uniprot ID: Q9NWD8
  ENST ID: ENST00000433271
  CDS Start-End: 219-830
ggcggcgggagcccggttggcgtctggtcttcgcgtcggccccgcggagccagacgctgcccccggcgcggggagaagatggtgcctagcggcctcgggcccgccacgcgccgccacgagtgagcccagcgcgaccgcgggcgtccgccgagcagctggcccggctgggcccggggcgcgcagctgcccgccggggcggggtggagctgatcagaataatgttcagcatcaaccccctggagaacctgaaggtgtacatcagcagtcggcctcccctggtggtcttcatgatcagcgtaagcgccatggccatagctttcctgaccctgggctacttcttcaaaatcaaggagattaaatccccagaaatggcagaggattggaatacttttctgctacggttcaatgatttggacttgtgtgtatcagagaatgaaaccctcaagcatctcacaaacgacaccacaactccggaaagtacaatgaccagcgggcaggcccgagcttccacccagtccccccaggccctggaggactcgggcccggtgaatatctcagtctcaatcaccctaaccctggacccactgaaacccttcggagggtattcccgcaacgtcacccatctgtactcaaccatcttagggcatcagattggactttcaggcagggaagcccacgaggagataaacatcaccttcaccctgcctacagcgtggagctcagatgactgcgccctccacggtcactgtgagcaggtggtattcacagcctgcatgaccctcacggccagccctggggtgttccccgtcactgtgatgaccgttcattaataaatttgcatctcatgcacaccagttacttcctctttgtgatggtgataacaatgttttgctatgctgttatcaagggcagacctagcaaattgcgtcagagcaatcctgaattttgtcccgagaaggtggctttggctgaagcctaattccacagctccttgttttttgagagagactgagagaaccataatccttgcctgctgaacccagcctgggcctggatgctctgtgaatacattatcttgcgatgttgggttattccagccaaagacatttcaagtgcctgtaactgatttgtacatatttataaaaatctattcagaaattggtccaataatgcacgtgctttgccctgggtacagccagagcccttcaaccccaccttggacttgaggacctacctgatgggacgtttccacgtgtctctagagaaggattcctggatctagctggtcacgacgatgttttcaccaaggtcacaggagcattgcgtcgctgatggggttgaagtttggtttggttcttgtttcagcccaatatgtagagaacatttgaaacagtctgcacctttgatacggtattgcatttccaaagccaccaatccattttgtggattttatgtgtttgtggcttaataatcatagtaacaacaataatacctttttctccattttgcttgcaggaaacataccttaagttttttttgttttgtttttgtttttttgttttttgttttcctttatgaagaaaaaataaaatagtcacattttaatacta

SEQ ID NO: 194062 - DNA, 637 bp, Homo sapiens
  Payload ID: 18336
  Gene Name: transmembrane protein 248
  ENST ID: ENST00000413593
  CDS Start-End: 422-637
agaaaggtgggagggagagactcacgtacgtccacaaagttaaatggcatagtggtgttccctgtgtcaagcttggtaaatatccggaatggggtggattctttcttcatgtttttaataaaatgaggagtgatcgcaaggtaatctagaggcatgtagtttcagttcccttgatggggaccatcagaaataaaaccaggcttgttgtgctgttttgagtcgtttgaacgccgtacccatcggacagctggtgaggaggcctttgtggaagaatctgatgtctgagtttagttctcaactagcaggtgacagccctcactggctgatgaatggtgagcttctctgaagcctgctttgtaaagattgtggcttccgcctgaactgcttctttcctgcctcaaaggtggagctgatcagaataatgttcagcatcaaccccctggagaacctgaaggtgtacatcagcagtcggcctcccctggtggtcttcatgatcagcgtaagcgccatggccatagctttcctgaccctgggctacttcttcaaaatcaaggagattaaatccccagaaatggcagaggattggaatacttttctgctacggttcaatgatttggacttgtgtgtatcagagaat

SEQ ID NO: 194063 - DNA, 545 bp, Homo sapiens
  Payload ID: 18336
  Gene Name: transmembrane protein 248
  ENST ID: ENST00000418375
  CDS Start-End: 264-545
gcactgctttgcggtggggcaggaagatggtttctgcgcagtgcttggggcagctgggtgctggagcttgcacagggtttctttgataccagtaagtgtcttcagctctaagtgttggataatctggcatcgcatcgatgactgttgtttactaggctcagggtttgtaaccccggccttaaagctctttgagggtctcagacatcacaggatatttgagaaatgctactttctgctacatgaaggtggagctgatcagaataatgttcagcatcaaccccctggagaacctgaaggtgtacatcagcagtcggcctcccctggtggtcttcatgatcagcgtaagcgccatggccatagctttcctgaccctgggctacttcttcaaaatcaaggagattaaatccccagaaatggcagaggattggaatacttttctgctacggttcaatgatttggacttgtgtgtatcagagaatgaaaccctcaagcatctcacaaacgacaccacaactccggaaagtacaatgaccagcgggcaggcc

SEQ ID NO: 194064 - DNA, 690 bp, Homo sapiens
  Payload ID: 18336
  Gene Name: transmembrane protein 248
  ENST ID: ENST00000607045
  CDS Start-End: 347-690
aaccgcggttgccggagcccgaactgaggcggcggcgggagcccggttggcgtctggtcttcgcgtcggccccgcggagccagacgctgcccccggcgcggggagaagatggtgcctagcggcctcgggcccgccacgcgccgccacgagtgagcccagcgcgaccgcgggcgtccgccgagcagctggcccggctgggcccggggcgcgcagctgcccgccggggcggggtgacagccctcactggctgatgaatggtgagcttctctgaagcctgctttgtaaagattgtggcttccgcctgaactgcttctttcctgcctcaaaggtggagctgatcagaataatgttcagcatcaaccccctggagaacctgaaggtgtacatcagcagtcggcctcccctggtggtcttcatgatcagcgtaagcgccatggccatagctttcctgaccctgggctacttcttcaaaatcaaggagattaaatccccagaaatggcagaggattggaatacttttctgctacggttcaatgatttggacttgtgtgtatcagagaatgaaaccctcaagcatctcacaaacgacaccacaactccggaaagtacaatgaccagcgggcaggcccgagcttccacccagtccccccaggccctggaggactcgggcccggtgaatatctcagtctc

SEQ ID NO: 194065 - DNA, 975 bp, Homo sapiens
  Payload ID: 18337
  Gene Name: transmembrane protein 249
  Uniprot ID: Q2WGJ8
  ENST ID: ENST00000565365
  CDS Start-End: 148-855
cgctgccctgtcagtcgcctgtgagctcctgctccttcctgggcctgcagccctggagaatttgctcaccgaggtaggagtgccgctgtgggcagtgggcggcggcagcggacgagcggccaggctgaccacctctgcctgactcagatgcctaagggccgggccggcagcctgcccacgacctccatcggctggcgcttccagctctggttcctaggactcacctgcccggagcgccacctggccagacgcctcaagaacaatagcttctacccattcgtgcagcaggagccaaacgtcttcgtgctcgaatactacctggacacactgtggaaggggatgctgctcttcatcatcagcgtggtcctggtcagcttcagctccctgagagaggtgcagaagcaagagacctgggtcttcctcgtgtacggcgtgggcgtgggcctgtggctcgtgatctcgtcgctgccgcggcgccgcctggtgctgaaccacacgcgcggcgtgtaccacttctccatccagggccgcaccgtgtgccagggccccttgcatctggtctacgtgcgcctggcgctcagctccgatgcccacggaaggtgcttcttccacctggtcctcggcggccacaggttggagcccctggtgctggtgcagctgtcggagcactacgagcaaatggaatacttgggccgttacatcgcccggaaactcaacatcaactacttcgactacctggccacctcctaccggcacgtggttcgccactggccaccccctggcgctggcactgtgatgggcaagagccccatgggtcacaagcccagctcctctcagtccagcctggaggtgtgactctgagggcctcccccacctcgggactgtgttctcggtaacctcccagccccactctggggcagatcaaatgtgagtcccactcactggccttcctttcaataaagctgcctcagcttc

SEQ ID NO: 194066 - DNA, 725 bp, Homo sapiens
  Payload ID: 18337
  Gene Name: transmembrane protein 249
  ENST ID: ENST00000562477
  CDS Start-End: 79-725
cgaggtaggagtgccgctgtgggcagtgggcggcggcagcggacgagcggccaggctgaccacctctgcctgactcagatgcctaagggccgggccggcagcctgcccacgacctccatcggctggcgcttccagctctggttcctaggactcacctgcccggagcgccacctggccagacgcctcaagaacaatagcttctacccattcgtgcagcaggagccaaacggtgcagaagcaagagacctgggtcttcctcgtgtacggcgtgggcgtgggcctgtggctcgtgatctcgtcgctgccgcggcgccgcctggtgctgaaccacacgcgcggcgtgtaccacttctccatccagggccgcaccgtgtgccagggccccttgcatctggtctacgtgcgcctggcgctcagctccgatgcccacggaaggtgcttcttccacctggtcctcggcggccacaggttggagcccctggtgctggtgcagctgtcggagcactacgagcaaatggaatacttgggccgttacatcgcccggaaactcaacatcaactacttcgactacctggccacctcctaccggcacgtggttcgccactggccaccccctggcgctggcactgtgatgggcaagagccccatgggtcacaagcccagctcctctcagtccagcctggaggtgtgactctgagggcctcccccacctcgggactgtgttc

SEQ ID NO: 194067 - DNA, 1965 bp, Homo sapiens
  Payload ID: 18338
  Gene Name: transmembrane protein 25
  Uniprot ID: Q86YD3
  ENST ID: ENST00000354064
  CDS Start-End: 61-717
agttgctccggcggcgctcggggagggagccagcagcctagggcctaggcccgggccaccatggcgctgcctccaggcccagccgccctccggcacacactgctgctcctgccagcccttctgagctcagtcaagccagagattgcccaagtcggcgccaagtaccaggaagctcagggcccaggcctcctggttgtcctgtttgccctggtgcgtgccaacccgccggccaatgtcacctggatcgaccaggatgggccagtgactgtcaacacctctgacttcctggtgctggatgcgcagaactacccctggctcaccaaccacacggtgcagctgcagctccgcagcctggcacacaacctctcggtggtggccaccaatgacgtgggtgtcaccagtgcgtcgcttccagccccaggcccctcccggcacccatctctgatatcaagtgactccaacaacctaaaactcaacaacgtgcgcctgccacgggagaacatgtccctcccgtccaaccttcagctcaatgacctcactccagattccagagcagtgaaaccagcagaccggcagatggctcagaacaacagccggccagagcttctggacccggagcccggcggcctcctcaccagccaaggtttcatccgcctcccagtgctgggctatatctatcgagtgtccagcgtgagcagtgatgagatctggctctgagccgagggcgagacaggagtattctcttggcctctggacaccctcccgttcctccaaggcatcctctacctagctaggtcaccaacgtgaagaagttatgccactgccacttttgcttgccctcctggctggggtgccctccatgtcatgcacgtgatgcatttcactgggctgtaacccgcaggggcacaggtatctttggcaaggctaccagttggacgtaagcccctcatgctgactcagggtgggccctgcatgtgatgactgggcccttccagagggagctctttggccaggggtgttcagatgtcatccagcatccaagtgtggcatggcctgctgtataccccaccccagtactccacagcaccttgtacagtaggcatgggggcgtgcctgtgtgggggacagggagggccctgcatggattttcctccttcctatgctatgtagccttgttccctcaggtaaaatttaggaccctgctagctgtgcagaacccaattgccctttgcacagaaaccaacccctgacccagcggtaccggccaagcacaaacgtcctttttgctgcacacgtctctgcccttcacttcttctcttctgtccccacctcctcttgggaattctaggttacacgttggaccttctctactacttcactgggcactagacttttctattggcctgtgccatcgcccagtattagcacaagttagggaggaagaggcaggcgatgagtctagtagcacccaggacggcttgtagctatgcatcattttcctacggcgttagcactttaagcacatcccctaggggagggggtgagtgaggggcccagagccctctttgtggcttccccacgtttggccttctgggattcactgtgagtgtcctgagctctcggggttgatggtttttctctcagcatgtctcctccaccacgggaccccagccctgaccaacccatggttgcctcatcagcaggaaggtgcccttcctggaggatggtcgccacaggcacataattcaacagtgtggaagctttaggggaacatggagaaagaaggagaccacataccccaaagtgacctaagaacactttaaaaagcaacatgtaaatgattggaaattaatatagtacagaatatatttttcccttgttgagatcttcttttgtaatgtttttcatgttactgcctagggcggtgctgagcacacagcaagtttaataaacttgactgaattc

SEQ ID NO: 194068 - DNA, 2409 bp, Homo sapiens
  Payload ID: 18338
  Gene Name: transmembrane protein 25
  Uniprot ID: Q86YD3
  ENST ID: ENST00000313236
  CDS Start-End: 54-1154
ccggcggcgctcggggagggagccagcagcctagggcctaggcccgggccaccatggcgctgcctccaggcccagccgccctccggcacacactgctgctcctgccagcccttctgagctcaggttggggggagttggagccacaaatagatggtcagacctgggctgagcgggcacttcgggagaatgaacgccacgccttcacctgccgggtggcaggggggcctggcacccccagattggcctggtatctggatggacagctgcaggaggccagcacctcaagactgctgagcgtgggaggggaggccttctctggaggcaccagcaccttcactgtcactgcccatcgggcccagcatgagctcaactgctctctgcaggaccccagaagtggccgatcagccaacgcctctgtcatccttaatgtgcaattcaagccagagattgcccaagtcggcgccaagtaccaggaagctcagggcccaggcctcctggttgtcctgtttgccctggtgcgtgccaacccgccggccaatgtcacctggatcgaccaggatgggccagtgactgtcaacacctctgacttcctggtgctggatgcgcagaactacccctggctcaccaaccacacggtgcagctgcagctccgcagcctggcacacaacctctcggtggtggccaccaatgacgtgggtgtcaccagtgcgtcgcttccagccccagggcttctggctacccgggtggaagtgccactgctgggcattgttgtggctgctgggcttgcactgggcaccctcgtggggttcagcaccttggtggcctgcctggtctgcagaaaagagaagaaaaccaaaggcccctcccggcacccatctctgatatcaagtgactccaacaacctaaaactcaacaacgtgcgcctgccacgggagaacatgtccctcccgtccaaccttcagctcaatgacctcactccagattccagagcagtgaaaccagcagaccggcagatggctcagaacaacagccggccagagcttctggacccggagcccggcggcctcctcaccagccaaggtttcatccgcctcccagtgctgggctatatctatcgagtgtccagcgtgagcagtgatgagatctggctctgagccgagggcgagacaggagtattctcttggcctctggacaccctcccgttcctccaaggcatcctctacctagctaggtcaccaacgtgaagaagttatgccactgccacttttgcttgccctcctggctggggtgccctccatgtcatgcacgtgatgcatttcactgggctgtaacccgcaggggcacaggtatctttggcaaggctaccagttggacgtaagcccctcatgctgactcagggtgggccctgcatgtgatgactgggcccttccagagggagctctttggccaggggtgttcagatgtcatccagcatccaagtgtggcatggcctgctgtataccccaccccagtactccacagcaccttgtacagtaggcatgggggcgtgcctgtgtgggggacagggagggccctgcatggattttcctccttcctatgctatgtagccttgttccctcaggtaaaatttaggaccctgctagctgtgcagaacccaattgccctttgcacagaaaccaacccctgacccagcggtaccggccaagcacaaacgtcctttttgctgcacacgtctctgcccttcacttcttctcttctgtccccacctcctcttgggaattctaggttacacgttggaccttctctactacttcactgggcactagacttttctattggcctgtgccatcgcccagtattagcacaagttagggaggaagaggcaggcgatgagtctagtagcacccaggacggcttgtagctatgcatcattttcctacggcgttagcactttaagcacatcccctaggggagggggtgagtgaggggcccagagccctctttgtggcttccccacgtttggccttctgggattcactgtgagtgtcctgagctctcggggttgatggtttttctctcagcatgtctcctccaccacgggaccccagccctgaccaacccatggttgcctcatcagcaggaaggtgcccttcctggaggatggtcgccacaggcacataattcaacagtgtggaagctttaggggaacatggagaaagaaggagaccacataccccaaagtgacctaagaacactttaaaaagcaacatgtaaatgattggaaattaatatagtacagaatatatttttcccttgttgagatcttcttttgtaatgtttttcatgttactgcctagggcggtgctgagcacacagcaagtttaataaacttgactgaattcatttaca

SEQ ID NO: 194069 - DNA, 1456 bp, Homo sapiens
  Payload ID: 18338
  Gene Name: transmembrane protein 25
  Uniprot ID: Q86YD3
  ENST ID: ENST00000354284
  CDS Start-End: 64-1119
agcagttgctccggcggcgctcggggagggagccagcagcctagggcctaggcccgggccaccatggcgctgcctccaggcccagccgccctccggcacacactgctgctcctgccagcccttctgagctcaggttggggggagttggagccacaaatagatggtcagacctgggctgagcgggcacttcgggagaatgaacgccacgccttcacctgccgggtggcaggggggcctggcacccccagattggcctggtatctggatggacagctgcaggaggccagcacctcaagactgctgagcgtgggaggggaggccttctctggaggcaccagcaccttcactgtcactgcccatcgggcccagcatgagctcaactgctctctgcaggaccccagaagtggccgatcagccaacgcctctgtcatccttaatgtgcaattcaagccagagattgcccaagtcggcgccaagtaccaggaagctcagggcccaggcctcctggttgtcctgtttgccctggtgcgtgccaacccgccggccaatgtcacctggatcgaccaggatgggccagtgactgtcaacacctctgacttcctggtgctggatgcgcagaactacccctggctcaccaaccacacggtgcagctgcagctccgcagcctggcacacaacctctcggtggtggccaccaatgacgtgggtgtcaccagtgcgtcgcttccagccccagggcttctggctacccgggtggaagtgccactgctgggcattgttgtggctgctgggcttgcactgggcaccctcgtggggttcagcaccttggtggcctgcctggtctgcagaaaagagaagaaaaccaaaggcccctcccggcacccatctctgatatcaagtgactccaacaacctaaaactcaacaacgtgcgcctgccacgggagaacatgtccctcccgtccaaccttcagctcaatgacctcactccagattccagagcagtgaaaccagcagaccggcagatggctcagaacaacagccggccagagcttctggacccggagcccggcggcctcctcaccagccaaggaagaagaaatcaggacaaagacgcataacagagggaagaccatgggaagacacagaagatggccaagaagagacccctcagaagaaatcaatcttggtggggcgtggtggcttcacgcctgtaataccagcactgtgggaggttgaggtgggcagatcgcctgagcctaggagttcgagaccagcctgggcaacatggtgaaattccatctctacaaaaaaattagccgggtgtggtgttgagtatctgtagtcccagctacttgggaggctggggtgggaggactgcttgagtccagcaggttgaggctgcagtgagctgagattgagctactgcactccagcctgggcatagagtaataccct

SEQ ID NO: 194070 - DNA, 2395 bp, Homo sapiens
  Payload ID: 18338
  Gene Name: transmembrane protein 25
  Uniprot ID: Q86YD3
  ENST ID: ENST00000359862
  CDS Start-End: 175-1143
cggccgcccacctgccgggtaagggcccctcgggcccgtggtcgggcatcgattggccccgcctggcgcagcccccgcccctgcagcggactgcggtgctcatcagacctgagcagttgctccggcggcgctcggggagggagccagcagcctagggcctaggcccgggccaccatggcgctgcctccaggcccagccgccctccggcacacactgctgctcctgccagcccttctgagctcaggttggggggagttggagccacaaatagatggtcagacctgggctgagcgggcacttcgggagaatgaacgccacgccttcacctgccgggtggcaggggggcctggcacccccagattggcctggtatctggatggacagctgcaggaggccagcacctcaagactgctgagcgtgggaggggaggccttctctggaggcaccagcaccttcactgtcactgcccatcgggcccagcatgagctcaactgctctctgcaggaccccagaagtggccgatcagccaacgcctctgtcatccttaatgtgcaattcaagccagagattgcccaagtcggcgccaagtaccaggaagctcagggcccaggcctcctggttgtcctgtttgccctggtgcgtgccaacccgccggccaatgtcacctggatcgaccaggatgggccagtgactgtcaacacctctgacttcctggtgctggatgcgcagaactacccctggctcaccaaccacacggtgcagctgcagctccgcagcctggcacacaacctctcggtggtggccaccaatgacgtgggtgtcaccagtgcgtcgcttccagccccaggcccctcccggcacccatctctgatatcaagtgactccaacaacctaaaactcaacaacgtgcgcctgccacgggagaacatgtccctcccgtccaaccttcagctcaatgacctcactccagattccagagcagtgaaaccagcagaccggcagatggctcagaacaacagccggccagagcttctggacccggagcccggcggcctcctcaccagccaaggtttcatccgcctcccagtgctgggctatatctatcgagtgtccagcgtgagcagtgatgagatctggctctgagccgagggcgagacaggagtattctcttggcctctggacaccctcccgttcctccaaggcatcctctacctagctaggtcaccaacgtgaagaagttatgccactgccacttttgcttgccctcctggctggggtgccctccatgtcatgcacgtgatgcatttcactgggctgtaacccgcaggggcacaggtatctttggcaaggctaccagttggacgtaagcccctcatgctgactcagggtgggccctgcatgtgatgactgggcccttccagagggagctctttggccaggggtgttcagatgtcatccagcatccaagtgtggcatggcctgctgtataccccaccccagtactccacagcaccttgtacagtaggcatgggggcgtgcctgtgtgggggacagggagggccctgcatggattttcctccttcctatgctatgtagccttgttccctcaggtaaaatttaggaccctgctagctgtgcagaacccaattgccctttgcacagaaaccaacccctgacccagcggtaccggccaagcacaaacgtcctttttgctgcacacgtctctgcccttcacttcttctcttctgtccccacctcctcttgggaattctaggttacacgttggaccttctctactacttcactgggcactagacttttctattggcctgtgccatcgcccagtattagcacaagttagggaggaagaggcaggcgatgagtctagtagcacccaggacggcttgtagctatgcatcattttcctacggcgttagcactttaagcacatcccctaggggagggggtgagtgaggggcccagagccctctttgtggcttccccacgtttggccttctgggattcactgtgagtgtcctgagctctcggggttgatggtttttctctcagcatgtctcctccaccacgggaccccagccctgaccaacccatggttgcctcatcagcaggaaggtgcccttcctggaggatggtcgccacaggcacataattcaacagtgtggaagctttaggggaacatggagaaagaaggagaccacataccccaaagtgacctaagaacactttaaaaagcaacatgtaaatgattggaaattaatatagtacagaatatatttttcccttgttgagatcttcttttgtaatgtttttcatgttactgcctagggcggtgctgagcacacagcaagtttaataaacttgactgaattcattt

SEQ ID NO: 194071 - DNA, 2442 bp, Homo sapiens
  Payload ID: 18338
  Gene Name: transmembrane protein 25
  Uniprot ID: Q86YD3
  ENST ID: ENST00000411589
  CDS Start-End: 219-1187
gggggtactcggcgcgggctggggaccagccggggggtggtgagccgcggccgcccacctgccgggtaagggcccctcgggcccgtggtcgggcatcgattggccccgcctggcgcagcccccgcccctgcagcggactgcggtgctcatcagacctgagcagttgctccggcggcgctcggggagggagccagcctagggcctaggcccgggccaccatggcgctgcctccaggcccagccgccctccggcacacactgctgctcctgccagcccttctgagctcaggttggggggagttggagccacaaatagatggtcagacctgggctgagcgggcacttcgggagaatgaacgccacgccttcacctgccgggtggcaggggggcctggcacccccagattggcctggtatctggatggacagctgcaggaggccagcacctcaagactgctgagcgtgggaggggaggccttctctggaggcaccagcaccttcactgtcactgcccatcgggcccagcatgagctcaactgctctctgcaggaccccagaagtggccgatcagccaacgcctctgtcatccttaatgtgcaattcaagccagagattgcccaagtcggcgccaagtaccaggaagctcagggcccaggcctcctggttgtcctgtttgccctggtgcgtgccaacccgccggccaatgtcacctggatcgaccaggatgggccagtgactgtcaacacctctgacttcctggtgctggatgcgcagaactacccctggctcaccaaccacacggtgcagctgcagctccgcagcctggcacacaacctctcggtggtggccaccaatgacgtgggtgtcaccagtgcgtcgcttccagccccaggcccctcccggcacccatctctgatatcaagtgactccaacaacctaaaactcaacaacgtgcgcctgccacgggagaacatgtccctcccgtccaaccttcagctcaatgacctcactccagattccagagcagtgaaaccagcagaccggcagatggctcagaacaacagccggccagagcttctggacccggagcccggcggcctcctcaccagccaaggtttcatccgcctcccagtgctgggctatatctatcgagtgtccagcgtgagcagtgatgagatctggctctgagccgagggcgagacaggagtattctcttggcctctggacaccctcccgttcctccaaggcatcctctacctagctaggtcaccaacgtgaagaagttatgccactgccacttttgcttgccctcctggctggggtgccctccatgtcatgcacgtgatgcatttcactgggctgtaacccgcaggggcacaggtatctttggcaaggctaccagttggacgtaagcccctcatgctgactcagggtgggccctgcatgtgatgactgggcccttccagagggagctctttggccaggggtgttcagatgtcatccagcatccaagtgtggcatggcctgctgtataccccaccccagtactccacagcaccttgtacagtaggcatgggggcgtgcctgtgtgggggacagggagggccctgcatggattttcctccttcctatgctatgtagccttgttccctcaggtaaaatttaggaccctgctagctgtgcagaacccaattgccctttgcacagaaaccaacccctgacccagcggtaccggccaagcacaaacgtcctttttgctgcacacgtctctgcccttcacttcttctcttctgtccccacctcctcttgggaattctaggttacacgttggaccttctctactacttcactgggcactagacttttctattggcctgtgccatcgcccagtattagcacaagttagggaggaagaggcaggcgatgagtctagtagcacccaggacggcttgtagctatgcatcattttcctacggcgttagcactttaagcacatcccctaggggagggggtgagtgaggggcccagagccctctttgtggcttccccacgtttggccttctgggattcactgtgagtgtcctgagctctcggggttgatggtttttctctcagcatgtctcctccaccacgggaccccagccctgaccaacccatggttgcctcatcagcaggaaggtgcccttcctggaggatggtcgccacaggcacataattcaacagtgtggaagctttaggggaacatggagaaagaaggagaccacataccccaaagtgacctaagaacactttaaaaagcaacatgtaaatgattggaaattaatatagtacagaatatatttttcccttgttgagatcttcttttgtaatgtttttcatgttactgcctagggcggtgctgagcacacagcaagtttaataaacttgactgaattcatttaca

SEQ ID NO: 194072 - DNA, 2228 bp, Homo sapiens
  Payload ID: 18338
  Gene Name: transmembrane protein 25
  Uniprot ID: Q86YD3
  ENST ID: ENST00000442938
  CDS Start-End: 175-1095
cggccgcccacctgccgggtaagggcccctcgggcccgtggtcgggcatcgattggccccgcctggcgcagcccccgcccctgcagcggactgcggtgctcatcagacctgagcagttgctccggcggcgctcggggagggagccagcagcctagggcctaggcccgggccaccatggcgctgcctccaggcccagccgccctccggcacacactgctgctcctgccagcccttctgagctcaggttggggggagttggagccacaaatagatggtcagacctgggctgagcgggcacttcgggagaatgaacgccacgccttcacctgccgggtggcaggggggcctggcacccccagattggcctggtatctggatggacagctgcaggaggccagcacctcaagactgctgagcgtgggaggggaggccttctctggaggcaccagcaccttcactgtcactgcccatcgggcccagcatgagctcaactgctctctgcaggaccccagaagtggccgatcagccaacgcctctgtcatccttaatgtgcaattcaagccagagattgcccaagtcggcgccaagtaccaggaagctcagggcccaggcctcctggttgtcctgtttgccctggtgcgtgccaacccgccggccaatgtcacctggatcgaccaggatgggccagtgactgtcaacacctctgacttcctggtgctggatgcgcagaactacccctggctcaccaaccacacggtgcagctgcagctccgcagcctggcacacaacctctcggtggtggccaccaatgacgtgggtgtcaccagtgcgtcgcttccagccccaggcccctcccggcacccatctctgatatcaagtgactccaacaacctaaaactcaacaacgtgcgcctgccacgggagaacatgtccctcccgtccaaccttcagctcaatgacctcactccagattccagagtgaaaccagcagaccggcagatggctcagaacaacagccggccagagcttctggacccggagcccggcggcctcctcaccagccaaggaagaagaaatcaggacaaagacgcataacagagggaagaccatgggaagacacagaagatggccaagaagagacccctcagaagaaatcaatcttggtggggcgtggtggcttcacgcctgtaataccagcactgtgggaggttgaggtgggcagatcgcctgagcctaggagttcgagaccagcctgggcaacatggtgaaattccatctctacaaaaaaattagccgggtgtggtgttgagtatctgtagtcccagctacttgggaggctggggtgggaggactgcttgagtccagcaggttgaggctgcagtgagctgagattgagctactgcactccagcctgggcatagagtaataccctgtaaaaaaaaaggaaggaagggagggagggaatcaaccatgccaacaaattgatcttggactactactggactactagcctccagaactatgaaataatacatttctgatgtctaagccactcagtctatggtactttgttatggcagcctagcaaaataatacaacatgctattttttcccccgatcagtatggaattggtcatatgttttataggtaaaatacactgccatactcttttcctgtgggaatctgtgaaaaagaaactgataccaagttatgggcaagtattaacagttatatatgcattacttggtgttataatgcctaatgattccaggacaccatatgaacagagaaaatgggcatgacatctaactcaggtaacaggctctggatctaaacaagtcacagtgtgaagtttttaaactactggtttcttaaaacttttctctttttacaaaaaacagagtacatatagttctgcaacttgctgcaatttgcttttttcatttaacaacatatcactgatatttcttcatattagagcaaaataaggccaaataatattccattgcatagtatttcactgaatggatgtactgcaacctagctattcaatcccctaatcagacaccttcccctcaactacagcttcaaaatgctctgaggaaagagactgtttccaaattctgtgtgtttacaatcaattcttcatatacaaaaaaaatctgtctttgtagagcttacattttagtagggaagaacaaaataagtaaataaagtctatggtatg

SEQ ID NO: 194073 - DNA, 747 bp, Homo sapiens
  Payload ID: 18338
  Gene Name: transmembrane protein 25
  ENST ID: ENST00000526853
  CDS Start-End: 1-601
cgaccaggatgggccagtgactgtcaacacctctgacttcctggtgctggatgcgcagaactacccctggctcaccaaccacacggtgcagctgcagctccgcagcctggcacacaacctctcggtggtggccaccaatgacgtgggtgtcaccagtgcgtcgcttccagccccagggcttctggctacccgggtggaagtgccactgctgggcattgttgtggctgctgggcttgcactgggcaccctcgtggggttcagcaccttggtggcctgcctggtctgcagaaaagagaagaaaaccaaaggcccctcccggcacccatctctgatatcaagtgactccaacaacctaaaactcaacaacgtgcgcctgccacgggagaacatgtccctcccgtccaaccttcagctcaatgacctcactccagattccagagtgaaaccagcagaccggcagatggctcagaacaacagccggccagagcttctggacccggagcccggcggcctcctcaccagccaaggtttcatccgcctcccagtgctgggctatatctatcgagtgtccagcgtgagcagtgatgagatctggctctgagccgagggcgagacaggagtattctcttggcctctggacaccctcccgttcctccaaggcatcctctacctagctaggtcaccaacgtgaagaagttatgccactgccacttttgcttgccctcctggctggggtgccctccatgt

SEQ ID NO: 194074 - DNA, 2630 bp, Homo sapiens
  Payload ID: 18338
  Gene Name: transmembrane protein 25
  Uniprot ID: Q86YD3
  ENST ID: ENST00000524725
  CDS Start-End: 413-1381
gggaacagggcaggagagagaataggattaggagaaaggcgatccctttgggggaggggcgcgtggagtatgtgtgtgagtgtgcgtgtgtgcaaggtgtggttgcacggatgctcgttgcttctgcgtatctgcgggtgtgtgcctctttgtattgtagcctggagtcagtgctcgcttctgcgcctgcaggatgtccatgtgtctgctgggtgggtctgtgcctttgggctttgccgttcgtgtccgtgccttcgccactgggggctggtctacatttgcgtttccgtacatggttctttttgtttctggagagtaaattcctggagcaattgctaggcctgcctgctgtcacctggctgacaggcccgcccccttctctcagcagcctagggcctaggcccgggccaccatggcgctgcctccaggcccagccgccctccggcacacactgctgctcctgccagcccttctgagctcaggttggggggagttggagccacaaatagatggtcagacctgggctgagcgggcacttcgggagaatgaacgccacgccttcacctgccgggtggcaggggggcctggcacccccagattggcctggtatctggatggacagctgcaggaggccagcacctcaagactgctgagcgtgggaggggaggccttctctggaggcaccagcaccttcactgtcactgcccatcgggcccagcatgagctcaactgctctctgcaggaccccagaagtggccgatcagccaacgcctctgtcatccttaatgtgcaattcaagccagagattgcccaagtcggcgccaagtaccaggaagctcagggcccaggcctcctggttgtcctgtttgccctggtgcgtgccaacccgccggccaatgtcacctggatcgaccaggatgggccagtgactgtcaacacctctgacttcctggtgctggatgcgcagaactacccctggctcaccaaccacacggtgcagctgcagctccgcagcctggcacacaacctctcggtggtggccaccaatgacgtgggtgtcaccagtgcgtcgcttccagccccaggcccctcccggcacccatctctgatatcaagtgactccaacaacctaaaactcaacaacgtgcgcctgccacgggagaacatgtccctcccgtccaaccttcagctcaatgacctcactccagattccagagcagtgaaaccagcagaccggcagatggctcagaacaacagccggccagagcttctggacccggagcccggcggcctcctcaccagccaaggtttcatccgcctcccagtgctgggctatatctatcgagtgtccagcgtgagcagtgatgagatctggctctgagccgagggcgagacaggagtattctcttggcctctggacaccctcccgttcctccaaggcatcctctacctagctaggtcaccaacgtgaagaagttatgccactgccacttttgcttgccctcctggctggggtgccctccatgtcatgcacgtgatgcatttcactgggctgtaacccgcaggggcacaggtatctttggcaaggctaccagttggacgtaagcccctcatgctgactcagggtgggccctgcatgtgatgactgggcccttccagagggagctctttggccaggggtgttcagatgtcatccagcatccaagtgtggcatggcctgctgtataccccaccccagtactccacagcaccttgtacagtaggcatgggggcgtgcctgtgtgggggacagggagggccctgcatggattttcctccttcctatgctatgtagccttgttccctcaggtaaaatttaggaccctgctagctgtgcagaacccaattgccctttgcacagaaaccaacccctgacccagcggtaccggccaagcacaaacgtcctttttgctgcacacgtctctgcccttcacttcttctcttctgtccccacctcctcttgggaattctaggttacacgttggaccttctctactacttcactgggcactagacttttctattggcctgtgccatcgcccagtattagcacaagttagggaggaagaggcaggcgatgagtctagtagcacccaggacggcttgtagctatgcatcattttcctacggcgttagcactttaagcacatcccctaggggagggggtgagtgaggggcccagagccctctttgtggcttccccacgtttggccttctgggattcactgtgagtgtcctgagctctcggggttgatggtttttctctcagcatgtctcctccaccacgggaccccagccctgaccaacccatggttgcctcatcagcaggaaggtgcccttcctggaggatggtcgccacaggcacataattcaacagtgtggaagctttaggggaacatggagaaagaaggagaccacataccccaaagtgacctaagaacactttaaaaagcaacatgtaaatgattggaaattaatatagtacagaatatatttttcccttgttgagatcttcttttgtaatgtttttcatgttactgcctagggcggtgctgagcacacagcaagtttaataaacttgactgaattca

SEQ ID NO: 194075 - DNA, 1410 bp, Homo sapiens
  Payload ID: 18338
  Gene Name: transmembrane protein 25
  ENST ID: ENST00000533102
  CDS Start-End: 61-1206
agttgctccggcggcgctcggggagggagccagcagcctagggcctaggcccgggccaccatggcgctgcctccaggcccagccgccctccggcacacactgctgctcctgccagcccttctgagctcaggttggggggagttggagccacaaatagatggtcagacctgggctgagcgggcacttcgggagaatgaacgccacgccttcacctgccgggtggcaggggggcctggcacccccagattggcctggtatctggatggacagctgcaggaggccagcacctcaagactgctgagcgtgggaggggaggccttctctggaggcaccagcaccttcactgtcactgcccatcgggcccagcatgagctcaactgctctctgcaggaccccagaagtggccgatcagccaacgcctctgtcatccttaatgtgcaattcaagccagagattgcccaagtcggcgccaagtaccaggaagctcagggcccaggcctcctggttgtcctgtttgccctggtgcgtgccaacccgccggccaatgtcacctggatcgaccaggatgggccagtgactgtcaacacctctgacttcctggtgctggatgcgcagaactacccctggctcaccaaccacacggtgcagctgcagctccgcagcctggcacacaacctctcggtggtggccaccaatgacgtgggtgtcaccagtgcgtcgcttccagccccagggcttctggctacccgggtggaagtgccactgctgggcattgttgtggctgctgggcttgcactgggcaccctcgtggggttcagcaccttggtggcctgcctggtctgcagaaaagagaagaaaaccaaaggcccctcccggcacccatctctgatatcaagtgactccaacaacctaaaactcaacaacgtgcgcctgccacgggagaacatgtccctcccgtccaaccttcagctcaatgacctcactccagattccagagtgaaaccagcagaccggcagatggctcagaacaacagccggccagagcttctggacccggagcccggcggcctcctcaccagccaagcatgtctcctccaccacgggaccccagccctgaccaacccatggttgcctcatcagcaggaaggtgcccttcctggaggatggtcgccacaggcacataattcaacagtgtggaagctttaggggaacatggagaaagaaggagaccacataccccaaagtgacctaagaacactttaaaaagcaacatgtaaatgattggaaattaatatagtacagaatatatttttcccttgttgagatcttcttttgtaatgtttttcatgttactgcctagggcggtgctgagcacacagcaagtttaataaacttgactgaattcattta

SEQ ID NO: 194076 - DNA, 596 bp, Homo sapiens
  Payload ID: 18338
  Gene Name: transmembrane protein 25
  ENST ID: ENST00000525118
  CDS Start-End: 71-220
agacctgagcagttgctccggcggcgctcggggagggagccagcagcctagggcctaggcccgggccaccatggcgctgcctccaggcccagccgccctccggcacacactgctgctcctgccagcccttctgagctcagcacagtaccaaccgtgcctgagcccttcccagaggcctcctgctgtgttccaggttggggggagttggagccacaaatagatggtcagacctgggctgagcgggcacttcgggagaatgaacgccacgccttcacctgccgggtggcaggggggcctggcacccccagattggcctggtatctggatggacagctgcaggaggccagcacctcaagactgctgagcgtgggaggggaggccttctctggaggcaccagcaccttcactgtcactgcccatcgggcccagcatgagctcaactgctctctgcaggaccccagaagtggccgatcagccaacgcctctgtcatccttaatgtgcaattcaagccagagattgcccaagtcggcgccaagtaccaggaagctcagggcccaggcctcctggttgtcctgtttgccctggtgcgtgccaa

SEQ ID NO: 194077 - DNA, 573 bp, Homo sapiens
  Payload ID: 18338
  Gene Name: transmembrane protein 25
  ENST ID: ENST00000528373
  CDS Start-End: 71-573
agacctgagcagttgctccggcggcgctcggggagggagccagcagcctagggcctaggcccgggccaccatggcgctgcctccaggcccagccgccctccggcacacactgctgctcctgccagcccttctgagctcaggttggggggagttggagccacaaatagatggtcagacctgggctgagcgggcacttcgggagaatgaacgccacgccttcacctgccgggtggcaggggggcctggcacccccagattggcctggtatctggatggacagctgcaggaggccagcacctcaagactgctgagcgtgggaggggaggccttctctggaggcaccagcaccttcactgtcactgcccatcgggcccagcatgagctcaactgctctctgcaggaccccagaagtggccgatcagccaacgcctctgtcatccttaatgtgcaatggcttctggctacccgggtggaagtgccactgctgggcattgttgtggctgctgggcttgcactgggcaccctcgtggggttcagcaccttggtggcctgcctggtctgcagaaaagagaa

SEQ ID NO: 194078 - DNA, 586 bp, Homo sapiens
  Payload ID: 18338
  Gene Name: transmembrane protein 25
  ENST ID: ENST00000534181
  CDS Start-End: 68-181
agacctgagcagttgctccggcggcgctcggggagggagccagcctagggcctaggcccgggccaccatggcgctgcctccaggcccagccgccctccggcacacactgctgctcctgccagcccttctgagctcaggaccccagaagtggccgatcagccaacgcctctgtcatccttaatgtgcaattcaagccagagattgcccaagtcggcgccaagtaccaggaagctcagggcccaggcctcctggttgtcctgtttgccctggtgcgtgccaacccgccggccaatgtcacctggatcgaccaggatgggccagtgactgtcaacacctctgacttcctggtgctggatgcgcagaactacccctggctcaccaaccacacggtgcagctgcagctccgcagcctggcacacaacctctcggtggtggccaccaatgacgtgggtgtcaccagtgcgtcgcttccagccccagggcttctggctacccgggtggaagtgccactgctgggcattgttgtggctgctgggcttgcactgggcaccctcgtggggttcagcaccttggtggcctgcctggt

SEQ ID NO: 194079 - DNA, 583 bp, Homo sapiens
  Payload ID: 18338
  Gene Name: transmembrane protein 25
  ENST ID: ENST00000526973
  CDS Start-End: 1-583
agttgctccggcggcgctcggggagggagccagtcaagccagagattgcccaagtcggcgccaagtaccaggaagctcagggcccaggcctcctggttgtcctgtttgccctggtgcgtgccaacccgccggccaatgtcacctggatcgaccaggatgggccagtgactgtcaacacctctgacttcctggtgctggatgcgcagaactacccctggctcaccaaccacacggtgcagctgcagctccgcagcctggcacacaacctctcggtggtggccaccaatgacgtgggtgtcaccagtgcgtcgcttccagccccaggcccctcccggcacccatctctgatatcaagtgactccaacaacctaaaactcaacaacgtgcgcctgccacgggagaacatgtccctcccgtccaaccttcagctcaatgacctcactccagattccagagcagtgaaaccagcagaccggcagatggctcagaacaacagccggccagagcttctggacccggagcccggcggcctcctcaccagccaaggtttcatccgcctcccagtgctgggctatatctatcg

SEQ ID NO: 194080 - DNA, 565 bp, Homo sapiens
  Payload ID: 18338
  Gene Name: transmembrane protein 25
  ENST ID: ENST00000532762
  CDS Start-End: 61-565
agttgctccggcggcgctcggggagggagccagcagcctagggcctaggcccgggccaccatggcgctgcctccaggcccagccgccctccggcacacactgctgctcctgccagcccttctgagctcaggttggggggagttggagccacaaatagatggtcagacctgggctgagcgggcacttcgggagaatgaacgccacgccttcacctgccgggtggcaggggggcctggcacccccagattggcctggtatctggatggacagctgcaggaggccagcacctcaagactgctgagcgtgggaggggaggccttctctggaggcaccagcaccttcactgtcactgcccatcgggcccagcatgagctcaactgctctctgcaggaccccagaagtggccgatcagccaacgcctctgtcatccttaatgtgcaatgcccctcccggcacccatctctgatatcaagtgactccaacaacctaaaactcaacaacgtgcgcctgccacgggagaacatgtccctcccgtccaaccttcagctcaatgacctcactccag

SEQ ID NO: 194081 - DNA, 570 bp, Homo sapiens
  Payload ID: 18338
  Gene Name: transmembrane protein 25
  ENST ID: ENST00000533137
  CDS Start-End: 61-570
agttgctccggcggcgctcggggagggagccagcagcctagggcctaggcccgggccaccatggcgctgcctccaggcccagccgccctccggcacacactgctgctcctgccagcccttctgagctcaggggggcctggcacccccagattggcctggtatctggatggacagctgcaggaggccagcacctcaagactgctgagcgtgggaggggaggccttctctggaggcaccagcaccttcactgtcactgcccatcgggcccagcatgagctcaactgctctctgcaggaccccagaagtggccgatcagccaacgcctctgtcatccttaatgtgcaattcaagccagagattgcccaagtcggcgccaagtaccaggaagctcagggcccaggcctcctggttgtcctgtttgccctggtgcgtgccaacccgccggccaatgtcacctggatcgaccaggatgggccagtgactgtcaacacctctgacttcctggtgctggatgcgcagaactacccctggctcaccaaccacacggtgcagctgcagctccgcagcctg

SEQ ID NO: 194082 - DNA, 565 bp, Homo sapiens
  Payload ID: 18338
  Gene Name: transmembrane protein 25
  ENST ID: ENST00000527267
  CDS Start-End: 445-565
gatgggagagagaacagggcaggagagaggatgggaacagggcaggagagagaataggattaggagaaaggcgatccctttgggggaggggcgcgtggagtatgtgtgtgagtgtgcgtgtgtgcaaggtgtggttgcacggatgctcgttgcttctgcgtatctgcgggtgtgtgcctctttgtattgtagcctggagtcagtgctcgcttctgcgcctgcaggatgtccatgtgtctgctgggtgggtctgtgcctttgggctttgccgttcgtgtccgtgccttcgccactgggggctggtctacatttgcgtttccgtacatggttctttttgtttctggagagtaaattcctggagcaattgctaggcctgcctgctgtcacctggctgacaggcccgcccccttctctcagcagcctagggcctaggcccgggccaccatggcgctgcctccaggcccagccgccctccggcacacactgctgctcctgccagcccttctgagctcaggggggcctggcacccccagattggcctggtatctggatggacagctgcagg

SEQ ID NO: 194083 - DNA, 548 bp, Homo sapiens
  Payload ID: 18338
  Gene Name: transmembrane protein 25
  ENST ID: ENST00000533689
  CDS Start-End: 134-548
acggatgctcgttgcttctgcgtatctgcgggtgtgtgcctctttgtattgtagcctggagtcagtgctcgcttctgcgcctgcaggatgtccatgtgtctgctggcagcctagggcctaggcccgggccaccatggcgctgcctccaggcccagccgccctccggcacacactgctgctcctgccagcccttctgagctcaggttggggggagttggagccacaaatagatggtcagacctgggctgagcgggcacttcgggagaatgaacgccacgccttcacctgccgggtggcaggggggcctggcacccccagattggcctggtatctggatggacagctgcaggaggccagcacctcaagactgctgagcgtgggaggggaggccttctctggaggcaccagcaccttcactgtcactgcccatcgggcccagcatgagctcaactgctctctgcaggaccccagaagtggccgatcagccaacgcctctgtcatccttaatgtgcaattcaagccagagattgcccaagtcggcgccaagt

SEQ ID NO: 194084 - DNA, 909 bp, Homo sapiens
  Payload ID: 18339
  Gene Name: transmembrane protein 251
  Uniprot ID: Q8N6I4
  ENST ID: ENST00000283534
  CDS Start-End: 99-494
gcgcgcttccggcccgagccggaagctccgactgcggcggcatccgggacggcgggcgggctggccaccacgggacaggaaggcacagagcatggagaatgatgaacttccgtcagcggatgggatggattggagtgggattgtatctgttagccagtgcagcagcattttactatgtttttgaaatcagtgagacttacaacaggctggccttggaacacattcaacagcaccctgaggagccccttgaaggaaccacatggacacactccttgaaagctcaattactctccttgcctttttgggtgtggacagttatttttctggtaccttacttacagatgtttttgttcctatactcttgtacaagagctgatcccaaaacagtgggctactgtatcatccctatatgcttggcagttatttgcaatcgccaccaggcatttgtcaaggcttctaatcagatcagcagactacaactgattgacacgtaaaatcagtcaccgttttttccctacgattacaaaactgccagtcctatatggagtctgatcacaagactgcagtttcttcacagatctcaggaagttgtcgtggggcagaggctttttaaaaacatgtgattagggagctatctttatctgaataataacgaatttttaggtaaaacctgagatagagtactacaaaatcatgttgatgacttcagattttggaagttaaatcatgtctgttatttgcattctttagaaacttgactaagtacctgaattcatatttctattctactgtgcaacatagtgatgattcagaaatttttcctttggggaaaaaaatgaatatgaacatttccattgtgttaagtgtaaaaaggtccagacatgatcataaaatttaaattttatacaa

SEQ ID NO: 194085 - DNA, 1303 bp, Homo sapiens
  Payload ID: 18339
  Gene Name: transmembrane protein 251
  Uniprot ID: Q8N6I4
  ENST ID: ENST00000415050
  CDS Start-End: 376-885
ggccaccacgggacaggaaggtgagatccgggacctcagctttgcaagcaggctccgccggcgaccgctgacgggcgctgggctcgcggcgctgcaaggcggcgaggcccgggcctggcgccgcctgcgcagccttggtcgcggcgtgccggcgctgcagcgcggcagggggcggggccggccgcccggaggcccaagtggcggggacgcctccctgccgggtcaggttctcagagcgggtctccggcggcggcgacgggggccgggccgcgcgtgacccgccgcagtcacgccgttcttaatcactagtagctggtgctccaggctggcggcgctcacctttctcctagccgggtgacccaggggatttattttatgttggctttctctgaaatgccaaagccacccgattattcagagctgagtgactctttaacgcttgccgtgggaacaggaagattttcgggaccattgcacagagcatggagaatgatgaacttccgtcagcggatgggatggattggagtgggattgtatctgttagccagtgcagcagcattttactatgtttttgaaatcagtgagacttacaacaggctggccttggaacacattcaacagcaccctgaggagccccttgaaggaaccacatggacacactccttgaaagctcaattactctccttgcctttttgggtgtggacagttatttttctggtaccttacttacagatgtttttgttcctatactcttgtacaagagctgatcccaaaacagtgggctactgtatcatccctatatgcttggcagttatttgcaatcgccaccaggcatttgtcaaggcttctaatcagatcagcagactacaactgattgacacgtaaaatcagtcaccgttttttccctacgattacaaaactgccagtcctatatggagtctgatcacaagactgcagtttcttcacagatctcaggaagttgtcgtggggcagaggctttttaaaaacatgtgattagggagctatctttatctgaataataacgaatttttaggtaaaacctgagatagagtactacaaaatcatgttgatgacttcagattttggaagttaaatcatgtctgttatttgcattctttagaaacttgactaagtacctgaattcatatttctattctactgtgcaacatagtgatgattcagaaatttttcctttggggaaaaaaatgaatatgaacatttccattgtgttaagtgtaaaaaggtccagacatgatcataaaatttaaattttatacaatta

SEQ ID NO: 194086 - DNA, 1303 bp, Homo sapiens; identical to SEQ ID NO: 194085
  Payload ID: 18339
  Gene Name: transmembrane protein 251
  Uniprot ID: Q8N6I4
  ENST ID: ENST00000622205
  CDS Start-End: 376-885

SEQ ID NO: 194087 - DNA, 909 bp, Homo sapiens; identical to SEQ ID NO: 194084
  Payload ID: 18339
  Gene Name: transmembrane protein 251
  Uniprot ID: Q8N6I4
  ENST ID: ENST00000626767
  CDS Start-End: 99-494

SEQ ID NO: 194088 - DNA, 1245 bp, Homo sapiens
  Payload ID: 18340
  Gene Name: transmembrane protein 252
  Uniprot ID: Q8N6L7
  ENST ID: ENST00000377311
  CDS Start-End: 54-566
cagggaagcagaggagcagcagggtcagggtgctgggttcctaaggtgcaaggatgcagaacagaactggcctcattctctgtgctcttgccctcctgatgggtttcctgatggtctgcctgggggccttcttcatttcctggggctccatattcgactgtcaggggagcctgattgcggcctatttgcttctgcctctggggtttgtgatccttctgagtggaattttctggagcaactatcgccaggtgactgaaagcaaaggagtgttgaggcacatgctccgacaacaccttgctcatggggccctgcccgtggccacagtagacaggccagacttttaccctccagcttatgaagagagccttgaggtggaaaagcagagctgtcctgcagagagagaggcctctggcattcctccacctctatatacagagacgggcctggaattccaggatggaaatgactcccacccagaggccccaccatcttatagagagtccatagccggcctggtggtgacagcaatctcagaggacgcccagaggcgaggccaagagtgctgaggcagagaaagctctccagcactcatgatgccaccactgtggggagcagctactgataataaaggcaaacgagggactgtgggaggaaaagccacaccagggaccccacaagagagcttggggaggggatgacagccctgaattccagacataactggccatgccagggcagggcaggccaggggccctggaagggtgtggccaacaccaagcagacatttcagagcattcacactaatcttaaccccggctggccttgggtccccaaaggtgtcactctgagagctctgcttacagagattctttctgctgtcactcaatttccctcccatcacctcaactccagccagggaggaatagatgctggttgtcaggacagccacatgccttcctgttctatatcacctagtaatctcaaagcgaaggtttgttgtttaatttattgattgttcagccttttgttttgttagcttgtttcctagttacctccagctgaccatactaccagagtgaggcagtacttcacatcctgggagatatgccctcggaacccatgaatgttattttgtattattttattttcatgatatgtattttttctatgtaaaaggaaaatgactgtaatatttgccttcaagatggttcaaacacaaaatattaaatgagctgtttcttaaaa

SEQ ID NO: 194089 - DNA, 1236 bp, Homo sapiens
  Payload ID: 18341
  Gene Name: transmembrane protein 253
  Uniprot ID: P0C7T8
  ENST ID: ENST00000556585
  CDS Start-End: 119-772
gtctgctctgagctatcaagccccttaggagacctaggacccagctgggtcccatccctttggagtagctgcttcagactagcctaggaagcacctaattcttgtgggcaaaggagccatggaagatagagctggtgagcaagagcaggagagacacagccttcgtctggaaaagctacaacactgggcaaggcacaggcagagtgggcacctcttggtgctagcggtgagccagctatggctggcagtggttgtggtgccccttgctgtctcagtcgcctgcctgaactctgattgtcacatggccacagcgctgcctcttgggcctggagcctcaggtctcctcactgggactgtcactctggagcttcgcagagcaccccgcctttggaaggtgcgggccatgatgatattcaacaccttcaacttgatcttgggtttcatagtggtggtggtcgaggtgatgaagacagccttggggcctgccccaactgcctcctcccagcatgctggcttgctggtgctggaactcagtgctgaggccttcaccctagggggagtgctggtctcagtgcacgccctattcttgctgagccagaggaaaccaggatgctgcaggagccagagtctgcactatcaagagctgcaggagggcttctctgagttggaagaggttcctggtttggagaatggtcccacggtggccagcacaggagcaaatgagagggtgggacagcgggaacagacacgtgctgctctccttccaccctgagagaatgctctccagacattcctgcatcccaccccaccaaactcagaagcttgctgggatccttcgagtccaataggaagtccgggagtgccttcagttttcactcaaagcaggcccttttttcgttccttccctgttaggggaagatacacctggacgagaatatatcctcacctcaccaccctgaaaagctgctttctcccttgcatccatatcctctcttcctgtcacctccccatacagcttcacatttgcctcatcgcacttttcttttctgtccacctttcataatcccatccactccaaatcccggaccctgcacacgccaactccctgaatccaattcaggagtgccccagttcccctttcgatccatctcctttctactgtagcggagactacaagtcccaggatgccccgctagcccgtgaccggctaggaaataaagagccttctctccgcgg

SEQ ID NO: 194090 - DNA, 786 bp, Homo sapiens
  Payload ID: 18341
  Gene Name: transmembrane protein 253
  ENST ID: ENST00000554329
  CDS Start-End: 406-786
gcgattatagagatagttaatgtcggccgtataagaaacattattaaagttactcttcggtcctttccgttcttgataaacaattcctgcgccttcctctcgaattctattttccattcctcaagtcactttaatggctcttcaatacaacaaatatttactgagtgcttactaagtgccaggcactgggctcagcgctgtgagggatgagaaagaagtggtaccttccttccaggcgattgtagtctagactacaaactgccttcctctgccaggacaagtttgtcgtctgctctgagctatcaagccccttaggagacctaggacccagctgggtcccatccctttggagtagctgcttcagactagcctaggaagcacctaattcttgtgggcaaaggagccatggaagatagagctggtgagcaagagcaggagagacacagccttcgtctggaaaagctacaacactgggcaaggcacaggcagagtgggcacctcttggtgctagcgggtctcctcactgggactgtcactctggagcttcgcagagcaccccgcctttggaaggtgcgggccatgatgatattcaacaccttcaacttgatcttgggtttcatagtggtggtggtcgaggtgatgaagacagccttggggcctgccccaactgcctcctcccagcatgctggcttgctggtgctggaactcagtgctgaggccttcaccctagggggagtgctggtctcagtgcacgccctattcttgctgagccagaggaaaccagga

SEQ ID NO: 194091 - DNA, 1526 bp, Homo sapiens
  Payload ID: 18341
  Gene Name: transmembrane protein 253
  Uniprot ID: P0C7T8
  ENST ID: ENST00000418511
  CDS Start-End: 407-1060
ggcgattatagagatagttaatgtcggccgtataagaaacattattaaagttactcttcggtcctttccgttcttgataaacaattcctgcgccttcctctcgaattctattttccattcctcaagtcactttaatggctcttcaatacaacaaatatttactgagtgcttactaagtgccaggcactgggctcagcgctgtgagggatgagaaagaagtggtaccttccttccaggcgattgtagtctagactacaaactgccttcctctgccaggacaagtttgtcgtctgctctgagctatcaagccccttaggagacctaggacccagctgggtcccatccctttggagtagctgcttcagactagcctaggaagcacctaattcttgtgggcaaaggagccatggaagatagagctggtgagcaagagcaggagagacacagccttcgtctggaaaagctacaacactgggcaaggcacaggcagagtgggcacctcttggtgctagcggtgagccagctatggctggcagtggttgtggtgccccttgctgtctcagtcgcctgcctgaactctgattgtcacatggccacagcgctgcctcttgggcctggagcctcaggtctcctcactgggactgtcactctggagcttcgcagagcaccccgcctttggaaggtgcgggccatgatgatattcaacaccttcaacttgatcttgggtttcatagtggtggtggtcgaggtgatgaagacagccttggggcctgccccaactgcctcctcccagcatgctggcttgctggtgctggaactcagtgctgaggccttcaccctagggggagtgctggtctcagtgcacgccctattcttgctgagccagaggaaaccaggatgctgcaggagccagagtctgcactatcaagagctgcaggagggcttctctgagttggaagaggttcctggtttggagaatggtcccacggtggccagcacaggagcaaatgagagggtgggacagcgggaacagacacgtgctgctctccttccaccctgagagaatgctctccagacattcctgcatcccaccccaccaaactcagaagcttgctgggatccttcgagtccaataggaagtccgggagtgccttcagttttcactcaaagcaggcccttttttcgttccttccctgttaggggaagatacacctggacgagaatatatcctcacctcaccaccctgaaaagctgctttctcccttgcatccatatcctctcttcctgtcacctccccatacagcttcacatttgcctcatcgcacttttcttttctgtccacctttcataatcccatccactccaaatcccggaccctgcacacgccaactccctgaatccaattcaggagtgccccagttcccctttcgatccatctcctttctactgtagcggagactacaagtcccaggatgccccgctagcccgtgaccggctaggaaataaagagccttctctccgcggta

SEQ ID NO: 194092 - DNA, 2074 bp, Homo sapiens
  Payload ID: 18342
  Gene Name: transmembrane protein 254
  ENST ID: ENST00000372273
  CDS Start-End: 1-434
ggacggctggggagctcccagccaactctgtgtctgggtttttcaagaggatggtgaagtcggaggccagcaatgcggctaccgcctatttccgtccagcaagacccttgccctctctggtcacagtcctggggctgggctacttcgcgtgggttgtcttctggcctcagagtatcccttatcagaaccttgggcccctgggccccttcactcagtacttggtggaccaccatcacaccctcctgtgcaatgggtattggcttgcctggctgattcatgtgggagagtccttgtatgccatagtattgtgcaagcataaaggcatcacaagtggtcgggctcagctactctggttcctacagactttcttctttgggatagcgtctctcaccatcttgattgcttacaaacggaagcgccaaaaacaaacttgaagttgtctgaaagcttgctctacacttttacattcatcctcacccttttttttgtggggtagaggaggtgcagtaatttactcagtgatctttctactttctagaaactgtccttcaaagctctttaagaccccctcgttagtcagttttttctcttatatgctctggttgagcttgaatagaccagttgttacttaagaaagaaacagagaaagattttagcttttcaatcctatttggcagaggacttcagctaccttcttacagtctttggctgtgttggtaccctcgtgtgctctgagctaagccacatactaaactgactttttggtttgtatacccttgctcccgccttctgatgaaaacaccttaccctcacaaccaccatctttcctctcctttccaaagctctttccaccttgctgcactaagataaagtgacacttccactatatgtcaattccacacacatttattaggtacctgtgaggtaggatcctatcctctcaaacttccatttctcatgctacagagaaagataaggaagatgagcaagtgcctggaatggggcaggctgagcagtcacacaggcatagaggcacgctgagaacctggaggggagactgcagagtgccttccctgatgctgcagccggaagtgatccttccctccacctggcccctgggacactgtgctctgcagtgtgcagggcctgatggcactgctagattgctccttcagctcagggccacagcttaaacagctttacctttcccctcagcacctgtcccactatcttgcacacaggtgctctaaccatgtttattgaacaaaggagggaaactgatttcactttcacttgttcattatcattccaatttttatgtgaaaatggcacaacccatttggggtaccctcaccccaaaataaaagcccaagtctacctttgactggtaccaccttttttgtggtttcgttggtgagaaacctttatctttttcatacctttctattctcaatcacttctccaaaagtgtgtctttccagctctgatttattcaaaacacaagcatttctgtttagagattctagcccatgggttatctggctagttattacctctcctgttcacttagttatactttattattgctcacaggctggggaggcagaatgactctgtcaccactaggagccattagggcttcttccctggaggactgcctgcttgctttctggggacactagccctcatttcccttctgtggtacagtggggcaaattatttgtattaagcaaacatttatgggaaacaacccgctcccgaaaacggagcccccaagtaaagcacaaccctgaaagattatgaactatgaattgtctctggtagagataaatttctgcaaacatatctcagtcttccctctgtttctctggtgattaagaagttcctttttggtaaggaaaaggatttttaaccatagagttaggcatcatggaaattcaaaccagatttcttaatacctggtcttcctcaaagagaaataataacagtaatagtggtgctgggaacaatatggcagattattgaatgaaattgattaacttgaataaaatgctgtgaattttctctagctgaa

SEQ ID NO: 194093 - DNA, 481 bp, Homo sapiens
  Payload ID: 18342
  Gene Name: transmembrane protein 254
  Uniprot ID: Q8TBM7
  ENST ID: ENST00000372274
  CDS Start-End: 9-320
ttgcagccatggctacggcagccggcgcgacctactttcagcgaggcagtctgttctggttcacagtcatcaccctcagctttggctactacacatgggttgtcttctggcctcagagtatcccttatcagaaccttgggcccctgggccccttcactcagtacttggtggaccaccatcacaccctcctgtgcaatgggtattggcttgcctggctgattcatgtgggagagtccttgtatgccatagtattgtgcaagcaaaatgagctaagaatacggataaagatgagaaaactgattctgagagattctgagtgatttgcccaggtcacagctggcataaaggcatcacaagtggtcgggctcagctactctggttcctacagactttcttctttgggatagcgtctctcaccatcttgattgcttacaaacggaagcgccaaaaacaaacttgaagttgtctgaaagcttgctct

SEQ ID NO: 194094 - DNA, 860 bp, Homo sapiens
  Payload ID: 18342
  Gene Name: transmembrane protein 254
  Uniprot ID: Q8TBM7
  ENST ID: ENST00000372275
  CDS Start-End: 19-273
cggggaggtgttgcagccatggctacggcagccggcgcgacctactttcagcgaggcagtctgttctggttcacagtcatcaccctcagctttggctactacacatgggttgtcttctggcctcagagtatcccttatcagaaccttgggcccctgggccccttcactcagtacttggtggaccaccatcacaccctcctgtgcaatgggtattggcttgcctggctgattcatgtgggagagtccttgtatgccatagtattgtgcaaatgagaaaactgattctgagagattctgagtgatttgcccaggtcacagctggcataaaggcatcacaagtggtcgggctcagctactctggttcctacagactttcttctttgggatagcgtctctcaccatcttgattgcttacaaacggaagcgccaaaaacaaacttgaagttgtctgaaagcttgctctacacttttacattcatcctcacccttttttttgtggggtagaggaggtgcagtaatttactcagtgatctttctactttctagaaactgtccttcaaagctctttaagaccccctcgttagtcagttttttctcttatatgctctggttgagcttgaatagaccagttgttacttaagaaagaaacagagaaagattttagcttttcaatcctatttggcagaggacttcagctaccttcttacagtctttggctgtgttggtaccctcgtgtgctctgagctaagccacatactaaactgactttttggtttgtatacccttgctcccgccttctgatgaaaacaccttaccctcacaaccaccatctttcctctcctttccaaagctctttccac

SEQ ID NO: 194095 - DNA, 366 bp, Homo sapiens
  Payload ID: 18342
  Gene Name: transmembrane protein 254
  Uniprot ID: Q8TBM7
  ENST ID: ENST00000372277
  CDS Start-End: 55-366
cgcgctcgcgctcgacggtgtcctgaagcgcgctcccggggaggtgttgcagccatggctacggcagccggcgcgacctactttcagcgaggcagtctgttctggttcacagtcatcaccctcagctttggctactacacatgggttgtcttctggcctcagagtatcccttatcagaaccttgggcccctgggccccttcactcagtacttggtggaccaccatcacaccctcctgtgcaatgggtattggcttgcctggctgattcatgtgggagagtccttgtatgccatagtattgtgcaagcaaaatgagctaagaatacggataaagatgagaaaactgattctgagagattctgagtga

SEQ ID NO: 194096 - DNA, 2042 bp, Homo sapiens
  Payload ID: 18342
  Gene Name: transmembrane protein 254
  Uniprot ID: Q8TBM7
  ENST ID: ENST00000372281
  CDS Start-End: 31-402
gaagcgcgctcccggggaggtgttgcagccatggctacggcagccggcgcgacctactttcagcgaggcagtctgttctggttcacagtcatcaccctcagctttggctactacacatgggttgtcttctggcctcagagtatcccttatcagaaccttgggcccctgggccccttcactcagtacttggtggaccaccatcacaccctcctgtgcaatgggtattggcttgcctggctgattcatgtgggagagtccttgtatgccatagtattgtgcaagcataaaggcatcacaagtggtcgggctcagctactctggttcctacagactttcttctttgggatagcgtctctcaccatcttgattgcttacaaacggaagcgccaaaaacaaacttgaagttgtctgaaagcttgctctacacttttacattcatcctcacccttttttttgtggggtagaggaggtgcagtaatttactcagtgatctttctactttctagaaactgtccttcaaagctctttaagaccccctcgttagtcagttttttctcttatatgctctggttgagcttgaatagaccagttgttacttaagaaagaaacagagaaagattttagcttttcaatcctatttggcagaggacttcagctaccttcttacagtctttggctgtgttggtaccctcgtgtgctctgagctaagccacatactaaactgactttttggtttgtatacccttgctcccgccttctgatgaaaacaccttaccctcacaaccaccatctttcctctcctttccaaagctctttccaccttgctgcactaagataaagtgacacttccactatatgtcaattccacacacatttattaggtacctgtgaggtaggatcctatcctctcaaacttccatttctcatgctacagagaaagataaggaagatgagcaagtgcctggaatggggcaggctgagcagtcacacaggcatagaggcacgctgagaacctggaggggagactgcagagtgccttccctgatgctgcagccggaagtgatccttccctccacctggcccctgggacactgtgctctgcagtgtgcagggcctgatggcactgctagattgctccttcagctcagggccacagcttaaacagctttacctttcccctcagcacctgtcccactatcttgcacacaggtgctctaaccatgtttattgaacaaaggagggaaactgatttcactttcacttgttcattatcattccaatttttatgtgaaaatggcacaacccatttggggtaccctcaccccaaaataaaagcccaagtctacctttgactggtaccaccttttttgtggtttcgttggtgagaaacctttatctttttcatacctttctattctcaatcacttctccaaaagtgtgtctttccagctctgatttattcaaaacacaagcatttctgtttagagattctagcccatgggttatctggctagttattacctctcctgttcacttagttatactttattattgctcacaggctggggaggcagaatgactctgtcaccactaggagccattagggcttcttccctggaggactgcctgcttgctttctggggacactagccctcatttcccttctgtggtacagtggggcaaattatttgtattaagcaaacatttatgggaaacaacccgctcccgaaaacggagcccccaagtaaagcacaaccctgaaagattatgaactatgaattgtctctggtagagataaatttctgcaaacatatctcagtcttccctctgtttctctggtgattaagaagttcctttttggtaaggaaaaggatttttaaccatagagttaggcatcatggaaattcaaaccagatttcttaatacctggtcttcctcaaagagaaataataacagtaatagtggtgctgggaacaatatggcagattattgaatgaaattgattaacttgaataaaatgctgtgaattttctctagctgaa

SEQ ID NO: 194097 - DNA, 719 bp, Homo sapiens
  Payload ID: 18342
  Gene Name: transmembrane protein 254
  ENST ID: ENST00000450179
  CDS Start-End: 1-304
agagtttcttcggtctgtgtgggttgtcttctggcctcagagtatcccttatcagaaccttgggcccctgggccccttcactcagtacttggtggaccaccatcacaccctcctgtgcaatgggtattggcttgcctggctgattcatgtgggagagtccttgtatgccatagtattgtgcaagcataaaggcatcacaagtggtcgggctcagctactctggttcctacagactttcttctttgggatagcgtctctcaccatcttgattgcttacaaacggaagcgccaaaaacaaacttgaagttgtctgaaagcttgctctacacttttacattcatcctcacccttttttttgtggggtagaggaggtgcagtaatttactcagtgatctttctactttctagaaactgtccttcaaagctctttaagaccccctcgttagtcagttttttctcttatatgctctggttgagcttgaatagaccagttgttacttaagaaagaaacagagaaagattttagcttttcaatcctatttggcagaggacttcagctaccttcttacagtctttggctgtgttggtaccctcgtgtgctctgagctaagccacatactaaactgactttttggtttgtatacccttgctcccgccttctgatgaaaacaccttaccctcacaaccaccatctttcctctcctttccaaagctctttc

SEQ ID NO: 194098 - DNA, 2154 bp, Homo sapiens
  Payload ID: 18342
  Gene Name: transmembrane protein 254
  ENST ID: ENST00000613758
  CDS Start-End: 55-360
cgcgctcgcgctcgacggtgtcctgaagcgcgctcccggggaggtgttgcagccatggctacggcagccggcgcgacctactttcagcgaggcagtctgttctggttcacagtcatcaccctcagctttggctactacacaccccagcagcggagtgagaccctgtcaaaaaaaaaagaaagaaagaaaatagaagccaagaatggagacccaaatgactgttcagagtttcttcgtgggttgtcttctggcctcagagtatcccttatcagaaccttgggcccctgggccccttcactcagtacttggtggaccaccatcacaccctcctgtgcaatgggtattggcttgcctggctgattcatgtgggagagtccttgtatgccatagtattgtgcaagcataaaggcatcacaagtggtcgggctcagctactctggttcctacagactttcttctttgggatagcgtctctcaccatcttgattgcttacaaacggaagcgccaaaaacaaacttgaagttgtctgaaagcttgctctacacttttacattcatcctcacccttttttttgtggggtagaggaggtgcagtaatttactcagtgatctttctactttctagaaactgtccttcaaagctctttaagaccccctcgttagtcagttttttctcttatatgctctggttgagcttgaatagaccagttgttacttaagaaagaaacagagaaagattttagcttttcaatcctatttggcagaggacttcagctaccttcttacagtctttggctgtgttggtaccctcgtgtgctctgagctaagccacatactaaactgactttttggtttgtatacccttgctcccgccttctgatgaaaacaccttaccctcacaaccaccatctttcctctcctttccaaagctctttccaccttgctgcactaagataaagtgacacttccactatatgtcaattccacacacatttattaggtacctgtgaggtaggatcctatcctctcaaacttccatttctcatgctacagagaaagataaggaagatgagcaagtgcctggaatggggcaggctgagcagtcacacaggcatagaggcacgctgagaacctggaggggagactgcagagtgccttccctgatgctgcagccggaagtgatccttccctccacctggcccctgggacactgtgctctgcagtgtgcagggcctgatggcactgctagattgctccttcagctcagggccacagcttaaacagctttacctttcccctcagcacctgtcccactatcttgcacacaggtgctctaaccatgtttattgaacaaaggagggaaactgatttcactttcacttgttcattatcattccaatttttatgtgaaaatggcacaacccatttggggtaccctcaccccaaaataaaagcccaagtctacctttgactggtaccaccttttttgtggtttcgttggtgagaaacctttatctttttcatacctttctattctcaatcacttctccaaaagtgtgtctttccagctctgatttattcaaaacacaagcatttctgtttagagattctagcccatgggttatctggctagttattacctctcctgttcacttagttatactttattattgctcacaggctggggaggcagaatgactctgtcaccactaggagccattagggcttcttccctggaggactgcctgcttgctttctggggacactagccctcatttcccttctgtggtacagtggggcaaattatttgtattaagcaaacatttatgggaaacaacccgctcccgaaaacggagcccccaagtaaagcacaaccctgaaagattatgaactatgaattgtctctggtagagataaatttctgcaaacatatctcagtcttccctctgtttctctggtgattaagaagttcctttttggtaaggaaaaggatttttaaccatagagttaggcatcatggaaattcaaaccagatttcttaatacctggtcttcctcaaagagaaataataacagtaatagtggtgctgggaacaatatggcagattattgaatgaaattgattaacttgaataaaatgctgtgaattttctct

SEQ ID NO: 194099 - DNA, 3394 bp, Homo sapiens
  Payload ID: 18343
  Gene Name: transmembrane protein 255A
  Uniprot ID: Q5JRV8
  ENST ID: ENST00000309720
  CDS Start-End: 125-1174
agtgtctctcagctctcggaaggaccgagagaggcaaccgcggagtaggatgctctgcggggcgcccagagccgggggcgcttgaagcagcttcggggactggggcaaccgggcagttttcaccatgcatcagtccctgactcagcagcggtccagcgacatgtccctgcccgattccatgggagcattcaatcggaggaaacgaaactccatctatgtcaccgtgactttgcttattgtgtccgtgttaattctcacagtgggccttgctgcaaccaccaggacccagaatgtgactgtaggaggttattaccccggagttattctcggctttggatcgttccttggaatcattggatcaaaccttattgagaacaaaaggcagatgctggtggcttctatcgtgtttatcagctttggtgtgattgcggctttttgttgtgccatagttgacggggtctttgctgccagacacattgatctgaaaccactctacgctaaccggtgccattatgttcccaagacatcacagaaggaagctgaggaggtcataagttcctcaaccaaaaattctccttccacgagggttatgaggaaccttacccaggcagctagagaggttaactgccctcacctcagccgtgaattctgcacacctcgcatccggggcaacacctgcttctgctgtgacctctacaactgtggcaaccgggtggagatcactggtgggtactacgaatacatcgatgtcagcagttgccaagatatcatccacctctaccacctgctctggtctgccaccatcctcaacattgttggcctgttcctgggcatcatcactgccgctgtccttggaggctttaaggacatgaacccaactctcccagcactgaactgttctgttgaaaatacccatccaacagtttcttactatgctcatccccaagtggcatcctacaatacctactaccatagccctcctcacctgccaccatattctgcttatgactttcagcattccggtgtctttccatcctcccctccctctggactttctgatgagccccagtctgcctctccctcacccagctacatgtggtcctcaagtgcaccgccccgttactctccaccctactatccaccttttgaaaagccaccaccttacagtccctaaagaggaatgcctgctggctattgagattattgtggcttttgtatttctgcttcagtggaagtgtgtagggtacaaaatttaaagtgtgactcttatgcataaagttttacaatggcctgccaggctagggaaagatagggacgaagcttattcattattagtgcagagcaggggtggtcaggctgaacgcagcacagaagggcagctcacattctctaagcaagactggggagccagcccagcaagaagcttgtttggacttgcattaccctatgctccacctctgtattcagcagaagtgtggttgccatctttttcactttatgtaaaggagtgttgccctcgggcccttggcagattgccaccccagcacctaggttgaagcacctggtttataggccctatctttccctacccctaaagtcagtccctaaggacaatttcccagctgatggggctacacagtagttccaatacagagagttctggctaagattttgtttgcttgtgtctggatgttgaaaaagactgcccgtatctcttactccttccttctctgtgagtattgtaaaaatggctgttgtgatcactcagctcagcttttgttattggtacctcctaaagggaaaagtgcaatattcttgcatcttcagtagtggggaacaggatgtattgttccggaaacactgaaatacacagcaacatgtgagatgttttaagtagatcacttaggagacagtggttctactacatgttgcattattacaaaatacatttgctacaggagatataaatcttatggttgtaattcagagtttaaaaatgttataaattaggttcttgggtcgtgatatgaattgttactaatctttgtgactatttaatcttcaaatattgtgcttaaccccagcaatccgcacgtatcctgcaccccaccccaaaagagtcatctgtattttaatgccactggtcttatcggtccttttgtctgttgagaccagtcatgacagcattcaagattatgaaagtgttacaatgccgcttcaagtctgcaaaacctcaaacgtagccaacttgacaaatatttaagtgttacggcagatttaaaatccatctggcacaccgtggtaggtatttgtacagttcttttaattacacatagctttaaaccatcaacctgatgagtttaaagcttttgcacccatgccttcacttcagaatgaacaccttcattgtgatcttatgttaacctgagaattgatttaaaggaagattgataatcctatactttataacgtaaaaatacaggggctacaggagggtacctaattagacagttctccaaacacagaacacacactggaaaattttccggccaattttgctacctcccaacttgatggattagaggtagcgcaaatgctggtgctcccatctaccttgtagacacttagccatcaagaatcaaggcacaagaagtgcactctctcattaacagtaaatgtttgcaagatattcagtttaactttcagcatcatgaatgttcttatccagattttgaatccgaaaaactataatccttttatgttatacaaaattactatgattttttacagttctgagcatattaaaattctactggatttcaaaaagagactaatacccaactgactaactaaacaaatatcaacttgtaatactcaatgaatttttttgccatttacatttgaccgttggctttagtgaatgtccatatttaattttttaaggcaccattacacagtttatcctacatttatcacatttcttaaagtgttaagattctatggctcatttctatgtatttttcttactttacaaaataacctgaaacagtatagattttgtaacacttaatttgagcagcttttttattacattgaattatacaaagtgcatgttaccttagaaaaattaatatttgctgctttactcttttgcaaaacatttgctgtaatgaatggatttgtatttccaatatgtatcttgactgcattttgtaatatttactgctttattcctaattctgctttaaagtactgaactgggcatgaaacattaaaatattaatccagaaactgtataaactggatgttgcttaaaatctgtatcactgccatgttgaaaactcagactgcttttgtgatgtttcaaatgaataaaactatcctcccctcgtta

SEQ ID NO: 194100 - DNA, 2879 bp, Homo sapiens
  Payload ID: 18343
  Gene Name: transmembrane protein 255A
  Uniprot ID: Q5JRV8
  ENST ID: ENST00000371352
  CDS Start-End: 103-660
catttgctatgaatattctctataacaaagcaagacaaatttagcagcacttcattgcatctggatgggggagagagctggacaatttcttgctaacaagagatggttaactgccctcacctcagccgtgaattctgcacacctcgcatccggggcaacacctgcttctgctgtgacctctacaactgtggcaaccgggtggagatcactggtgggtactacgaatacatcgatgtcagcagttgccaagatatcatccacctctaccacctgctctggtctgccaccatcctcaacattgttggcctgttcctgggcatcatcactgccgctgtccttggaggctttaaggacatgaacccaactctcccagcactgaactgttctgttgaaaatacccatccaacagtttcttactatgctcatccccaagtggcatcctacaatacctactaccatagccctcctcacctgccaccatattctgcttatgactttcagcattccggtgtctttccatcctcccctccctctggactttctgatgagccccagtctgcctctccctcacccagctacatgtggtcctcaagtgcaccgccccgttactctccaccctactatccaccttttgaaaagccaccaccttacagtccctaaagaggaatgcctgctggctattgagattattgtggcttttgtatttctgcttcagtggaagtgtgtagggtacaaaatttaaagtgtgactcttatgcataaagttttacaatggcctgccaggctagggaaagatagggacgaagcttattcattattagtgcagagcaggggtggtcaggctgaacgcagcacagaagggcagctcacattctctaagcaagactggggagccagcccagcaagaagcttgtttggacttgcattaccctatgctccacctctgtattcagcagaagtgtggttgccatctttttcactttatgtaaaggagtgttgccctcgggcccttggcagattgccaccccagcacctaggttgaagcacctggtttataggccctatctttccctacccctaaagtcagtccctaaggacaatttcccagctgatggggctacacagtagttccaatacagagagttctggctaagattttgtttgcttgtgtctggatgttgaaaaagactgcccgtatctcttactccttccttctctgtgagtattgtaaaaatggctgttgtgatcactcagctcagcttttgttattggtacctcctaaagggaaaagtgcaatattcttgcatcttcagtagtggggaacaggatgtattgttccggaaacactgaaatacacagcaacatgtgagatgttttaagtagatcacttaggagacagtggttctactacatgttgcattattacaaaatacatttgctacaggagatataaatcttatggttgtaattcagagtttaaaaatgttataaattaggttcttgggtcgtgatatgaattgttactaatctttgtgactatttaatcttcaaatattgtgcttaaccccagcaatccgcacgtatcctgcaccccaccccaaaagagtcatctgtattttaatgccactggtcttatcggtccttttgtctgttgagaccagtcatgacagcattcaagattatgaaagtgttacaatgccgcttcaagtctgcaaaacctcaaacgtagccaacttgacaaatatttaagtgttacggcagatttaaaatccatctggcacaccgtggtaggtatttgtacagttcttttaattacacatagctttaaaccatcaacctgatgagtttaaagcttttgcacccatgccttcacttcagaatgaacaccttcattgtgatcttatgttaacctgagaattgatttaaaggaagattgataatcctatactttataacgtaaaaatacaggggctacaggagggtacctaattagacagttctccaaacacagaacacacactggaaaattttccggccaattttgctacctcccaacttgatggattagaggtagcgcaaatgctggtgctcccatctaccttgtagacacttagccatcaagaatcaaggcacaagaagtgcactctctcattaacagtaaatgtttgcaagatattcagtttaactttcagcatcatgaatgttcttatccagattttgaatccgaaaaactataatccttttatgttatacaaaattactatgattttttacagttctgagcatattaaaattctactggatttcaaaaagagactaatacccaactgactaactaaacaaatatcaacttgtaatactcaatgaatttttttgccatttacatttgaccgttggctttagtgaatgtccatatttaattttttaaggcaccattacacagtttatcctacatttatcacatttcttaaagtgttaagattctatggctcatttctatgtatttttcttactttacaaaataacctgaaacagtatagattttgtaacacttaatttgagcagcttttttattacattgaattatacaaagtgcatgttaccttagaaaaattaatatttgctgctttactcttttgcaaaacatttgctgtaatgaatggatttgtatttccaatatgtatcttgactgcattttgtaatatttactgctttattcctaattctgctttaaagtactgaactgggcatgaaacattaaaatattaatccagaaactgtataaactggatgttgcttaaaatctgtatcactgccatgttgaaaactcagactgcttttgtgatgtttcaaatgaataaaactatcctcccctcgtt

SEQ ID NO: 194101 - DNA, 3425 bp, Homo sapiens
  Payload ID: 18343
  Gene Name: transmembrane protein 255A
  Uniprot ID: Q5JRV8
  ENST ID: ENST00000371369
  CDS Start-End: 228-1205
aatgctgctgcctcccagagcagagggaggcagaagaggagggagggagaagagtggaagggagggggaggcggcacttgggctgcagctcgcaaccagaggcagtgtctctcagctctcggaaggaccgagagaggcaaccgcggagtaggatgctctgcggggcgcccagagccgggggcgcttgaagcagcttcggggactggggcaaccgggcagttttcaccatgcatcagtccctgactcagcagcggtccagcgacatgtccctgcccgattccatgggagcattcaatcggaggaaacgaaactccatctatgtcaccgtgactttgcttattgtgtccgtgttaattctcacagtgggccttgctgcaaccaccaggacccagaatgtgactgtaggaggttattaccccggagttattctcggctttggatcgttccttggaatcattggatcaaaccttattgagaacaaaaggcagatgctggtggcttctatcgtgtttatcagctttggtgtgattgcggctttttgttgtgccatagttgacggggtctttgctgccagacacattgatctgaaaccactctacgctaaccggtgccattatgttcccaagacatcacagaaggaagctgaggaggttaactgccctcacctcagccgtgaattctgcacacctcgcatccggggcaacacctgcttctgctgtgacctctacaactgtggcaaccgggtggagatcactggtgggtactacgaatacatcgatgtcagcagttgccaagatatcatccacctctaccacctgctctggtctgccaccatcctcaacattgttggcctgttcctgggcatcatcactgccgctgtccttggaggctttaaggacatgaacccaactctcccagcactgaactgttctgttgaaaatacccatccaacagtttcttactatgctcatccccaagtggcatcctacaatacctactaccatagccctcctcacctgccaccatattctgcttatgactttcagcattccggtgtctttccatcctcccctccctctggactttctgatgagccccagtctgcctctccctcacccagctacatgtggtcctcaagtgcaccgccccgttactctccaccctactatccaccttttgaaaagccaccaccttacagtccctaaagaggaatgcctgctggctattgagattattgtggcttttgtatttctgcttcagtggaagtgtgtagggtacaaaatttaaagtgtgactcttatgcataaagttttacaatggcctgccaggctagggaaagatagggacgaagcttattcattattagtgcagagcaggggtggtcaggctgaacgcagcacagaagggcagctcacattctctaagcaagactggggagccagcccagcaagaagcttgtttggacttgcattaccctatgctccacctctgtattcagcagaagtgtggttgccatctttttcactttatgtaaaggagtgttgccctcgggcccttggcagattgccaccccagcacctaggttgaagcacctggtttataggccctatctttccctacccctaaagtcagtccctaaggacaatttcccagctgatggggctacacagtagttccaatacagagagttctggctaagattttgtttgcttgtgtctggatgttgaaaaagactgcccgtatctcttactccttccttctctgtgagtattgtaaaaatggctgttgtgatcactcagctcagcttttgttattggtacctcctaaagggaaaagtgcaatattcttgcatcttcagtagtggggaacaggatgtattgttccggaaacactgaaatacacagcaacatgtgagatgttttaagtagatcacttaggagacagtggttctactacatgttgcattattacaaaatacatttgctacaggagatataaatcttatggttgtaattcagagtttaaaaatgttataaattaggttcttgggtcgtgatatgaattgttactaatctttgtgactatttaatcttcaaatattgtgcttaaccccagcaatccgcacgtatcctgcaccccaccccaaaagagtcatctgtattttaatgccactggtcttatcggtccttttgtctgttgagaccagtcatgacagcattcaagattatgaaagtgttacaatgccgcttcaagtctgcaaaacctcaaacgtagccaacttgacaaatatttaagtgttacggcagatttaaaatccatctggcacaccgtggtaggtatttgtacagttcttttaattacacatagctttaaaccatcaacctgatgagtttaaagcttttgcacccatgccttcacttcagaatgaacaccttcattgtgatcttatgttaacctgagaattgatttaaaggaagattgataatcctatactttataacgtaaaaatacaggggctacaggagggtacctaattagacagttctccaaacacagaacacacactggaaaattttccggccaattttgctacctcccaacttgatggattagaggtagcgcaaatgctggtgctcccatctaccttgtagacacttagccatcaagaatcaaggcacaagaagtgcactctctcattaacagtaaatgtttgcaagatattcagtttaactttcagcatcatgaatgttcttatccagattttgaatccgaaaaactataatccttttatgttatacaaaattactatgattttttacagttctgagcatattaaaattctactggatttcaaaaagagactaatacccaactgactaactaaacaaatatcaacttgtaatactcaatgaatttttttgccatttacatttgaccgttggctttagtgaatgtccatatttaattttttaaggcaccattacacagtttatcctacatttatcacatttcttaaagtgttaagattctatggctcatttctatgtatttttcttactttacaaaataacctgaaacagtatagattttgtaacacttaatttgagcagcttttttattacattgaattatacaaagtgcatgttaccttagaaaaattaatatttgctgctttactcttttgcaaaacatttgctgtaatgaatggatttgtatttccaatatgtatcttgactgcattttgtaatatttactgctttattcctaattctgctttaaagtactgaactgggcatgaaacattaaaatattaatccagaaactgtataaactggatgttgcttaaaatctgtatcactgccatgttgaaaactcagactgcttttgtgatgtttcaaatgaataaaactatcctcccctcgtta

SEQ ID NO: 194102 - DNA, 3172 bp, Homo sapiens
  Payload ID: 18343
  Gene Name: transmembrane protein 255A
  Uniprot ID: Q5JRV8
  ENST ID: ENST00000440464
  CDS Start-End: 228-953
aatgctgctgcctcccagagcagagggaggcagaagaggagggagggagaagagtggaagggagggggaggcggcacttgggctgcagctcgcaaccagaggcagtgtctctcagctctcggaaggaccgagagaggcaaccgcggagtaggatgctctgcggggcgcccagagccgggggcgcttgaagcagcttcggggactggggcaaccgggcagttttcaccatgcatcagtccctgactcagcagcggtccagcgacatgtccctgcccgattccatgggagcattcaatcggaggaaacgaaactccatctatgtcaccgtgactttgcttattgtgtccgtgttaattctcacagtgggccttgctgcaaccaccaggacccagaatgtgactgtaggaggttattaccccggagttattctcggctttggatcgttccttggaatcattggatcaaaccttattgagaacaaaaggcagatgctggtggcttctatcgtgtttatcagctttggtgtgattgcggctttttgttgtgccatagttgacggggtctttgctgccagacacattgatctgaaaccactctacgctaaccggtgccattatgttcccaagacatcacagaaggaagctgaggagaacccaactctcccagcactgaactgttctgttgaaaatacccatccaacagtttcttactatgctcatccccaagtggcatcctacaatacctactaccatagccctcctcacctgccaccatattctgcttatgactttcagcattccggtgtctttccatcctcccctccctctggactttctgatgagccccagtctgcctctccctcacccagctacatgtggtcctcaagtgcaccgccccgttactctccaccctactatccaccttttgaaaagccaccaccttacagtccctaaagaggaatgcctgctggctattgagattattgtggcttttgtatttctgcttcagtggaagtgtgtagggtacaaaatttaaagtgtgactcttatgcataaagttttacaatggcctgccaggctagggaaagatagggacgaagcttattcattattagtgcagagcaggggtggtcaggctgaacgcagcacagaagggcagctcacattctctaagcaagactggggagccagcccagcaagaagcttgtttggacttgcattaccctatgctccacctctgtattcagcagaagtgtggttgccatctttttcactttatgtaaaggagtgttgccctcgggcccttggcagattgccaccccagcacctaggttgaagcacctggtttataggccctatctttccctacccctaaagtcagtccctaaggacaatttcccagctgatggggctacacagtagttccaatacagagagttctggctaagattttgtttgcttgtgtctggatgttgaaaaagactgcccgtatctcttactccttccttctctgtgagtattgtaaaaatggctgttgtgatcactcagctcagcttttgttattggtacctcctaaagggaaaagtgcaatattcttgcatcttcagtagtggggaacaggatgtattgttccggaaacactgaaatacacagcaacatgtgagatgttttaagtagatcacttaggagacagtggttctactacatgttgcattattacaaaatacatttgctacaggagatataaatcttatggttgtaattcagagtttaaaaatgttataaattaggttcttgggtcgtgatatgaattgttactaatctttgtgactatttaatcttcaaatattgtgcttaaccccagcaatccgcacgtatcctgcaccccaccccaaaagagtcatctgtattttaatgccactggtcttatcggtccttttgtctgttgagaccagtcatgacagcattcaagattatgaaagtgttacaatgccgcttcaagtctgcaaaacctcaaacgtagccaacttgacaaatatttaagtgttacggcagatttaaaatccatctggcacaccgtggtaggtatttgtacagttcttttaattacacatagctttaaaccatcaacctgatgagtttaaagcttttgcacccatgccttcacttcagaatgaacaccttcattgtgatcttatgttaacctgagaattgatttaaaggaagattgataatcctatactttataacgtaaaaatacaggggctacaggagggtacctaattagacagttctccaaacacagaacacacactggaaaattttccggccaattttgctacctcccaacttgatggattagaggtagcgcaaatgctggtgctcccatctaccttgtagacacttagccatcaagaatcaaggcacaagaagtgcactctctcattaacagtaaatgtttgcaagatattcagtttaactttcagcatcatgaatgttcttatccagattttgaatccgaaaaactataatccttttatgttatacaaaattactatgattttttacagttctgagcatattaaaattctactggatttcaaaaagagactaatacccaactgactaactaaacaaatatcaacttgtaatactcaatgaatttttttgccatttacatttgaccgttggctttagtgaatgtccatatttaattttttaaggcaccattacacagtttatcctacatttatcacatttcttaaagtgttaagattctatggctcatttctatgtatttttcttactttacaaaataacctgaaacagtatagattttgtaacacttaatttgagcagcttttttattacattgaattatacaaagtgcatgttaccttagaaaaattaatatttgctgctttactcttttgcaaaacatttgctgtaatgaatggatttgtatttccaatatgtatcttgactgcattttgtaatatttactgctttattcctaattctgctttaaagtactgaactgggcatgaaacattaaaatattaatccagaaactgtataaactggatgttgcttaaaatctgtatcactgccatgttgaaaactcagactgcttttgtgatgtttcaaatgaataaaactatcctcccctcgtt

SEQ ID NO: 194103 - DNA, 695 bp, Homo sapiens
  Payload ID: 18343
  Gene Name: transmembrane protein 255A
  ENST ID: ENST00000519908
  CDS Start-End: 248-695
acgcggctgcacggaccgccaatgctgctgcctcccagagcagagggaggcagaagaggagggagggagaagagtggaagggagggggaggcggcacttgggctgcagctcgcaaccagaggcagtgtctctcagctctcggaaggaccgagagaggcaaccgcggagtaggatgctctgcggggcgcccagagccgggggcgcttgaagcagcttcggggactggggcaaccgggcagttttcaccatgcatcagtccctgactcagcagcggtccagcgacatgtccctgcccgattccatgggagcattcaatcggaggaaacgaaactccatctatgtcaccgtgactttgcttattgtgtccgtgttaattctcacagtgggccttgctgcaaccaccaggacccagaatgtgactgtaggaggttattaccccggagttattctcggctttggatcgttccttggaatcattggatcaaaccttattgagaacaaaaggcagatgctggtggcttctatcgtgtttatcagctttggtgtgattgcggctttttgttgtgccatagttgacggggtctttgctgccagacacattgatctgaaaccactctacgctaaccggtgccattatgttcccaagacatcacagaaggaagctgaggagaacccaactctcccagcactgaact

SEQ ID NO: 194104 - DNA, 6100 bp, Homo sapiens
  Payload ID: 18344
  Gene Name: transmembrane protein 255B
  Uniprot ID: Q8WV15
  ENST ID: ENST00000375353
  CDS Start-End: 28-1008
cccgggagagccgggtggggcctcgggatgcagccgccggtgcccgggcccctgggcctgctggaccccgcagaagggctttcgaggaggaagaagacgtcgctctggtttgtggggtctctgctgctggtgtccgtcctcatagtcaccgtcgggctggctgccaccaccaggacggagaatgtgaccgttgggggctactacccagggatcattctcggctttggatctttcttaggaattattggcatcaacttggtggagaatagaaggcaaatgctggtggcagcgatcgtgtttatcagttttggcgtggtggccgccttctgctgcgccatcgtggacggcgtatttgcagcacagcacattgaaccgaggcccctcaccacgggaagatgccagttttactccagtggggtggggtacttgtacgatgtctaccagacagaggtcacctgtcactccctggacggcaagtgccagctgaaggtgagaagcaacacctgttactgctgtgacctctatgcctgcgggagcgcagagccctcgcccgcctactatgagttcatcggcgtcagcggctgccaggacgtgctgcacctgtaccgcctgctctgggcctctgcagttctgaacgtcctgggcctgttcctgggcatcatcaccgccgccgtcctgggggccttcaaggacatggtgcctctgtcccagctggcctatggcccagccgtcccaccacagaccctctacaaccccgcccagcagatcctggcctacgcaggcttccgcctgacgcccgagcccgtcccgacctgctcgtcctaccctctgccccttcagccctgcagccgcttcccagttgcgccctcctctgccctggcttcgtctgaggacctgcagcccccttctccaagcagctctggctctgggcttcccggccaggctccaccgtgctacgcacccacctactttcccccgggggagaagccacccccctacgcaccctgatagaggcgtggagtaaaagataacttgtttgtttttttttttaaaaaaaaggcagcctctagaaatcccgcttctgtggccaacctcctagagaacccgggagaatgttccagaagtctgtcccctcctttcctccctgggcacactggtgagggaggctggaaccaggcagggagtggggccctccagacccaggctggtgacaccttggcttgggctctgctcacatcaaatggcgctgaaagttcccacccggcctcctcctctgagagcaattgttctggtgttttcacatcccttaattaattagctattattatgattttgcaaagacagtgcagccccggcctccctgcctgtgtgttcttgtttgtggacatgtgttgtgcgttacacgttcgtgtgtgcatctgtgtcctggagaagcgcagggcagaagccacccgcccctcgtgctgtgctcctgacgtatgccaggaagggaaggacgcttcggctccaacgcccagcgctgtgtctaaccgcctgtgagttgttagaatccaggggcccggttgtctttcccagccccggatgcaaatctgcctgggccactggcacgagggtcttcccctgagctgtctcccagctacggcgcctgggcttccgctgtccttccgcggcttctccctcaccgcaccttgtctcaggacccctggccgctgggatggtgggggacggtgtttcggggtcctttggctcagggtctggggccgcagcactccctgtggaaaccagcttagctccccgcgggcccagcatgcacctgccgggcacacctggggagacgggtgagcacgcctgggaagcagcaggtcccgggtgggtcacaggccccgggtgggtcacaggacaggtctcaggtgggtcacaggtcctgagtgggtcacaggtcccgggtgggtcacaggcatcccgggtgggtcacaggtcccgagtgggtcacaggccccgggtgagtcacaggccccgggtgagtcacgggtcccgggtgggtcacgggtcccgggtgggtcacgggccccgggtgggtcacgggtcccgggtgggtcacgggtcccgagtgggtcacgggtcccgggtgggtcacaggcgccccagtgacaggagttcaggatgcgccaccccaaagtagccgaagtctcttgaaaagtgttggatgtggggagaggctttctctgaactcctgaagtcagatcctcagggaaccagggactcccagggcgggagggcgggcgagaggtgatcccattgctccccagacgtgccacaagacaccaagtcgccgtctctgctctgtgggccgctcacggttccccagtcactccctctcccctcggaagctggcgcctccaggcctcaccgctctcagggcctcacgtccctccctgcaaagccccccgtgcctacgataaacaagtaccgctcttctcccgtgtgggtctgaggtctccagcttacttcacggaacagtgcccacctgggaggtggagcggggactttctcccctgcccagtcctggatctgggagaaaaaagataaggtggaggggagccacactcgtgcagacacagcctcctgccccctctgctgcccgggagcctccctctgtccgatggagggtctcacacagcctctgccccctccgctgcccgggagcctccctctgcccgacggagggtctcatcctgtgtccagcgctcctgggcagaaggcccacagcgcacatccacacatgaacggtggctggctgggcccaggggccctaacgggcctctgaaaggcctgcagccagctctggtctgtgaacccgccactgcttgtcatttttatcttataaaatccagcctcacaagcttgctgtccaggagaatgtggtcttggcctctcagggctgactggccttgaaccagtccgggaggtcgggcacgagccggaggtgcggcgtcctgtctggaaatcaccgcccagttcctccagggctgtgggtgcctggctccgagtaagaagctgaacaagcagcagagaccaagaggtttctggagcgccgggagatgcactcacgagcgcctgtgggggaagaaaagtgtgccacggatttcccgagtccccagggctctcactttacctcagggaaggctctatgggcgccgatggtgccgtggtcttgtgtgggcggttcctgggcaccctggagctcgggctgtgcccccgaagctgcctggtgcaggcaccagcacctcttggtgtcctaggggtgcgaacagcagagaagctgaactgcaggtctgggcagggagtctatgccccctggagctctggccagcaaagtcacaggaataaccctccttcccctcatgtcagccctcggtcgcagggtgcggtgtgggggcatcagagtgcttccccgaggctgcactcaccagcttcccccaaacacaacatcgatctttcccgacttttaatcttgtctagagtcaaaagctgttcaaaaatattcaactccaaggtcaacagttttgttcttgccacaaaaatgtccttatcctttatcccagccacaaagaatgtgaacaatttgactcaaggttcgtggtggctggagggtcccccaggtcccagggcagctcccacctggcgcagggctccggccaatgcctggcctgcagtgtgggcggcggctgctctcgaggtgcacctgtctcatgtggacggatcctgtctggggccaccaagctctgccagcctgagtcacggtctgatgaaccccctctctgggctccgctggggccttctgatcccagcctcctctgcagggatgggctcccaatcccgccctcacttggttcccatgcacagccgaggtcagtgagaccctggaggccgcgggagatggggtggaggggatggtggggcagggggtgctggggggtttgggggtgctgtggccccggggcagggggtgctggggggtttggggtgctgtggccccacctgcactccctgcctcactgggacagcacaggagacaggcttctcctgcagctcagaggtgggggcctagtgtagctgcaggttgtgactgaggagggcagggtcagagcattgccctgggcaggggtccgttgagactggccccaccttattagcttgggaccttgggttacagggagtctcctcctgcctcagtttctacatttcacacagcagcactgctcacaagagctcccaagcagaggcaactactgagtgggggagggacacagtccgtccacatggggccaacggccacaaagagaggaagggacatgggtgacggtccgtccacgtggggtcaccggccacggagagaggaagggacatgggtgacggtccgtccacgtggggtcaccggccacggagagaggaagggacatgggtgacggtccgtccacatggggtcaccggccacggagagaggaagggacatgggtgatatggttttgctgtgtccccacccaaatctcaacttgaattgtatttcccagaattcctgcgcgttgtgggagggacccagcgggaggtaattgaatcatggtggctggtctttcccgtgctattctcgtgatagtgagtaagtctcacgagatctgactggttgatcaggatttccgcttttgcttcttcctcattttctcttgctcctgccgtgtaagaagtgccttttgcctcccaccgtgattctgaggcctccccaaccatgtgcaattgtaagtcccgttaaacctctttttttcccagtctcgggtatgtccttattagcagtgtgaaaacagaatactacagtggtccatccacacgcgggtctcacccagccacagagagggagaggacgtggcccatccacacgcgggtcacccggccacggagaggaaggaagctctaacgggtgctgaggctgtaacacacagtgctcagggaaggacaccagacatgaagactgtgttctgtttatatgcagtgtccagagaaggcgtgtccacagacagaagccgactgggaaaggaggtgcagtcactgctcagggacacgggttcttttcggggaggcaagcgtgttcgcagcgtgttctgtatggggagagatgcagtcactgctcagggacacgggttcttttcggggaggcaagcgtgtttgcagcgtgttctggatggggagaggtgcagttactggtcagggacacgagttcttttcggggaggcaagcgtgtttgcagcgtgttctggatggggagaggtgcagtcactggtcagggatacgagttcttttcggggaggcaagtgtgttctaagcgtgttctggatggggagaggtgcagtcactggtcagggacacgagttcttgtgggaagaggagtgtccgggagccagatggcagtgatgggtggacggccccgtggatggactgaccaccgacccatgctctgcactcatgaggcgtggctattgctgtgtgaatcacatctccatggaaacgggagtgggagaaacgggccccaaggatgttgtgaagatggccttatggggctgcactggtgacttggacagtgctggccaccggccctgctcagtgaacaagagccatggtcatcaccctcgccacacagagcagctcctcctgcagacttggggaccccgtggccaccagaccccgcggtgggagcagagatgcctccgaaactctggagacccacagaggcagaagaggattccacgaggccggggcccgtcagcagatcctcagacggcgacacgcgccacttccttttctgtttcctagaccttttaactgatggaattcagtaagcagaaaacgtgcttgaaacaagggcaccatggagcggaccctccccctctcccctcgtggagtccttgaccctggggcaggtgacccttcttgctttgcaggcaggggctgtggctggagcttctcctacaaatgggctgtgctgggattagcccggctgtacatttgctttatgcttccgttggcatttaaaaatctgatgttcata

SEQ ID NO: 194105 - DNA, 694 bp, Homo sapiens
  Payload ID: 18344
  Gene Name: transmembrane protein 255B
  ENST ID: ENST00000488362
  CDS Start-End: 31-531
ggccccgggagagccgggtggggcctcgggatgcagccgccggtgcccgggcccctgggcctgctggaccccgcagaagggctttcgaggaggaagaagacgtcgctctggtttgtggggtctctgctgctggtgtccgtcctcatagtcaccgtcgggctggctgccaccaccaggacggagaatgtgaccgttgggggctactacccagggatcattctcggctttggatctttcttaggaattattggcatcaacttggtggagaatagaaggcaaatgctggtggcagcgatcgtgtttatcagttttggcgtggtggccgccttctgctgcgccatcgtggacggcgtatttgcagcacagcacattgaaccgaggcccctcaccacgggaagatgccagttttactccagtggggtggggtacttgtacgatgtctaccagacagaggtgagcaggagcactgagattcatgtgggttttgctcagctaaccccgccgaccccacgcggttttccctgcacataggcgtggtctgaatattttgattctaatagttcctgggggtcacccctgcagctggtgaaccgttgatgccccctgtgtttgggaccttgacatttcgatgtgctgtatttcactctggagtcagagttctggacttgcttcattaaatcacaacagtctcaga

SEQ ID NO: 194106 - DNA, 73 bp, Homo sapiens
  Payload ID: 18344
  Gene Name: transmembrane protein 255B
  ENST ID: ENST00000633279
  CDS Start-End: 28-73
cccgggagagccgggtggggcctcgggatgcagccgccggtgcccgggcccctgggcctgctggaccccgcag

SEQ ID NO: 194107 - DNA, 76 bp, Homo sapiens
  Payload ID: 18344
  Gene Name: transmembrane protein 255B
  ENST ID: ENST00000631591
  CDS Start-End: 31-76
ggccccgggagagccgggtggggcctcgggatgcagccgccggtgcccgggcccctgggcctgctggaccccgcag

SEQ ID NO: 194108 - DNA, 486 bp, Homo sapiens
  Payload ID: 18345
  Gene Name: transmembrane protein 256
  Uniprot ID: Q8N2U0
  ENST ID: ENST00000302422
  CDS Start-End: 54-395
ggcctcttgggtggcctgggcggcgttggtccggtgcgtcctgttctacagctatggccgggccagctgcagctttccgccgcttgggcgccttgtccggagctgcggccttaggcttcgcttcctacggggcgcacggcgcccaattcccagatgcctacgggaaggagctgtttgacaaggccaacaaacaccacttcttacacagcctggccctgttaggggtgccccattgcagaaagccactctgggctgggttattgctagcttccggaacgaccttattctgcaccagcttttactaccaggctctgagtggagaccccagcatccagactttggcccctgcgggagggaccctgctactcttgggctggcttgccttggctctttgagctcccttttgcttaattactgggttttctgggcagttttttttttaaagagttggagtaagaagaggattaaaaaggaaaggcaaataaa

SEQ ID NO: 194109 - DNA, 511 bp, Homo sapiens
  Payload ID: 18345
  Gene Name: transmembrane protein 256
  ENST ID: ENST00000576017
  CDS Start-End: 1-81
ggagctgcggccttaggcttcgcttcctacggggcgcacggcgcccaattcccagatgcctacgggaaggaggtgaagtaactgcgctggggctccctgactcctgtttgacaaggccaacaaacaccacttcttacacagcctggccctgttaggggtgccccattgcagaaagccactctgggtaatctttccctgcgcctaaccctgaccaagccccacacactccctctcagcctgccctgttcttaacaatcctgttttctgtgctgtgtctccttcaggctgggttattgctagcttccggaacgaccttattctgcaccagcttttactaccaggctctgagtggagaccccagcatccagactttggcccctgcgggagggaccctgctactcttgggctggcttgccttggctctttgagctcccttttgcttaattactgggttttctgggcagttttttttttaaagagttggagtaagaagaggattaaaaaggaaagg

SEQ ID NO: 194110 - DNA, 2441 bp, Homo sapiens
  Payload ID: 18346
  Gene Name: transmembrane protein 257
  Uniprot ID: O96002
  ENST ID: ENST00000408967
  CDS Start-End: 269-604
gtgattccacttcagtgttcatttttatttttctgaaagtaaagatactcctgtaaaatgccattgtccatagaaaaaatattaactcattaagtttaaagacagatgataccttaatattaacttacttacacgattttaaagacgcctactgagagaactcaaatttataaactctgttgcctaataattatggtttaattctatatcctcttgcttgttacagttatacttaatttgcagtagatttttaaatgaaattatttgaatgtattccagactattttatttaaaatcatcatacatcatatactttgaacctttattttctaatgcaatcataaacattttaagttttattaactcactagcatccccactgactatattctgttttgctttatctgctcaagcactttcgaccatattttattttaggatttttatttttatcttccacagctggatattgctatttcacttttatttcacatgcagctttaagacgtatgagcatcagcacagcaaaatggttccagcctacagaatgcagtctcccagggccctgccaagaacatatctgtatgtctggccctacaaatgacaaatggtaattcccttctattttagctcttaattagttgctttcactatttccgaatatacctgtggctaagtttttattgaaacactcaaaaataccacttctcagtatgaacacaattgctaagagcctaatttggttctggactatggtcaacctgtgtgccttgttagttctctccagcagctggtgagtaaggaaatgacccttcaatttcctcttctttttcctctgacctctgtgacttaatttttcttaatgtctccaagtcatcaagggcttaataatttatgaattttacaaaaagcatttaaggaataagaaagaggttctgtgatttttcagactctgaaaattcattttgattctacatattccagaaatatactgggttggatgctagagtgaagaaagccgtccagacaattctcccagtccattcatttcttcattcatttgttcattcagtagttattgagtgcttatttcctgggtgcctggctctaggctatgtcctgagacatacagtggacagggtctctaccctcctcacaacaccctcttcaccctccacgccaccccctactactcactctcaccctagcaaggagcttcgtgctaataagagagagtcttacctgaatggcaatcgcccagattaacagtggagacagtaatgcaatgcaggaagttaagtttttaaaggtgattctgtgcagtaaggtataaaacagatatataataaatagcctagcttagtctaacatctctttagaattacacagctaaaaaggaaaaaaaacaccaaaataagataaaataaaacaaatttaaacaccaaaataagatataataaaacatttgtttttgcaaaataaggcccaatgttatggcctaatgaaagctatatacttgtgctatctaaagcactactttgtaaagatgactacccaagattgtaaatacaaaatttaaaaaggtacttaaattttctggaatatccatgtttcagaggtaatatttactttctatttcagtggcttaaattataacgttttggcttaagtgtcttttatcaatacaatgataagacaccttaatcctgagagagaaaattaagtactgtatataggtgtactttgcttctcacaatgattgtgcaaaaagtcacgtgtaaattgaacttttgtaaatcaaattgtattttaaatgcattaggggagctgccatttagaggaaacttgtgaattctttcataaagcagaaaaccattttataatacaaataaccattctctgatttatctcttttgtatgtttggattttcaatatcgactttgcttaaaacagagcccacctgcatagtaactgtgttttgccaaggctgcttgtgctaccagtttgctggtggctaacggcttgtgcttgaaagtcttctgaagtctgatgtgaattgagctatcaagcaatgctatcatagcacagtagcagtcctgaacagtctgagcagccaacccatttcaacaaaattgaacacaggactcttctgctcagcagcatctcttttctcagatgtggccatgttacagtagagggtattccataagcacatattccataaagtgctcagagtcacaggttttataataaattatgttattatgtaaacgaattgcatgcatgttgaaattttttagcagtactttagcttgaaagtactcgtacaaatactgttagatttagttgcaaataattgttctcaagttattgcaataaatgtcaaatgaaacaagctcttgtgtaaatagacttctgtgcctaatagtgacattgtttc

SEQ ID NO: 194111 - DNA, 468 bp, Homo sapiens
  Payload ID: 18347
  Gene Name: transmembrane protein 258
  Uniprot ID: P61165
  ENST ID: ENST00000257262
  CDS Start-End: 44-283
ttcttccggtggcggagcggcggattagccttcgcggggcaaaatggagctcgaggccatgagcagatataccagcccagtgaacccagctgtcttcccccatctgaccgtggtgcttttggccattggcatgttcttcaccgcctggttcttcgtttacgaggtcacctctaccaagtacactcgtgatatctataaagagctcctcatctccttagtggcctcactcttcatgggctttggagtcctcttcctgctgctctgggttggcatctacgtgtgagcacccaagggtaagagctgcaatgggatggatgcgtgagcctccaaggcacagcccagggaagcctccccagagtcaggtaacaaccagatggcttcactgaaacctgcttttgtaaattacttttttttactgttgctggaagtgtcccacctgctgctcataataaatgcagatgtatagca

SEQ ID NO: 194112 - DNA, 395 bp, Homo sapiens
  Payload ID: 18347
  Gene Name: transmembrane protein 258
  ENST ID: ENST00000535297
  CDS Start-End: 59-208
gctcctgccgacgtgttcttccggtggcggagcggcggattagccttcgcggggcaaaatggagctcgaggccatgagcagatataccagcccagtgaacccagctgtcttcccccatctgaccgtggtgcttttggccattggcatgttcttcaccgcctggttcttcgtgtatcctttcactgagcagccagaggaccagcattagtgatgtgggaagctcagggagaaaccacgctaggtacatggaccccgccggttttgtacattggattggggctgagagaaggtaacaaccagatggcttcactgaaacctgcttttgtaaattacttttttttactgttgctggaagtgtcccacctgctgctcataataaatgcagatgtatagca

SEQ ID NO: 194113 - DNA, 517 bp, Homo sapiens
  Payload ID: 18347
  Gene Name: transmembrane protein 258
  ENST ID: ENST00000541893
  CDS Start-End: 23-172
ggattagccttcgcggggcaaaatggagctcgaggccatgagcagatataccagcccagtgaacccagctgtcttcccccatctgaccgtggtgcttttggccattggcatgttcttcaccgcctggttcttcgtgtatcctttcactgagcagccagaggaccagcattagtgatgtgggaagctcagggagaaaccacgctagattgccgtgggctgggctctctgcactccacagtccaccccttcgctttgccttaactgctgtgcccagttacgaggtcacctctaccaagtacactcgtgatatctataaagagctcctcatctccttagtggcctcactcttcatgggctttggagtcctcttcctgctgctctgggttggcatctacgtgtgagcacccaagggtaacaaccagatggcttcactgaaacctgcttttgtaaattacttttttttactgttgctggaagtgtcccacctgctgctcataataaatgcagatgtatagca

SEQ ID NO: 194114 - DNA, 575 bp, Homo sapiens
  Payload ID: 18347
  Gene Name: transmembrane protein 258
  Uniprot ID: P61165
  ENST ID: ENST00000537328
  CDS Start-End: 53-292
gccgacgtgttcttccggtggcggagcggcggattagccttcgcggggcaaaatggagctcgaggccatgagcagatataccagcccagtgaacccagctgtcttcccccatctgaccgtggtgcttttggccattggcatgttcttcaccgcctggttcttcgtttacgaggtcacctctaccaagtacactcgtgatatctataaagagctcctcatctccttagtggcctcactcttcatgggctttggagtcctcttcctgctgctctgggttggcatctacgtgtgagcacccaagggtaacaaccagatggcttcactgaaacctgcttttgtaaattacttttttttactgttgctggaagtgtcccacctgctgctcataataaatgcagatgtatagcagtcctgtctggggcccattctgcaggggtggtgggtgctgggacctacattgcttccccaatctcttccctttcccatttctcatctgcctttcacagttcctgctgctgatctacttaagggggatgagatttgtgtagcaccggtgttttgtcattggaatttaa

SEQ ID NO: 194115 - DNA, 1692 bp, Homo sapiens
  Payload ID: 18347
  Gene Name: transmembrane protein 258
  ENST ID: ENST00000543510
  CDS Start-End: 1353-1577
gtccctccagggagaacagagtctctcagcgaccctggcgtacccttctccaccgcttgtccccactccacccacaccaggtccccgcaggcccctgctccctctacacccgaaatcgcaggactacaagtccctcaatgccacttgcgccggaggcacttccttttccggttgtgctaggcgcctgctcctgccgacgtgttcttccggtggcggagcggcggattagccttcgcggggcaaaatggtgagagcgttgaggggagttccagacggagatgcgaggacccctcggggtctgacccacaccgcgcttatctcctcagacgccggagatccagagggctagacgctcctggaacctccggcttgggctgaagggtggggaagggggaagccccttgccatgaactccttaggtttctcagctcgcgatttctaagggcgagaggcgtggggcgaattttgaataccttccagtttgtatatctctgttatcggtggtgtgttatctttatttggaaagttcttctgccgaacccgtgcccatcctacaatgccctgggcaaatgtttattggtgaagcacttccaactctcaggcacttggccagactttcctaggagcgcccacagcctctgtacagatctctggccacgttccatggacttctttgttttcggccacgcctcctagtgaccaccgtctgacgcgcatctagctctgggatgatgtctattcatctttgtattctcagtgccaaacagagggcccgtaattggaagctcaataaatggcagtgattgtctttatcattttgggggaagggggccgtgattgtttactgaattgaattccagtgtctcagaacaatgggggcagtttacttctctagagttgttatgttctggattttagaagcattggctgaccggtgacaatgaagttaacatttgtacagatctttacgtttacagccctctttcataaaagacattatctcatcatcttccctacagccttaggaaggaagcaaatacctgttgagcaaaatactccctgctaggcactagatgctttgattcatcatctttcttatttttcagttctgtgaaatagatattacagtcgctttactcagactcagattactcagaaccagaacttgaatgtcttgaccatagctcacaagattccataatagcataggtagtgaggaaaatactgaattagaaattgagggccaggcgcggtggttcactcctgtaatcccagcactttgggaggctgaggcgagcggatcaggaggtcagaagttcaagaccagcctggccagcaaggagctcgaggccatgagcagatataccagcccagtgaacccagctgtcttcccccatctgaccgtggtgcttttggccattggcatgttcttcaccgcctggttcttcgtttacgaggtcacctctaccaagtacactcgtgatatctataaagagctcctcatctccttagtggcctcactcttcatgggctttggagtcctcttcctgctgctctgggttggcatctacgtgtgagcacccaagggtaacaaccagatggcttcactgaaacctgcttttgtaaattacttttttttactgttgctggaagtgtcccacctgctgctcataataaatgcagatgtatagc

SEQ ID NO: 194116 - DNA, 579 bp, Homo sapiens
  Payload ID: 18347
  Gene Name: transmembrane protein 258
  ENST ID: ENST00000545210
  CDS Start-End: 37-186
ggtggcggagcggcggattagccttcgcggggcaaaatggagctcgaggccatgagcagatataccagcccagtgaacccagctgtcttcccccatctgaccgtggtgcttttggccattggcatgttcttcaccgcctggttcttcgtgtatcctttcactgagcagccagaggaccagcattagtgatgtgggaagctcagggagaaaccacgctaggtacatggaccccgccggttttgtacattggattggggctgagagaagattgccgtgggctgggctctctgcactccacagtccaccccttcgctttgccttaactgctgtgcccagttacgaggtcacctctaccaagtacactcgtgatatctataaagagctcctcatctccttagtggcctcactcttcatgggctttggagtcctcttcctgctgctctgggttggcatctacgtgtgagcacccaagggtaacaaccagatggcttcactgaaacctgcttttgtaaattacttttttttactgttgctggaagtgtcccacctgctgctcataataaatgcagatgtatagca

SEQ ID NO: 194117 - DNA, 2581 bp, Homo sapiens
  Payload ID: 18348
  Gene Name: transmembrane protein 259
  Uniprot ID: Q4ZIN3
  ENST ID: ENST00000333175
  CDS Start-End: 120-1346
ggaagatggcggcggcggccgggaggccgtgaggagagcggcggctgcgagggcggccgatggcggccgggaggcgccctcggacacttgcgggtcgttagggcgcgacgctgggaggcatgtcggagcacgtggagcccgcagctccggggcccgggcccaacggcggcggcggcggcccggcccccgcgcgcgggcctcgcacccccaatctcaaccccaaccccctcatcaacgtgcgcgaccggctcttccacgcgctgttcttcaagatggctgtcacctattcgcggctcttcccgcccgccttccgccgtctcttcgagttcttcgtgctgctcaaggccctgtttgtgctcttcgtcctggcctacatccacatcgtcttctcccgctcgcccatcaactgcctggagcatgtgcgtgacaagtggccgcgtgagggcatcctgcgtgtggaagtgcggcacaactcgagccgcgcgcccgtcttcctacagttctgtgacagcggcggccgcgggagcttcccgggcctggccgtggaaccaggcagcaacctggacatggaagatgaggaggaggaagagctgaccatggagatgtttgggaacagctccatcaagtttgagctggacatcgagcccaaggtgttcaagccgccgagtagcacagaggccctgaatgacagccaggagttccccttccccgagacgcccaccaaagtgtggccgcaggacgagtacatcgtggagtactcactagagtatggcttccttcgcctgtcgcaggccacccgccagcgcctgagcatccccgtcatggtggtcaccctggaccccacgcgggaccagtgcttcggggaccgcttcagccgcctgctgctggatgagttcctgggctacgatgacatcctcatgtccagcgtgaagggcctggccgagaacgaggagaacaagggcttcctgcggaatgtggtgtcgggcgagcactaccgctttgtgagcatgtggatggcgcggacgtcctacctggccgccttcgccatcatggtcatcttcacgctgagcgtgtccatgctgctgcggtactcacaccaccagatcttcgtcttcatcgtggacctgctgcagatgctggagatgaacatggccatcgccttccccgcagcgcccctgctgaccgtcatcctggccctcgtcgggatggaggccatcatgtcggagttcttcaacgacaccaccaccgccttctacatcatcctcatcgtgtggctcgcggaccagtatgacgccatctgctgccacaccagcaccagcaagcggcattggctgcgcattccatgatctacttcttccaccactacgagctgcctgccatcctgcagcaggtccgcatccaggagatgctgcttcaggcgccgccactgggccccgggacccccacggcgctgcccgatgacatgaacaacaactcgggcgccccggctacagcccctgactctgccggccagccccccgccctgggccccgtctcgcctggggccagcgggagtcccgggcctgtggcagcggcgcccagctccctggtggccgcggcagcctcagtggcagcagctgccggtggtgacctgggttggatggcagagaccgctgccatcatcacagacgcctccttcctgtccggcctgagcgcctccctcctggagcggcgtccagccagcccgctgggccctgctgggggcctcccccacgccccccaggacagtgtccccccgagtgactccgcagcttctgacacaactcccctgggggctgcggtaggcgggcctagcccggcctccatggccccaacggaggcgccctcggaggtggggtcctgagccgcacagctgagccgcctctgacccctgctggctgggcctgaccttcccgagcccgtgggggtgggggaggccagccacctccttcctctgggactgcccagcctgtgtcgggggctttcagggtttcgtggggtttgcccggaaggcggctttcctccccctggtgtgaggtcgcgcccgaggcttgtacccgctagtgaggtgtttgagctggtcagcaaggagagggggtggggttccgcggaaggttctggaggggtcttggtaggtctgcagtgaaccgtcctgaggatggagtggggtcccatggtgcaggtctctgagcaaggcggaggtgtggaggagaggccggcttggggtggggcctcgcgccctagtgccggccggcctcagcccggctctgcctggtgctccctgcagtgccttctccatggccccgccctccccgcgtgtgcgccaggcttggggtccccgggagagcagagcttgcgcctcgggcatagggacgtggggtgcaggcgccaacatcagtggcagcagccagggccgtggtccagtcccactcggggatggagtgggccggcggccaaaccagtcactcggggaggaatgcggaggagcgctcattccattctatttaattgcagtgtacaaaattgtgtttgtatatagaataaactgtctgttgacagcggc

SEQ ID NO: 194118 - DNA, 2748 bp, Homo sapiens
  Payload ID: 18348
  Gene Name: transmembrane protein 259
  Uniprot ID: Q4ZIN3
  ENST ID: ENST00000356663
  CDS Start-End: 184-2046
gggccgctcttgcccggcgtggcgactcgctagcgtcagcagcgccgcagccggacgagaaagcggaagatggcggcggcggccgggaggccgtgaggagagcggcggctgcgagggcggccgatggcggccgggaggcgccctcggacacttgcgggtcgttagggcgcgacgctgggaggcatgtcggagcacgtggagcccgcagctccggggcccgggcccaacggcggcggcggcggcccggcccccgcgcgcgggcctcgcacccccaatctcaaccccaaccccctcatcaacgtgcgcgaccggctcttccacgcgctgttcttcaagatggctgtcacctattcgcggctcttcccgcccgccttccgccgtctcttcgagttcttcgtgctgctcaaggccctgtttgtgctcttcgtcctggcctacatccacatcgtcttctcccgctcgcccatcaactgcctggagcatgtgcgtgacaagtggccgcgtgagggcatcctgcgtgtggaagtgcggcacaactcgagccgcgcgcccgtcttcctacagttctgtgacagcggcggccgcgggagcttcccgggcctggccgtggaaccaggcagcaacctggacatggaagatgaggaggaggaagagctgaccatggagatgtttgggaacagctccatcaagtttgagctggacatcgagcccaaggtgttcaagccgccgagtagcacagaggccctgaatgacagccaggagttccccttccccgagacgcccaccaaagtgtggccgcaggacgagtacatcgtggagtactcactagagtatggcttccttcgcctgtcgcaggccacccgccagcgcctgagcatccccgtcatggtggtcaccctggaccccacgcgggaccagtgcttcggggaccgcttcagccgcctgctgctggatgagttcctgggctacgatgacatcctcatgtccagcgtgaagggcctggccgagaacgaggagaacaagggcttcctgcggaatgtggtgtcgggcgagcactaccgctttgtgagcatgtggatggcgcggacgtcctacctggccgccttcgccatcatggtcatcttcacgctgagcgtgtccatgctgctgcggtactcacaccaccagatcttcgtcttcatcgtggacctgctgcagatgctggagatgaacatggccatcgccttccccgcagcgcccctgctgaccgtcatcctggccctcgtcgggatggaggccatcatgtcggagttcttcaacgacaccaccaccgccttctacatcatcctcatcgtgtggctcgcggaccagtatgacgccatctgctgccacaccagcaccagcaagcggcattggctgcggttcttctatctctaccacttcgccttctatgcctatcactaccgcttcaatgggcagtatagcagcctggccctggtcacctcctggctcttcatccagcattccatgatctacttcttccaccactacgagctgcctgccatcctgcagcaggtccgcatccaggagatgctgcttcaggcgccgccactgggccccgggacccccacggcgctgcccgatgacatgaacaacaactcgggcgccccggctacagcccctgactctgccggccagccccccgccctgggccccgtctcgcctggggccagcgggagtcccgggcctgtggcagcggcgcccagctccctggtggccgcggcagcctcagtggcagcagctgccggtggtgacctgggttggatggcagagaccgctgccatcatcacagacgcctccttcctgtccggcctgagcgcctccctcctggagcggcgtccagccagcccgctgggccctgctgggggcctcccccacgccccccaggacagtgtccccccgagtgactccgcagcttctgacacaactcccctgggggctgcggtaggcgggcctagcccggcctccatggccccaacggaggcgccctcggaggtggggtcctgagccgcacagctgagccgcctctgacccctgctggctgggcctgaccttcccgagcccgtgggggtgggggaggccagccacctccttcctctgggactgcccagcctgtgtcgggggctttcagggtttcgtggggtttgcccggaaggcggctttcctccccctggtgtgaggtcgcgcccgaggcttgtacccgctagtgaggtgtttgagctggtcagcaaggagagggggtggggttccgcggaaggttctggaggggtcttggtaggtctgcagtgaaccgtcctgaggatggagtggggtcccatggtgcaggtctctgagcaaggcggaggtgtggaggagaggccggcttggggtggggcctcgcgccctagtgccggccggcctcagcccggctctgcctggtgctccctgcagtgccttctccatggccccgccctccccgcgtgtgcgccaggcttggggtccccgggagagcagagcttgcgcctcgggcatagggacgtggggtgcaggcgccaacatcagtggcagcagccagggccgtggtccagtcccactcggggatggagtgggccggcggccaaaccagtcactcggggaggaatgcggaggagcgctcattccattctatttaattgcagtgtacaaaattgtgtttgtatatagaataaactgtctgttgacagcggctca

SEQ ID NO: 194119 - DNA, 626 bp, Homo sapiens
  Payload ID: 18348
  Gene Name: transmembrane protein 259
  ENST ID: ENST00000586285
  CDS Start-End: 1-626
gcttcctgcggaatgtggtgtcgggcgagcactaccgctttgtgagcatgtggatggcgcggacgtcctacctggccgccttcgccatcatggtcatcttcacgctgagcgtgtccatgctgctgcggtactcacaccaccagatcttcgtcttcatcgcgcccctgctgaccgtcatcctggccctcgtcgggatggaggccatcatgtcggagttcttcaacgacaccaccaccgccttctacatcatcctcatcgtgtggctcgcggaccagtatgacgccatctgctgccacaccagcaccagcaagcggcattggctgcggttcttctatctctaccacttcgccttctatgcctatcactaccgcttcaatgggcagtatagcagcctggccctggtcacctcctggctcttcatccagcattccatgatctacttcttccaccactacgagctgcctgccatcctgcagcaggtccgcatccaggagatgctgcttcaggcgccgccactgggccccgggacccccacggcgctgcccgatgacatgaacaacaactcgggcgccccggctacagcccctgactctgccggccagccccccgccctgggccccgtctcg

SEQ ID NO: 194120 - DNA, 2509 bp, Homo sapiens
  Payload ID: 18348
  Gene Name: transmembrane protein 259
  ENST ID: ENST00000592590
  CDS Start-End: 8-1273
ctggagcatgtgggtgcctgctggggagcctgggtcagggacagggtcatggagtgtaggggactggaccacccagggcatgcgagtggctgagccaggttgcgggcagagggtggccaggggcccatgggagcatttgcaggccctgtttgtgctcttcgtcctggcctacatccacatcgtcttctcccgctcgcccatcaactgcctggagcatgtgcgtgacaagtggccgcgtgagggcatcctgcgtgtggaagtgcggcacaactcgagccgcgcgcccgtcttcctacagttctgtgacagcggcggccgcgggagcttcccgggcctggccgtggaaccaggcagcaacctggacatggaagatgaggaggaggaagagctgaccatggagatgtttgggaacagctccatcaagtttgagctggacatcgagcccaaggtgttcaagccgccgagtagcacagaggccctgaatgacagccaggagttccccttccccgagacgcccaccaaagtgtggccgcaggacgagtacatcgtggagtactcactagagtatggcttccttcgcctgtcgcaggccacccgccagcgcctgagcatccccgtcatggtggtcaccctggaccccacgcgggaccagtgcttcggggaccgcttcagccgcctgctgctggatgagttcctgggctacgatgacatcctcatgtccagcgtgaagggcctggccgagaacgaggagaacaagggcttcctgcggaatgtggtgtcgggcgagcactaccgctttgtgagcatgtggatggcgcggacgtcctacctggccgccttcgccatcatggtcatcttcacgctgagcgtgtccatgctgctgcggtactcacaccaccagatcttcgtcttcatcgcgcccctgctgaccgtcatcctggccctcgtcggtgaggaccccacccggcctcccccgccccgcgctgcaccccgccccgcccgcttcaaccggcgccgcctctccctgcagggatggaggccatcatgtcggagttcttcaacgacaccaccaccgccttctacatcatcctcatcgtgtggctcgcggaccagtatgacgccatctgctgccacaccagcaccagcaagcggcattggctgcggttcttctatctctaccacttcgccttctatgcctatcactaccgcttcaatgggcagtatagcagcctggccctggtcacctcctggctcttcatccagcattccatgatctacttcttccaccactacgagctgcctgccatcctgcagcaggtccgcatccaggagatgctgcttcaggcgccgccactgggccccgggacccccacggcgctgcccgatgacatgaacaacaactcgggcgccccggctacagcccctgactctgccggccagccccccgccctgggccccgtctcgcctggggccagcgggagtcccgggcctgtggcagcggcgcccagctccctggtggccgcggcagcctcagtggcagcagctgccggtggtgacctgggttggatggcagagaccgctgccatcatcacagacgcctccttcctgtccggcctgagcgcctccctcctggagcggcgtccagccagcccgctgggccctgctgggggcctcccccacgccccccaggacagtgtccccccgagtgactccgcagcttctgacacaactcccctgggggctgcggtaggcgggcctagcccggcctccatggccccaacggaggcgccctcggaggtggggtcctgagccgcacagctgagccgcctctgacccctgctggctgggcctgaccttcccgagcccgtgggggtgggggaggccagccacctccttcctctgggactgcccagcctgtgtcgggggctttcagggtttcgtggggtttgcccggaaggcggctttcctccccctggtgtgaggtcgcgcccgaggcttgtacccgctagtgaggtgtttgagctggtcagcaaggagagggggtggggttccgcggaaggttctggaggggtcttggtaggtctgcagtgaaccgtcctgaggatggagtggggtcccatggtgcaggtctctgagcaaggcggaggtgtggaggagaggccggcttggggtggggcctcgcgccctagtgccggccggcctcagcccggctctgcctggtgctccctgcagtgccttctccatggccccgccctccccgcgtgtgcgccaggcttggggtccccgggagagcagagcttgcgcctcgggcatagggacgtggggtgcaggcgccaacatcagtggcagcagccagggccgtggtccagtcccactcggggatggagtgggccggcggccaaaccagtcactcggggaggaatgcggaggagcgctcattccattctatttaattgcagtgtacaaaattgtgtttgtatatagaataaactgtctgttgacagcggct

SEQ ID NO: 194121 - DNA, 1965 bp, Homo sapiens
  Payload ID: 18348
  Gene Name: transmembrane protein 259
  ENST ID: ENST00000593068
  CDS Start-End: 1-616
agtgtggccgcaggacgagtacatcgtggagtactcactagagtatggcttccttcgcctgtcgcaggccacccgccagcgcctgagcatccccgtcatggtggtcaccctggaccccacgcgggaccagtgcttcggggaccgcttcagccgcctgctgctggatgagttcctgggctacgatgacatcctcatgtccagcgtgaagggcctggccgagaacgaggagaacaagggcttcctgcggaatgtggtgtcgggcgagcactaccgctttgtgagcatgtggatggcgcggacgtcctacctggccgccttcgccatcatggtcatcttcacgctgagcgtgtccatgctgctgcggtactcacaccaccagatcttcgtcttcatcgtggacctgctgcagatgctggagatgaacatggccatcgccttccccgcagcgcccctgctgaccgtcatcctggccctcgtcgggatggaggccatcatgtcggagttcttcaacgacaccaccaccgccttctacatcatcctcatcgtgtggctcgcggaccagtatgacgccatctgctgccacaccagcaccagcaagcggcattggctgcggtgaggcctgggcggcaagcagggggcaggccagccgtgcctttccaggcaggagaggctgcagccggggaggatgccctgtggggtcggcccaagcgggcagagcattccatgatctacttcttccaccactacgagctgcctgccatcctgcagcaggtccgcatccaggagatgctgcttcaggcgccgccactgggccccgggacccccacggcgctgcccgatgacatgaacaacaactcgggcgccccggctacagcccctgactctgccggccagccccccgccctgggccccgtctcgcctggggccagcgggagtcccgggcctgtggcagcggcgcccagctccctggtggccgcggcagcctcagtggcagcagctgccggtggtgacctgggttggatggcagagaccgctgccatcatcacagacgcctccttcctgtccggcctgagcgcctccctcctggagcggcgtccagccagcccgctgggccctgctgggggcctcccccacgccccccaggacagtgtccccccgagtgactccgcagcttctgacacaactcccctgggggctgcggtaggcgggcctagcccggcctccatggccccaacggaggcgccctcggaggtggggtcctgagccgcacagctgagccgcctctgacccctgctggctgggcctgaccttcccgagcccgtgggggtgggggaggccagccacctccttcctctgggactgcccagcctgtgtcgggggctttcagggtttcgtggggtttgcccggaaggcggctttcctccccctggtgtgaggtcgcgcccgaggcttgtacccgctagtgaggtgtttgagctggtcagcaaggagagggggtggggttccgcggaaggttctggaggggtcttggtaggtctgcagtgaaccgtcctgaggatggagtggggtcccatggtgcaggtctctgagcaaggcggaggtgtggaggagaggccggcttggggtggggcctcgcgccctagtgccggccggcctcagcccggctctgcctggtgctccctgcagtgccttctccatggccccgccctccccgcgtgtgcgccaggcttggggtccccgggagagcagagcttgcgcctcgggcatagggacgtggggtgcaggcgccaacatcagtggcagcagccagggccgtggtccagtcccactcggggatggagtgggccggcggccaaaccagtcactcggggaggaatgcggaggagcgctcattccattctatttaattgcagtgtacaaaattgtgtttgtatatagaataaactgtctgttgacagcggctca

SEQ ID NO: 194122 - DNA, 418 bp, Homo sapiens
  Payload ID: 18348
  Gene Name: transmembrane protein 259
  ENST ID: ENST00000586250
  CDS Start-End: 1-418
gcggccgcgggagcttcccgggcctggccgtggaaccaggcagcaacctggacatggaagatgaggaggaggaagagctgaccatggagatgtttgggaacagctccatcaaggtccctggtcgcccacagtttgagctggacatcgagcccaaggtgttcaagccgccgagtagcacagaggccctgaatgacagccaggagttccccttccccgagacgcccaccaaagtgtggccgcaggacgagtacatcgtggagtactcactagagtatggcttccttcgcctgtcgcaggccacccgccagcgcctgagcatccccgtcatggtggtcaccctggaccccacgcgggaccagtgcttcggggaccgcttcagccgcctgctgctggatgagttcctgggctacgatgacat

SEQ ID NO: 194123 - DNA, 518 bp, Homo sapiens
  Payload ID: 18349
  Gene Name: transmembrane protein 26
  ENST ID: ENST00000277749
  CDS Start-End: 1-510
tattgcagtatccaggctgaaggaacatcacagaataccagcagaaaagaagacttcaatcaaacattgacatccaatgaacaaaccagtagagctgatgatctcattgagacggccaaagtttttgtgaataacttatctacagtatgtgagaaagtttggacattgggactccatcagacattcctgttaatgctaataattggaagatggcttctacccattggaggcgggatcactcgagatcaactctctcaacttcttcttatgtttgtggggacagcggctgacatactggaattcacaagtgagaccctagaagaacaaaatgtgaggaatagtcctgcactagtctatgccatccttgttatatggacttggagcatgctgcagtttccacttgacctggcagacccatgtattagaacttcagaagacataggagcagttaaaattgtcctcattggaggtccttggaatcctactggtcttactttaataaaaacataaacccctaa

SEQ ID NO: 194124 - DNA, 5151 bp, Homo sapiens
  Payload ID: 18349
  Gene Name: transmembrane protein 26
  Uniprot ID: Q6ZUK4
  ENST ID: ENST00000399298
  CDS Start-End: 370-1476
acagaggcccgggggcggggataccggacagggatggagactggccccgagattgggagggggatgggcagcgctggagaataacgccctggagacagggcagcgcagccccagactccctggaaaacccagcagtctggaaaagctgggtttggactcacccctctttgaagagttctcaggaagtttgggggaggggcgagccgcgcaccagttctaccggcatcgggcgctgagggtgagaagggaccacaagcagcagcaggtctcagtgcttgtcatattcctgctcaccggtgggctccgggcacgcccggcagggtcctgggggcgcaggcaaggggacgtaggcagagtgctccggccagcatggagggactggtcttccttaacgccctggccactcggttgctgttcctgctgcactcgctggtcggggtctggcgagtgaccgaggtgaagaaggagccgcggtactggctgcttgcgctgctcaacctcttgctcttcctggagactgcgctcaccctcaagttcaagcgcggcagaggctacaaatggttttcaccagccatatttttatatctgattagcatcgttccatcattatggcttcttgaattgcaccatgagacccagtattgcagtatccaggctgaaggaacatcacagaataccagcagaaaagaagacttcaatcaaacattgacatccaatgaacaaaccagtagagctgatgatctcattgagacggccaaagtttttgtgaataacttatctacagtatgtgagaaagtttggacattgggactccatcagacattcctgttaatgctaataattggaagatggcttctacccattggaggcgggatcactcgagatcaactctctcaacttcttcttatgtttgtggggacagcggctgacatactggaattcacaagtgagaccctagaagaacaaaatgtgaggaatagtcctgcactagtctatgccatccttgttatatggacttggagcatgctgcagtttccacttgacctggcagtacagaacgttgtgtgccctgtgtctgtgacagagaggggattccccagcctgttcttttgccagtacagtgccgatctgtggaacatcggaatcagcgtcttcatacaagatggccccttccttgtcgtgcgtctcatactgatgacctatttcaaagtgatcaatcagatgctggtgttctttgccgcgaagaacttcctcgtggtggtgttgcaactctaccgcttggtggtgctggcattggcagtccgtgcttcgttgagaagtcagtcagaaggcctgaaaggagaacatggttgccgggcacagacctctgagagtgggccctctcagcgggactggcagaacgagtctaaggagggcctggctattcctttgcggggctccccagtcacctccgacgactcccaccacaccccttagttattgattgacagtggtctgcggctagaacctgactccctggttcttcttacagggaggatcctttttctcctccaaccttggcgtataataattttcaaaagaacaacataaaaaggtgatcttaaaccaaagctgaggaattttcttttttcaactgaatagaaggaactttgattagtgactattgctacaacttctgtgtgatggtatcagatgttatagttgttcaacgactaagtgatttgtttgtcttgaactgtttgaaaagctatggaagaggttacagtgacatgccctcgaaagatttggtgcagaccaactgtcgcggctgttacctggaaatagagaagctttgaactttgcctccattgtcagactatttcgtctgatcttttctgcaatgttcctctgacatcaaaaaatgtacattcagtgaatgcagaacaaatgaagggaaaagtgcctttaaaattacctcactgtgggctggaagaagcgaaaatctctgcccagcttccgtatcatagagagccctattcatcgctgcccaggccttcccaggaaaatcattttttctgggctgatgttgtattctgccatggcgcatatgttcttacagaaattttattgcttttgtcttgggtgctacaaaattcacagcaagccattttggttacatatctactggttgcaaggcaggaaatattggtgaaatgctagcaaagtcacaatttctactctgaacatgatttgcagtgttcatcagtatttttctgaaccctgctttaccattttctatattgccaagttgaatcatgtgggctgatgcagggaagctctgaagcagtgaataaaggtgtttcgggccctgtaagtgtttccatggtttctggtgtctgccagcagtagtgaacaaagctgcagcttctttgaaccgcgactactggaagtggcctttgctctcagggaacatggtgatggagggttgcatcagctccacccatggccaacagcccttgttgagtgacgggagtcggaatgtgctaccccgttgtgggaatcaggcaattcgctttattttcttgcattaagacttcattttcccagtattgaaatagccatacttttcctttacatacctctatactttccagatggaggtgattcagaaccttttaaagtgatttttgcctttaaagatacagtgtgaaaatttgctcgggtgtgtagcagtaattacacgaggcaaacagttccaaaactgttcttttaggttcaaaacctaattcccccagattagtatactcgagaattcaaagggacatttaaggtggggtatgcccttaatttggtatgacttattgacaaccagttgggacaattttatctgtaactctctgggtgacatgatacctattcgaaacattttatacaaacttttatagacaaattgtgtttttatacagagtcatgcatattttctcataaatggcttcttcagtgccattgttatatgttttttatttctttcttccttgtgcttctaattttaacaatataatgactataaaatgacacatggaactaatggaatacatttatgattttccataataattttatgaaagttaagatcaagaaattatatttatatgaagtaaatcacttgacaacttttaagggcatgttatttgaagtgctcagcagttgaaagcaaaataataactgctatttataaaaatgcctcagcagaatctgtttttatgttgactgctttatgttgaatattttcttccacaacatgtatgtgctgcttattattgcagatttgctcatggcatacttttcatgttttaatttttttcttccagcaaaataaacactgaggccctaaaaatagataaagtataaagtagtacggctgttgcaaggatatttttaaatgctttcaaatctgagacttggcttggcttcgtgaatgagtttctagtgtttaaattaaagtattttgtaattagactcctcgtgggcttgagaaataaaaagcctgtccaaagtctagctttatttagagggtcaggaagtcaaagagcacccaggaccatcttggcaattaatagcggcaaaaatagacccagcttctgcaaggttttccaggaaaatctgcttggggcagcatttgttaacctagctgccagtactcctactctcttatactggctgcttttataataggaaaaaaaaatatgcatttgcttagtttatttgaataaaagctctaaacctaggttatatattagccattcctaagactcctgattaaatattacaaatttgttcagttcatagcgtagactgctaaatactgtaatgtttcaaaacatccaactgtttgttataaagtggctagaacatcaattacctcccatgtgtggacatcctgggacttgtttacattttatctgtaataagataactgactcacaacacctgtataatgtgatgcaagtcatcctctctatcataacccctccccccaacacacagtaggtcactccccaacccctgaagaaagtggcttatttgaggttgttggtgctgttggtattattgccatagttgttatttaattgcttgattaaactcagtcaaatatccttcctaaaaacatgtcattccacttgtgaaagaaaacacaatgtgcatgtttcaatgatactgtgcggaaacacacctcatgatcatcttgtgggtttcttttgcccttactggatgactctcagaggacatgacttgacatagtaacattagtaaactgtctttatctttgattattcttttaatttttatttgagctgtttcaatagcataatgaaataaaattttgaattggccaataacatgctttataatcttccagtgaagagtctgatacaaatttactcttggcactgttgtagttccactaacaaatagcacttcagaccttatagaaccatatagatatggccaaggaatagcaggattcactattataatactaattgttaactcattatttaattgaacatttccaaagctctggaaaggcatgcatttgtaggtgcacatgctttaagatttctatccatctttcagagttgaatgtaataatgtttggtatttaattcttgataattcttaaccaacttttcctgttacaggagagaaagaattgcaaatgccaggcatctgtccactttagccctcctccaatgctaagaaagagggatggtgacgtatactacagagacgcaaatgaaacaccaaacagtcttgaattacaagaaaaaaaggggattttttttttttctaatttcagacttggctttttacttagaggacattctgatttgctctcagaaacatctgatttggggttaaactaggcggctggaggatgtttacagctttgaggcttcaaataagtttccatatgcagggagtaactttaaacaatgtttgaataattaactgctaagtcttatattttatgtgtatctatttcatcctctgtctctttcttactagaataccatataagaatattttctctgcagtatttatatttatactattttgctatgagtggcctttgtattttattatatgcattaaatagtgtgtgcacaa

SEQ ID NO: 194125 - DNA, 2610 bp, Homo sapiens
  Payload ID: 18349
  Gene Name: transmembrane protein 26
  Uniprot ID: Q6ZUK4
  ENST ID: ENST00000503886
  CDS Start-End: 158-1264
agttctaccggcatcgggcgctgagggtgagaagggaccacaagcagcagcaggtctcagtgcttgtcatattcctgctcaccggtgggctccgggcacgcccggcagggtcctgggggcgcaggcaaggggacgtaggcagagtgctccggccagcatggagggactggtcttccttaacgccctggccactcggttgctgttcctgctgcactcgctggtcggggtctggcgagtgaccgaggtgaagaaggagccgcggtactggctgcttgcgctgctcaacctcttgctcttcctggagactgcgctcaccctcaagttcaagcgcggcagaggctacaaatggttttcaccagccatatttttatatctgattagcatcgttccatcattatggcttcttgaattgcaccatgagacccagtattgcagtatccaggctgaaggaacatcacagaataccagcagaaaagaagacttcaatcaaacattgacatccaatgaacaaaccagtagagctgatgatctcattgagacggccaaagtttttgtgaataacttatctacagtatgtgagaaagtttggacattgggactccatcagacattcctgttaatgctaataattggaagatggcttctacccattggaggcgggatcactcgagatcaactctctcaacttcttcttatgtttgtggggacagcggctgacatactggaattcacaagtgagaccctagaagaacaaaatgtgaggaatagtcctgcactagtctatgccatccttgttatatggacttggagcatgctgcagtttccacttgacctggcagtacagaacgttgtgtgccctgtgtctgtgacagagaggggattccccagcctgttcttttgccagtacagtgccgatctgtggaacatcggaatcagcgtcttcatacaagatggccccttccttgtcgtgcgtctcatactgatgacctatttcaaagtgatcaatcagatgctggtgttctttgccgcgaagaacttcctcgtggtggtgttgcaactctaccgcttggtggtgctggcattggcagtccgtgcttcgttgagaagtcagtcagaaggcctgaaaggagaacatggttgccgggcacagacctctgagagtgggccctctcagcgggactggcagaacgagtctaaggagggcctggctattcctttgcggggctccccagtcacctccgacgactcccaccacaccccttagttattgattgacagtggtctgcggctagaacctgactccctggttcttcttacagggaggatcctttttctcctccaaccttggcgtataataattttcaaaagaacaacataaaaaggtgatcttaaaccaaagctgaggaattttcttttttcaactgaatagaaggaactttgattagtgactattgctacaacttctgtgtgatggtatcagatgttatagttgttcaacgactaagtgatttgtttgtcttgaactgtttgaaaagctatggaagaggttacagtgacatgccctcgaaagatttggtgcagaccaactgtcgcggctgttacctggaaatagagaagctttgaactttgcctccattgtcagactatttcgtctgatcttttctgcaatgttcctctgacatcaaaaaatgtacattcagtgaatgcagaacaaatgaagggaaaagtgcctttaaaattacctcactgtgggctggaagaagcgaaaatctctgcccagcttccgtatcatagagagccctattcatcgctgcccaggccttcccaggaaaatcattttttctgggctgatgttgtattctgccatggcgcatatgttcttacagaaattttattgcttttgtcttgggtgctacaaaattcacagcaagccattttggttacatatctactggttgcaaggcaggaaatattggtgaaatgctagcaaagtcacaatttctactctgaacatgatttgcagtgttcatcagtatttttctgaaccctgctttaccattttctatattgccaagttgaatcatgtgggctgatgcagggaagctctgaagcagtgaataaaggtgtttcgggccctgagagaaagaattgcaaatgccaggcatctgtccactttagccctcctccaatgctaagaaagagggatggtgacgtatactacagagacgcaaatgaaacaccaaacagtcttgaattacaagaaaaaaaggggattttttttttttctaatttcagacttggctttttacttagaggacattctgatttgctctcagaaacatctgatttggggttaaactaggcggctggaggatgtttacagctttgaggcttcaaataagtttccatatgcagggagtaactttaaacaatgtttgaataattaactgctaagtcttatattttatgtgtatctatttcatcctctgtctctttcttactagaataccatataagaatattttctctgcagtatttatatttatactattttgctatgagtggcctttgtattttattatatgcattaaatagtgtgtgcacaacttt

SEQ ID NO: 194126 - DNA, 2520 bp, Homo sapiens
  Payload ID: 18349
  Gene Name: transmembrane protein 26
  Uniprot ID: Q6ZUK4
  ENST ID: ENST00000488505
  CDS Start-End: 87-758
ttcctgctcaccggtgggctccgggcacgcccggcagggtcctgggggcgcaggcaaggggacgtaggcagagtgctccggccagcatggagggactggtcttccttaacgccctggccactcggttgctgttcctgctgcactcgctggtcggggtctggcgagtgaccgaggtgaagaaggagccgcggtactggctgcttgcgctgctcaacctcttgctcttcctggagactgcgctcaccctcaagttcaagcgcggcagaggctacaaatggttttcaccagccatatttttatatctgattagcatcgttccatcattatggcttcttgaattgcaccatgagacccagtattgcagtatccaggctgaaggaacatcacagaataccagcagaaaagaagacttcaatcaaacattgacatccaatgaacaaaccagtagagctgatgatctcattgagacggccaaagtttttgtgaataacttatctacagtatgtgagaaagtttggacattgggactccatcagacattcctgttaatgctaataattggaagatggcttctacccattggaggcgggatcactcgagatcaactctctcaacttcttcttatgtttgtggggacagcggctgacatactggaattcacaagtgagaccctagaagaacaaaatgtgaggctctgttggaaaaattccactaatagaagacatactaaccccaagtggcaacttgttctattttgagggtactggttttctatccacgttctatgccatatgtgcatgtgagaagccttccatcaatgtccaccaagtcatgataaaatgtgaagtagaaaagaatcaaaagcacagccttcaacaacccattggagagtccccctgtggggagccatttacacaggaatccacctaacagtattcacacctggaatatttcttaattttgttaatgaggacactatgggagactttttcagaagccttgtttaaatctgaatgtctgtcatcaatttacataacattacctgcttggtaatcctaactatattttttaagaggaggaactaagtttaattgagtgcaatttttctcagaggacctgtgctgatgcttcgtaataactgtgttcttctaaaagggctctcagaaatcttttaaaggatcatttatataatctaactagagattaatagtaaatgtgccttttgtacttcaagacatatttctgcttcattttgaaagttgagactttatttttttatcaccaaccttgtctccaccattaactgccaagacagataatgatggtttagaaatctcatttacaaattctctcagagttttgagatttaattttgtatttaatgcctctacacttgaagcatttaaagatatcccttacaatcacctcatttcttttggtttcaattactcctccttgatgcttttcagacctcttcaatctgaaaatctcttttgatggaagatggaaacaaaatctattattatgctaccaagctcaaattgatgacttcctttctatctttgctaaaaataaatgtgaccctgtttaatatcctttgcatttctgcaacctctgttctttctgattttagccttcatgaccattttcctaggtctaggacatttgtatatttgtctgagtatggacccttctttggtgcttttaaccattccttccataaatatatgttgtatccatcaagcactgttctaggcactaaggatacagtggtgaatgaaataggcttattccttgctttatgtcctactatctggtataaatctttgtttattggatttatctccttacctttttcctatctaatgacaattttatttcaatgttgagtttttaatctttgatcatcatttagctcttttgaaatgtcttttcaattcgatccctggtttcttagaataattattaatcctcccactgacattccttgaaatcagccatttgaatatccatgttaatatctatattttctcccctatcatttttctcccataatgtttccataattttgtaaaactaaagacagcaatatgggaccaagaggctttgtcataattcatgcatatgttgggctttaagtctcagattatttatttttcacttcttcattattccattattatcatgtaaggatttttttcattgatttattaaatcaccaagatattttggccacaagaggtttattaggaatatactaaaaaacttgactgagaagacttttctgcatgtgatcatactttttattacaaatttaacattttgtctgtattctaggaatagtcctgcactagtctatgccatccttgttatatggacttggagcatgctgcagtttccacttgacctggcagacccatgtattagaacttcagaagacataggagcagttaaaattgtcctcattggaggtccttggaatcctactggtcttactttaataaaaacataaacccctaa

SEQ ID NO: 194127 - DNA, 4264 bp, Homo sapiens
  Payload ID: 18350
  Gene Name: transmembrane protein 260
  Uniprot ID: Q9NX78
  ENST ID: ENST00000261556
  CDS Start-End: 123-2246
ggctcgacccggaagccgccgtggccgccgcacaagctgcgctcgtctctcggctggggagctccgtgtcgcaccgggttcttgggctggccgtgtccttctccctcggtcgccactggcccatgagtccccatggcgacggcaggggccaggcccaggggcgggcagtccgagtggggctgcggcgctccgggggcatccgcggcggcgtggcggtgttcgccgccgtggccgcagtgttcaccttcaccctgcccccttcggtaccggggggagactccggggaactgatcacagccgcacatgagcttggagttgcccatcctcctggctatcctttgttcacgctggtggctaaactggcaattacactgtttccttttggttcaattgcctaccgcgtcaatcttctctgtggcttatttggagcagtagctgcatcattactttttttcaccgttttcaggctttctggctcatctgctggaggaatccttgctgcgggggtgttttcattttctcgtctaacatggcagtggtccattgcagcagaggtttttagcttaaacaatctctttgtggggctgcttatggctcttactgtacattttgaggaagcagcaactgctaaggagagatcaaaggtagctaaaattggtgctttctgctgtggccttagtttatgtaaccagcacacaataatactctatgttttgtgcataataccttggattctctttcaacttttaaaaaagaaggaactctccctgggctctttgttgaagttgagcctgtacttctctgctggtttgctgccctatgtccaccttcccatctcatcttaccttaatcacgcccggtggacctggggagaccagacaacactgcaaggatttttgacacattttctcagggaagaatatggaaccttcagcctggccaaatctgaaataggatccagtatgtctgaaatactgctttctcaagtaacaaatatgaggaccgaactctcattcaacatccaagcccttgcagtttgtgcaaatatatgtttagcaacaaaggacagacagaatccatcattagtatggctttttactggaatgttttgcatttattcattgttctttgcttggagagcaaatttagatatttcaaaaccacttttcatgggtgtggtggaacgattctggatgcagagcaatgcagtagtggccgtcctcgctggcattggtttggctgcagttgtgtctgagactaaccgagtgctgaatagcaatgggcttcagtgtctggaatggctttctgcaactctttttgtagtttaccaaatatattctaattacagtgtttgtgaccaaaggaccaactatgtgattgataagttcgcaaagaaccttctcacctctatgcctcatgatgcaattatcttactcagaggagatttgccaggaaattctctccgttacatgcattactgtgaggggttgaggcctgacatttcattagtggatcaggaaatgatgacttacgagtggtatttacccaagatggcaaagcacttgccaggtgtcaactttcctgggaaccggtggaatcctgtggaaggaatattacctagtggaatggtcacatttaatctttatcattttcttgaagtaaataaacaaaaagaaacatttgtttgcataggaattcatgaaggcgacccaacctggaaaaagaactattcactttggccatgggggtcttgtgacaaattagttcctttggagattgtattcaaccctgaggaatggattaaacttacaaaaagtatctataactggaccgaagaatatggaaggtttgatccatcttcttgggaatctgtggccaatgaagaaatgtggcaagcgaggatgaaaacaccgttcttcatctttaacctggcagaaactgctcacatgccttcaaaagtgaaagctcaactctacgctcaagcatatgacctttataaggagattgtctatttacaaaaggagcacccagtgaattggcacaagaactatgccatcgcctgtgagcggatgctgcgtcttcaggcaagagatgcagatcctgaagtgctgttatcggaaaccatcagacatttccgtctgtactctcagaaagcaccgaatgacccacagcaagctgatattttaggtgctctaaagcacctaagaaaagaactgcaaagtctgagaaataggaaaaatgtctgagacagcaaaatatgaaaaacctgctcatcgttcagcttccaaaattctgaagtctggaagtttttccttcaagaaaagaaactgcataaaaaatttaaaactaagtcatctcccagatataagtatcatggtccagcagtactgtttaatggggtattcagtgactaaggtctgctatttatgcaaaattctgtttatcccgtgttaccaaattaccatttcagtgagaagcttttgaaaagtcttctgacttccagtctttcaccagatgactgcactggattagattctagaagagaatgaaccattttcatataactaaatattggtcatgaactgtgtaagggccatgcttattgggatcagttttaaagttaaattcttttgatattaataccagaccaaagacattttctgtttcctggaaaaaaaaaatgaatcatgttaggctttaggtgagagtacattttttacaaagtagctatagttgttacatagtcttacacttcaagctaaacaccaaatgggtgatattttgaaaaaagtttgtgttttactgtcttagatcgttcttggaaatcactaaaaaaaaaaaaagttaatttgatgtttgcttatttcagttgcagaaactggcgagtaaaaaagattttgcatttacttaattaattttatatttatgttttatttctatttggactcagagatctagacccaataattagtaggctcctgctgccaaaatgcaaaggggaaaaaaaggcagggattgggggggatggggaagtggcccaataaattcatttctgttacaagcatcttttatacatattactaaagagaacatagtaagaaatgcaaataatagttctttattttattatgacagttaattaatagcaacctgttttaatgaataaagtcactcagagtccttcagcacttcctaagtagaggccagaatctgtagggcttcttttccccccaattgtatagctcctagactccaagcactatataggcccctgtatagaaatgctcactaatgaagagggagggctagaagcttgtctgcattcaaagatcactggtgagtcattcagcaagaaaaggccccttaccaggaatagtcacagttccgtggcattgtactagcaaaagggtctgatcaaaggtctcctgtggagcttgcatggttccctttcatactacgaccataattaaaaccactaattctcttttaaaatgctgcaggatgccatgtaggcatctgtctggagtgtcctttgtgatgtcataagctgttaaggaccagtgccgagggcttttgagtgaaatgccagtcatgaaggtgcttcaagacaagggtgcctctaaaagcttgacagggccttgactgcacaattcgagctgaatttgccccttgtcagctgccagtaaataaatctcaaagggggaaaagctgaagtttcattacctgatccatggggctttgttggttttggcatcacacaggggaagctcttgcccctccattctctggatttgaagatgtccattggagcctgcagtgcctggacagggttcagagcggaaccttttgaagagtgtcaatagttgtaacagttcagctgttaggaagacaaataaatggaggagctcattaatccgcttttggctctcagtgccttttgcccttttatcacagccttattaggctcctactcatcttgaaccagaaaaaaatgaattgaagttgttgagtactaattggcaaagacttttaatcatgggccaagaactttcactgacttgaaagtaacttctccacagggaaggaccaaaaacctggtttaccttaaaacaaaaacctgttggagttcagcgtggtgtaaaaatgtaaggaagcattgataaattgtctaagtttatccatttgaaagaaattgtgtaagattatgatattctcttttctttaaaaaaaaaagtacaataaaattcaaacattccttaggaaa

SEQ ID NO: 194128 - DNA, 1638 bp, Homo sapiens
  Payload ID: 18350
  Gene Name: transmembrane protein 260
  ENST ID: ENST00000538838
  CDS Start-End: 32-1261
cgtgtccttctccctcggtcgccactggcccatgagtccccatggcgacggcaggggccaggcccaggggcgggcagtccgagtggggctgcggcgctccgggggcatccgcggcggcgtggcggtgttcgccgccgtggccgcagtgttcaccttcaccctgcccccttcggtaccggggggagactccggggaactgatcacagccgcacatgagcttggagttgcccatcctcctggctatcctttgttcacgctggtggctaaactggcaattacactgtttccttttggttcaattgcctaccgcgtcaatcttctctgtggcttatttggagcagtagctgcatcattactttttttcaccgttttcaggctttctggctcatctgctggaggaatccttgctgcgggggtgttttcattttctcgtctaacatggcagtggtccattgcagcagaggtttttagcttaaacaatctctttgtggggctgcttatggctcttactgtacattttgaggaagcagcaactgctaaggagagatcaaaggtagctaaaattggtgctttctgctgtggccttagtttatgtaaccagcacacaataatactctatgttttgtgcataataccttggattctctttcaacttttaaaaaagaaggaactctccctgggctctttgttgaagttgagcctgtacttctctgctggtttgctgccctatgtccaccttcccatctcatcttaccttaatcacgcccggtggacctggggagaccagacaacactgcaaggatttttgacacattttctcagggaagaatatggaaccttcagcctggccaaatctgaaataggatccagtatgtctgaaatactgctttctcaagtaacaaatatgaggaccgaactctcattcaacatccaagcccttgcagtttgtgcaaatatatgtttagcaacaaaggacagacagaatccatcattagtatggctttttactggaatgttttgcatttattcattgttctttgcttggagagcaaatttagatatttcaaaaccacttttcatgggtgtggtggaacgattctggatgcagagcaatgcagtagtggccgtcctcgctggcattggtttggctgcagttgtgtctgagactaaccgagtgctgaatagcaatgggcttcagtgtctggaatggctttctgcaactctttttgtagtttaccaaatatattctaattacagatgatgacttacgagtggtatttacccaagatggcaaagcacttgccaggtgtcaactttcctgggaaccggtggaatcctgtggaaggaatattacctagtggaatggtcacatttaatctttatcattttcttgaagtaaataaacaaaaagaaacatttgtttgcataggaattcatgaaggcgacccaacctggaaaaagaactattcactttggccatgggggtcttgtgacaaattagttcctttggagattgtattcaaccctgaggaatggattaaacttacaaaaagtatctataactggaccgaagaatatggaaggtttgatccatcttcttgggaatctgtggccaatgaagaaatgtggcaagcgagg

SEQ ID NO: 194129 - DNA, 2680 bp, Homo sapiens
  Payload ID: 18350
  Gene Name: transmembrane protein 260
  ENST ID: ENST00000539559
  CDS Start-End: 75-1049
ctcggctggggagctccgtgtcgcaccgggttcttgggctggccgtgtccttctccctcggtcgccactggcccatgagtccccatggcgacggcaggggccaggcccaggggcgggcagtccgagtggggctgcggcgctccgggggcatccgcggcggcgtggcggtgttcgccgccgtggccgcagtgttcaccttcaccctgcccccttcggtaccggggggagactccggggaactgatcacagccgcacatgagcttggagttgcccatcctcctggctatcctttgttcacgctggtggctaaactggcaattacactgtttccttttggttcaattgcctaccgcgtcaatcttctctgtggcttatttggagcagtagctgcatcattactttttttcaccgttttcaggctttctggctcatctgctggaggaatccttgctgcgggggtgttttcattttctcgtctaacatggcagtggtccattgcagcagaggtttttagcttaaacaatctctttgtggggctgcttatggctcttactgtacattttgaggaagcagcaactgctaaggagagatcaaaggtagctaaaattggtgctttctgctgtggccttagtttatgtaaccagcacacaataatactctatgttttgtgcataataccttggattctctttcaacttttaaaaaagaaggaactctccctgggctctttgttgaagttgagcctgtacttctctgctggtttgctgccctatgtccaccttcccatctcatcttaccttaatcacgcccggtggacctggggagaccagacaacactgcaaggatttttgacacattttctcagggaagaatatggaaccttcagcctggccaaatctgaaataggatccagtatgtctgaaatactgctttctcaagtaacaaatatgaggaccgaactctcattcaacatccaagcccttgcagtttgtgcaaatatatgtttagcaacaaagtggaacgattctggatgcagagcaatgcagtagtggccgtcctcgctggcattggtttggctgcagttgtgtctgagactaaccgagtgctgaatagcaatgggcttcagtgtctggaatggctttctgcaactctttttgtagtttaccaaatatattctaattacagtgtttgtgaccaaaggaccaactatgtgattgataagttcgcaaagaaccttctcacctctatgcctcatgatgcaattatcttactcagaggagatttgccaggaaattctctccgttacatgcattactgtgaggggttgaggcctgacatttcattagtggatcaggaaatgatgacttacgagtggtatttacccaagatggcaaagcacttgccaggtgtcaactttcctgggaaccggtggaatcctgtggaaggaatattacctagtggaatggtcacatttaatctttatcattttcttgaagtaaataaacaaaaagaaacatttgtttgcataggaattcatgaaggcgacccaacctggaaaaagaactattcactttggccatgggggtcttgtgacaaattagttcctttggagattgtattcaaccctgaggaatggattaaacttacaaaaagtatctataactggaccgaagaatatggaaggtttgatccatcttcttgggaatctgtggccaatgaagaaatgtggcaagcgaggatgaaaacaccgttcttcatctttaacctggcagaaactgctcacatgccttcaaaagtgaaagctcaactctacgctcaagcatatgacctttataaggagattgtctatttacaaaaggagcacccagtgaattggcacaagaactatgccatcgcctgtgagcggatgctgcgtcttcaggcaagagatgcagatcctgaagtgctgttatcggaaaccatcagacatttccgtctgtactctcagaaagcaccgaatgacccacagcaagctgatattttaggtgctctaaagcacctaagaaaagaactgcaaagtctgagaaataggaaaaatgtctgagacagcaaaatatgaaaaacctgctcatcgttcagcttccaaaattctgaagtctggaagtttttccttcaagaaaagaaactgcataaaaaatttaaaactaagtcatctcccagatataagtatcatggtccagcagtactgtttaatggggtattcagtgactaaggtctgctatttatgcaaaattctgtttatcccgtgttaccaaattaccatttcagtgagaagcttttgaaaagtcttctgacttccagtctttcaccagatgactgcactggattagattctagaagagaatgaaccattttcatataactaaatattggtcatgaactgtgtaagggccatgcttattgggatcagttttaaagttaaattcttttgatattaataccagaccaaagacattttctgtttcctggaaaaaaaaaatgaatcatgttaggctttaggtgagagtacattttttacaaagtagctatagttgttacatagtcttacacttcaagctaaacaccaaatgggtgatattttgaaaaaagtttgtgttttactgtcttagatcgttcttggaaatcactaaaaaaaaaaaaa

SEQ ID NO: 194130 - DNA, 3864 bp, Homo sapiens
  Payload ID: 18350
  Gene Name: transmembrane protein 260
  ENST ID: ENST00000556422
  CDS Start-End: 363-1124
gctttttaaagggaatgctctcctggtgattaggaaccttaaatcacattataagggaactgatcacagccgcacatgagcttggagttgcccatcctcctggctatcctttgttcacgctggtggctaaactggcaattacactgtttccttttggttcaattgcctaccgcgtcaatcttctctgtggcttatttggagcagtagctgcatcattactttttttcaccgttttcaggctttctggctcatctgctggaggaatccttgctgcgggggtgttttcattttctcgtctaacatggcagtggtccattgcagcagaggtttttagcttaaacaatctctttgtggggctgcttatggctcttactgtacattttgaggaagcagcaactgctaaggagagatcaaaggtagctaaaattggtgctttctgctgtggccttagtttatgtaaccagcacacaataatactctatgttttgtgcataataccttggattctctttcaacttttaaaaaagaaggaactctccctgggctctttgttgaagttgagcctgtacttctctgctggtttgctgccctatgtccaccttcccatctcatcttaccttaatcacgcccggtggacctggggagaccagacaacactgcaaggatttttgacacattttctcagggaagaatatggaaccttcagcctggccaaatctgaaataggatccagtatgtctgaaatactgctttctcaagtaacaaatatgaggaccgaactctcattcaacatccaagcccttgcagtttgtgcaaatatatgtttagcaacaaaggacagacagaatccatcattagtatggctttttactggaatgttttgcatttattcattgttctttgcttggagagcaaatttagatatttcaaaaccacttttcatgggtgtggtggaacgattctggatgcagagcaatgcagtagtggccgtcctcgctggcattggtttggctgcagttgtgtctgagactaaccgagtgctgaatagcaatgggcttcagtgtctggaatggctttctgcaactctttttgtagtttaccaaatatattctaattacagatgatgacttacgagtggtatttacccaagatggcaaagcacttgccaggtgtcaactttcctgggaaccggtggaatcctgtggaaggaatattacctagtggaatggtcacatttaatctttatcattttcttgaagtaaataaacaaaaagaaacatttgtttgcataggaattcatgaaggcgacccaacctggaaaaagaactattcactttggccatgggggtcttgtgacaaattagttcctttggagattgtattcaaccctgaggaatggattaaacttacaaaaagtatctataactggaccgaagaatatggaaggtttgatccatcttcttgggaatctgtggccaatgaagaaatgtggcaagcgaggatgaaaacaccgttcttcatctttaacctggcagaaactgctcacatgccttcaaaagtgaaagctcaactctacgctcaagcatatgacctttataaggagattgtctatttacaaaaggagcacccagtgaattggcacaagaactatgccatcgcctgtgagcggatgctgcgtcttcaggcaagagatgcagatcctgaagtgctgttatcggaaaccatcagacatttccgtctgtactctcagaaagcaccgaatgacccacagcaagctgatattttaggtgctctaaagcacctaagaaaagaactgcaaagtctgagaaataggaaaaatgtctgagacagcaaaatatgaaaaacctgctcatcgttcagcttccaaaattctgaagtctggaagtttttccttcaagaaaagaaactgcataaaaaatttaaaactaagtcatctcccagatataagtatcatggtccagcagtactgtttaatggggtattcagtgactaaggtctgctatttatgcaaaattctgtttatcccgtgttaccaaattaccatttcagtgagaagcttttgaaaagtcttctgacttccagtctttcaccagatgactgcactggattagattctagaagagaatgaaccattttcatataactaaatattggtcatgaactgtgtaagggccatgcttattgggatcagttttaaagttaaattcttttgatattaataccagaccaaagacattttctgtttcctggaaaaaaaaaatgaatcatgttaggctttaggtgagagtacattttttacaaagtagctatagttgttacatagtcttacacttcaagctaaacaccaaatgggtgatattttgaaaaaagtttgtgttttactgtcttagatcgttcttggaaatcactaaaaaaaaaaaaagttaatttgatgtttgcttatttcagttgcagaaactggcgagtaaaaaagattttgcatttacttaattaattttatatttatgttttatttctatttggactcagagatctagacccaataattagtaggctcctgctgccaaaatgcaaaggggaaaaaaaggcagggattgggggggatggggaagtggcccaataaattcatttctgttacaagcatcttttatacatattactaaagagaacatagtaagaaatgcaaataatagttctttattttattatgacagttaattaatagcaacctgttttaatgaataaagtcactcagagtccttcagcacttcctaagtagaggccagaatctgtagggcttcttttccccccaattgtatagctcctagactccaagcactatataggcccctgtatagaaatgctcactaatgaagagggagggctagaagcttgtctgcattcaaagatcactggtgagtcattcagcaagaaaaggccccttaccaggaatagtcacagttccgtggcattgtactagcaaaagggtctgatcaaaggtctcctgtggagcttgcatggttccctttcatactacgaccataattaaaaccactaattctcttttaaaatgctgcaggatgccatgtaggcatctgtctggagtgtcctttgtgatgtcataagctgttaaggaccagtgccgagggcttttgagtgaaatgccagtcatgaaggtgcttcaagacaagggtgcctctaaaagcttgacagggccttgactgcacaattcgagctgaatttgccccttgtcagctgccagtaaataaatctcaaagggggaaaagctgaagtttcattacctgatccatggggctttgttggttttggcatcacacaggggaagctcttgcccctccattctctggatttgaagatgtccattggagcctgcagtgcctggacagggttcagagcggaaccttttgaagagtgtcaatagttgtaacagttcagctgttaggaagacaaataaatggaggagctcattaatccgcttttggctctcagtgccttttgcccttttatcacagccttattaggctcctactcatcttgaaccagaaaaaaatgaattgaagttgttgagtactaattggcaaagacttttaatcatgggccaagaactttcactgacttgaaagtaacttctccacagggaaggaccaaaaacctggtttaccttaaaacaaaaacctgttggagttcagcgtggtgtaaaaatgtaaggaagcattgataaattgtctaagtttatccatttgaaagaaattgtgtaagattatgatattctcttttctttaaaaaaaaaagtacaataaaattcaaacattccttaggaaa

SEQ ID NO: 194131 - DNA, 662 bp, Homo sapiens
  Payload ID: 18350
  Gene Name: transmembrane protein 260
  ENST ID: ENST00000556810
  CDS Start-End: 440-662
aataatttaacctatgtcttagtttcatctagaaaatagagatggtagattgcaggtttgttgtctttaagcaaatgaatgtatctggaacactagaacatagaaaacacttagtgaatggcagctacatcatcatcatcatcatgatcatcatcgtcatcatccccaagtttagctgggagagtttgcttggctgcttcatagaagaattgcaatctggcttgccccaacatgtataggtctgcctcgtggtaagaacagcgagagtgactaagctccagtgataagggcaatgctgtttcttgagcctgctgcagcacctgtcatgggaggcagagagagcatgcaaatccctcaggcccatgtctgttcaatgacaaaaggaaggaggatgcactattcccagtgacctcaagatggcagtggagaaatactccaaatgaatttcctgaggtcaccccccgatccagcgaaggaccactgtaatggggaactgatcacagccgcacatgagcttggagttgcccatcctcctggctatcctttgttcacgctggtggctaaactggcaattacactgtttccttttggttcaattgcctaccgcgtcaatcttctctgtggcttatttggagcagtagctgcatcattactttttttca

SEQ ID NO: 194132 - DNA, 618 bp, Homo sapiens
  Payload ID: 18350
  Gene Name: transmembrane protein 260
  ENST ID: ENST00000555046
  CDS Start-End: 1-125
caccgttcttcatctttaacctggcagaaactgctcacatgccttcaaaagtgaaagctcaactctacgctcaagcatatgactgtacagactccataaaatctgataaaaggggtttcctgtagtctgacccccgacattgaggagactgtaatggaggtgacttctcatgcaagatttggccagcgttctagcagtgtcccgggagtgccatggtttggcaggaagacaggaaccccacaaggccaacttctgcctggacttcggcctgaagagccagtgggagccagtgaaactgtctgactctccacatgcgtcagggccctgccgccctggcaccaaggctggcacgcaccagagggcaagtggagaagcggatggtggctcccatgttatctgactaaccactgggtgggctacactccctgtgcccccgctgttgcctctgataggagtatgcttggttcttggtattgacttgcctttttttgttgttttttaaaagcacccattttgttcaatgcttctgttctgttactcaaaatgtagccaaaatagaagggaatcaattactagtgtattattttgaaagcttcaaacagaaattgtgaaatgtta

SEQ ID NO: 194133 - DNA, 2218 bp, Homo sapiens
  Payload ID: 18350
  Gene Name: transmembrane protein 260
  ENST ID: ENST00000555497
  CDS Start-End: 90-437
aagctgcgctcgtctctcggctggggagctccgtgtcgcaccgggttcttgggctggccgtgtccttctccctcggtcgccactggcccatgagtccccatggcgacggcaggggccaggcccaggggcgggcagtccgagtggggctgcggcgctccgggggcatccgcggcggcgtggcggtgttcgccgccgtggccgcagtgttcaccttcaccctgcccccttcggtaccggggggagactccggggaactgatcacagccgcacatgagcttggagttgcccatcctcctggctatcctttgttcacgctggtggctaaactggcaattacactgtttccttttggttcaattgcctaccgcgtcaatcttctctgtggcttatttggagcagtagctgcatcattactttttttcaccgttttcaggtagctaaaattggtgctttctgctgtggccttagtttatgtaaccagcacacaataatactctatgttttgtgcataataccttggattctctttcaacttttaaaaaagaaggaactctccctgggctctttgttgaagttgagcctgtacttctctgctggtttgctgccctatgtccaccttcccatctcatcttaccttaatcacgcccggtggacctggggagaccagacaacactgcaaggatttttgacacattttctcagggaagaatatggaaccttcagcctggccaaatctgaaataggatccagtatgtctgaaatactgctttctcaagtaacaaatatgaggaccgaactctcattcaacatccaagcccttgcagtttgtgcaaatatatgtttagcaacaaaggacagacagaatccatcattagtatggctttttactggaatgttttgcatttattcattgttctttgcttggagagcaaatttagatatttcaaaaccacttttcatgggtgtggtggaacgattctggatgcagagcaatgcagtagtggccgtcctcgctggcattggtttggctgcagttgtgtctgagactaaccgagtgctgaatagcaatgggcttcagtgtctggaatggctttctgcaactctttttgtagtttaccaaatatattctaattacagatgatgacttacgagtggtatttacccaagatggcaaagcacttgccaggtgtcaactttcctgggaaccggtggaatcctgtggaaggaatattacctagtggaatggtcacatttaatctttatcattttcttgaagtaaataaacaaaaagaaacatttgtttgcataggaattcatgaaggcgacccaacctggaaaaagaactattcactttggccatgggggtcttgtgacaaattagttcctttggagattgtattcaaccctgaggaatggattaaacttacaaaaagtatctataactggaccgaagaatatggaaggtttgatccatcttcttgggaatctgtggccaatgaagaaatgtggcaagcgaggatgaaaacaccgttcttcatctttaacctggcagaaactgctcacatgccttcaaaagtgaaagctcaactctacgctcaagcatatgacctttataaggagattgtctatttacaaaaggagcacccagtgaattggcacaagaactatgccatcgcctgtgagcggatgctgcgtcttcaggcaagagatgcagatcctgaagtgctgttatcggaaaccatcagacatttccgtctgtactctcagaaagcaccgaatgacccacagcaagctgatattttaggtgctctaaagcacctaagaaaagaactgcaaagtctgagaaataggaaaaatgtctgagacagcaaaatatgaaaaacctgctcatcgttcagcttccaaaattctgaagtctggaagtttttccttcaagaaaagaaactgcataaaaaatttaaaactaagtcatctcccagatataagtatcatggtccagcagtactgtttaatggggtattcagtgactaaggtctgctatttatgcaaaattctgtttatcccgtgttaccaaattaccatttcagtgagaagcttttgaaaagtcttctgacttccagtctttcaccagatgactgcactggattagattctagaagagaatgaaccattttcatataactaaatattggtcatgaactgtgtaagggccatgctt

SEQ ID NO: 194134 - DNA, 766 bp, Homo sapiens
  Payload ID: 18350
  Gene Name: transmembrane protein 260
  ENST ID: ENST00000555905
  CDS Start-End: 1-304
gtacttctctgctggtttgctgccctatgtccaccttcccatctcatcttaccttaatcacgcccggtggacctggggagaccagacaacactgcaaggatttttgacacattttctcagggaagaatatggaaccttcagcctggccaaatctgaaataggatccagtatgtctgaaatactgctttctcaagtaacaaatatgaggaccgaactctcattcaacatccaagcccttgcagtttgtgcaaatatatgtttagcaacaaagtggaacgattctggatgcagagcaatgcagtagtggccgtcctcgctggcattggtttggctgcagttgtgtctgagactaaccgagtgctgaatagcaatgggcttcagtgtctggaatggctttctgcaactctttttgtagtttaccaaatatattctaattacagatgatgacttacgagtggtatttacccaagatggcaaagcacttgccaggtgtcaactttcctgggaaccggtggaatcctgtggaaggaatattacctagtggaatggtcacatttaatctttatcattttcttgaagtaaataaacaaaaagaaacatttgtttgcataggaattcatgaaggcgacccaacctggaaaaagaactattcactttggccatgggggtcttgtgacaaattagttcctttggagattgtattcaaccctgaggaatggattaaacttacaaaaagtatctataactggaccgaagaatatggaag

SEQ ID NO: 194135 - DNA, 547 bp, Homo sapiens
  Payload ID: 18350
  Gene Name: transmembrane protein 260
  ENST ID: ENST00000556929
  CDS Start-End: 1-62
ttctctgtggcttatttggagcagtagctgcatcattactttttttcaccgttttcaggtagctaaaattggtgctttctgctgtggccttagtttatgtaaccagcacacaataatactctatgttttgtgcataataccttggattctctttcaacttttaaaaaagaaggaactctccctgggctctttgttgaagttgagcctgtacttctctgctggtttgctgccctatgtccaccttcccatctcatcttaccttaatcacgcccggtggacctggggagaccagacaacactgcaaggatttttgacacattttctcagggaagaatatggaaccttcagcctggccaaatctgaaataggatccagtatgtctgaaatactgctttctcaagtaacaaatatgaggaccgaactctcattcaacatccaagcccttgcagtttgtgcaaatatatgtttagcaacaaagtggaacgattctggatgcagagcaatgcagtagtggccgtcctcgctggcattggtttggctgcagttg

SEQ ID NO: 194136 - DNA, 2755 bp, Homo sapiens
  Payload ID: 18351
  Gene Name: transmembrane protein 261
  Uniprot ID: Q96GE9
  ENST ID: ENST00000358227
  CDS Start-End: 334-672
taaggagactgaaaggtgattcatttagtgagtagcgattacagaatttctaaaacagtgggggcggggggggcggcggggaggagggctggaattgtcctccagcgcatacaaggttgttgctgccagagaaatccagcaggaaagagcagcattctttcaccttttccgcctctgaagcggaggagaacttcatttcccagcagcccttaagattcctccgcgcactgcgctagcgtcccggcattctgctttccggcgctctgccttccggtgcgtcgtttacgccagtttgaaccaaagacgcccaaggttgaggccgagttccagagcatggggtctcggttgtcccagccttttgagtcctatatcactgcgcctcccggtaccgccgccgcgcccgccaaacctgcgcccccagctacacccggagcgccgacctccccagcagaacaccgcctgttgaagacctgctggagctgtcgcgtgctttctgggttggggctgatgggggcgggcgggtacgtgtactgggtggcacggaagcccatgaagatgggataccccccgagtccatggaccattacgcagatggtcatcggcctcagcattgccacctggggtatcgttgtcatggcagaccccaaagggaaggcctaccgcgttgtttgaaagtaccaccagtgaatctgtcttctgtctctgtccctttccccgtgacacacacagcaggcatggaatttaatgggtgttctggacagacacttgtacatggacagacatcactactgtggatactacaagactgagaagaaaatcgtatgttgtcattctctggctatggagtgtttgtggccttcacagatttcacaggaaccaataaatccctcagagaagtaaacaggttctttgtcttatctggggaaggaaagtataacttatatttaaatataattgcttaattaagcattatatataaacataatagtatgtcttatataattgcatgtcatattatatataataaacataaatatgtttagttatatagttagtataatttttaaaacttttaaatacagcatatggtaaaccaacgggaaaattagctattttacttcattattttaaagagttctttttatttctttcataattggatcaacaactgttaacctaaccctgggtgggcatcatgcaatatatagaagtacgtgaaattttctgtgtatgaattgctgatactttgcaaggcattttcaaatccatcaccttatgagagcttcacagctagtctgaggtagttacttcattggaggtaaaacttaaaacacaagaaagagcccacatgatttgcctagggtcattcagtaagtccgtgatggagctagaacttgttcttgtcagttttttgttctagtcttccctttcatggaggcaagaataaccattatgaaacagttagataatcataaaaatcagcatacaataaaagacttaaatgtcacaagaaaaattcaaaacctttagctaaaaaaaaaaaagatcttttgattctttttccacaagcactagatatgtttctgtgatgattttgagataagtactcaaaattacatagttcatttctaagagaaggccatgttttctacctattgggtttttctaccctgagatactatggcttctttgtaaaggtatataaagtgtttttcaaagcggaaagatactgttaaattcagctgctaatcatagtgtatttgtttggaatgacatgttgagcaggtagtacctttacggctgttgctttttgcagcattatgtggaagtgcctaagtctatttagcctcacagatgactttagaatcttgtattttctacatcagagttcatagcggggatggtgctacatatatctatgcaactgaaaaagaaaacatttcaaacctaaagtacgcaacaagatattatttatatgaaatccatagctcagttatgctatgttcatgaatagagaagttttaagttggaagggaccatggatgacccaaagcagatacatatggtcattcatatacctaaaatacctacaaagacaagttgttccctggtttaaaaggcagtctgttctattgatggactgctttagtccctgaacattttctttggttaaaccaaaaacacataaacctaacttggtcttggcttgatctactgggtaaataataactcttaaatatatatacagttgacccttggacaacacaggagttaagagcgctgaacatttgctcagtggagaatctgcatataacctgactcctcaaaaacttaattagtagttagtttacaattgactggaagccttattgataacataaagcagttgattaacacattttttgtgttgtatgtattatattccgtattcttacaagaaggtaagctagagaaaaaaaaaatgttattaaggaagtaatatattcactattcgttaggtagaagtgaatcatcctaaaggtcttcatcctcatcttcacgctgagtagtctgaggagcaagaggagttggtctttctgtcccagtggcagaggtggaagaaaatccacagatacgtggacctgcgcagttcaaacctgtgttgtttgggtcaactgtattgtaatagcattttaatgtttttctcagacttttacgagtatgaatctgagctttttctgaataaacctgcctgctcaccattaataatgccaaa

SEQ ID NO: 194137 - DNA, 494 bp, Homo sapiens
  Payload ID: 18352
  Gene Name: transmembrane protein 262
  Uniprot ID: E9PQX1
  ENST ID: ENST00000530719
  CDS Start-End: 61-411
ctgggcagggcctgcttgctccagctctcaagtctgacttgcatctacactgcgggcaagatgtggctgcaagaccgcatcgccacgttcttcttcccaaaaggcatgatgctcaccacggctgcgctgatgctcttcttcttacacctgggcatcttcatcagagacgtgcacaacttctgcatcacctaccactatgaccacatgagctttcactacacggtcgtcctgatgttctcccaggtgatcagcatctgctgggctgccatggggtcactctatgctgagatgacagaaaacaagtacgtctgcttctccgccctgaccatcctgatgctcaacggagccatgttcttcaaccgcctgtccttggagtttctggccatcgagtaccgggaggagcaccactgaggcctggggagtcggaacagggctaaggagggggaagcaaaaggctgcctcgggtgttttaataaagttgttgtttatttcca

SEQ ID NO: 194138 - DNA, 436 bp, Homo sapiens
  Payload ID: 18352
  Gene Name: transmembrane protein 262
  ENST ID: ENST00000524603
  CDS Start-End: 118-436
tctgtagactgtgttcacactgcctccgttttgggaaacttgagacatgcataaaagcgtctagaggcctgcttgctccagctctcaagtctgacttgcatctacactgcgggcaagatgtggctgcaagaccgcatcgccacgttcttcttcccaaaaggcatgatgctcaccacggctgcgctgatgctcttcttcttacacctgggcatcttcatcagagacgtgcacaacttctgcatcacctaccactatgaccacatgagctttcactacacggtcgtcctgatgttctcccaggtgatcagcatctgctgggctgccatggggtcactctatgctgagatgacagaaaacaagtacgtctgcttctccgccctgaccatcctgatgctcaacggagccatgttcttcaaccgcctgtccttggagtttc

SEQ ID NO: 194139 - DNA, 396 bp, Homo sapiens
  Payload ID: 18352
  Gene Name: transmembrane protein 262
  ENST ID: ENST00000524632
  CDS Start-End: 1-339
ctgcaagaccgcatcgccacgttcttcttcccaaaaggcatgatgctcaccacggctgcgctgatgctcttcttcttacacctgggcatcttcatcagagacgtgcacaacttctgcatcacctaccactatgaccacatgagctttcactacacggtcgtcctgatgttctcccaggtgatcagcatctgctgggctgccatggggtcactctatgctgagatgacagaaaacaatgctcaacggagccatgttcttcaaccgcctgtccttggagtttctggccatcgagtaccgggaggagcaccactgaggcctggggagtcggaacagggctaaggagggggaagcaaaaggctgcctcgggtgttttaataaagttgttgtttatttcca

SEQ ID NO: 194140 - DNA, 391 bp, Homo sapiens
  Payload ID: 18352
  Gene Name: transmembrane protein 262
  ENST ID: ENST00000525544
  CDS Start-End: 61-391
ctgggcagggcctgcttgctccagctctcaagtctgacttgcatctacactgcgggcaagatgtggctgcaagaccgcatcgccacgttcttcttcccaaaaggcatgatgctcaccacggctgcgctgatgctcttcttcttacacctgggcatcttcatcagagacgtgcacaacttctgcatcacctaccactatgaccacatgagctttcactacacggtcgtcctgatgtgctcaacggagccatgttcttcaaccgcctgtccttggagtttctggccatcgagtaccgggaggagcaccactgaggcctggggagtcggaacagggctaaggagggggaagcaaaaggctgcctcgggtgttttaataaagttgttgtttattt

SEQ ID NO: 194141 - DNA, 3362 bp, Homo sapiens
  Payload ID: 18353
  Gene Name: transmembrane protein 263
  Uniprot ID: Q8WUH6
  ENST ID: ENST00000280756
  CDS Start-End: 419-769
ggaccctgcgagaacgggtgggcgtgtgcccggtgggcgcgggaggggcccgggctgcacgagcgcgcgtgcgcgtcggaactggagccgcgggaggaggcgggagctgaggaggcggcggagggggcgggtcgcgtcgggcgccacgtccgcagccagaggcctccgcctccaccaccgccgccacagtcttccagctccacatcctgagaggacgcctctggagccgcgactgcccggggttgtgccggccgccgctgccgcccaggccgcctcagctctcctctgcgccggcccgctcactccgcccggccccagccctagcgctggccgcgaccccggcgcctttgaaacttctgctggtgtgagtgccctcaggggttccccaggaatatcgatacaacaccaacaggagatcatgaatcagacagataaaaatcaacaagaaatcccatcataccttaatgatgaaccaccagaaggttcaatgaaagatcacccacagcagcagccaggcatgttgtcccgtgtgactgggggtatcttcagtgttacaaagggagctgttggtgccaccattggtggtgtggcttggattggtggaaagagtctggaagtgaccaaaacagctgttacaactgtgccttccatgggaatagggctggtgaaagggggtgtctctgctgtggctggaggtgttacagctgttgggtctgctgttgtaaacaaagtgcccttaacaggaaagaagaaagacaaatctgactgaaatatagagatacacttgcgctccacagcactgtaatgccagtggcattgaattgctaaattatggactacaaccaagtcaactgttttggacgtttatcttctaaactgctgtgttgaaagtattgatgactggctttcatctaaaaagaagagaccaatacgagcacagtatatgaaggtttctcatacttaagttccaggtttttatctggtaaaatgttacacttactcggttgtaactgaagatatggtatgtttgaatatttactataagtctttcagtttgactaaaaatgtgaaagttgaatttagtagatgatcttcacagttccatatgtataatgtgccaggtaactcacctgccccttaagaagggaaccttgaattacataagccgtacctttgatgtgcctaatagtttcagatgtcttagttttttataaccatagttgattaggccaagaggcattcatttcttatttaagctggcaaaattagcaggaattagagaagtttaaaaagataaatggttttatgataatgttaaccatcttttgttagtaaatatgcgttctattattttaatcattgatgccttacaaaagaaaacatcttttctaataccctgaatatgtgctgttcttagaatcatctatggattcttttaaaggttgtttgtgaaattagttttccctttttagaatctcaggagtagtggggtaaagacatttcctgctgtcagtggataagacagagcttgttaactgttttggcagtagttaaaatcaaattgtacacttctcagcctgggttcatgcttcatcattaatacacctcacagtgcctaaggaacatttacttactggtcagaaggtattttggaagagtttcatattaaggaggaacaaataataattttaagttcttaaaaattacctaaaacaccccaaatataaaaagaagccttcacacctattctgtctttaggatgtcttaaattattagcagtactccttttttaaaaacactgtaaaagtaaccacaaatatgtgaggacttactattttaaatggaatggaatgagctccatagattagttttgaatataaagtatataaaagtgcatcagtggtttatataggctttaaaaacatgttatcttacagtcctttaaagcagccatagagtttgtatcatttttcaagccaatttcagtcagggatttgaattgtttgattatggatgataaatgtgtcatatcttattaatatgtctcatgtctcgttccttcttaatatgatttagctggaattcattttcttttcgtttcatgtttaatttcataaaacgtttaacaattggcatatatacttggcattcctgtccaccaaggattgtaatccaagcctgggaaaatcttaaatttctttttacttaaatctggaaatttgtctccattctgccacctttttttttttttttttttatagtggaggggaggaaaggggggtgataccttgcagtaagtaagtcgaaatagcatgcctgaaaatttgaaacagaccattctaacacccaaggcttgtttataaaatacttgagaattacattaatgtggaatcaacagatgcagaagaatataacataacttttaaaagctttcataaataccagcagcaattgtaagcaaatctacaaaggttcttgaacctttctattatatacaaaactgaaaagtcattaaggagttcaactaatcaggaattaaatggtcatttatttcatgcagtatgatttaaggtatttcttgagattctggtcaaatgtcataatcagcaaacgggattaaaaaaaaaactccaaaatcactaaataattatctaaataatggtattggagaacttgtttcctgctatttggaagagattgttgcttcattgctagtttgtatttctaacttctacagttatagactccactgtgctttgtgtctgaatttctcagtatagacattttgtttactgtatgcttgcatatttattttcaactttgtttgtctttaaaattgcttgaggaaaaatggttgtaattaatttctgctacagaaaagccacctggtacgttttgtctcatcaggattgttttaaattctaaactataagtttgttcagaggggcttttgcaatgatagcagaaaactgtacaaatgtacagttagttatagaggttcttgttgaaatgaacttaccatctgatgatatgtatgtacagctgtgtacttgagtcttttttagtttacttagaaagactagcagtttgacctgttaaacaggactagttcaagtcaagaaactaaggttgttgtatacacctggaggcatctgttattcagcttatcctttgagtgggtatttggcacaatgaggataaacttatgtgacccacttgaatggctgatctaataatgttgacattatgcattctgtacttagtgaaatgtcagatgaaaataactgatgaataatttttttgtattaaagggatgggaaaagaacacatgaatttgttaataaagcactatgatctgcaaa

SEQ ID NO: 194142 - DNA, 811 bp, Homo sapiens
  Payload ID: 18353
  Gene Name: transmembrane protein 263
  Uniprot ID: Q8WUH6
  ENST ID: ENST00000547242
  CDS Start-End: 411-761
ctgaggaggcggcggagggggcgggtcgcgtcgggcgccacgtccgcagccagaggcctccgcctccaccaccgccgccacagtcttccagctccacatcctgagaggacgcctctggagccgcgactgcccggggttgtgccggccgccgctgccgcccaggccgcctcagctctcctctgcgccggcccgctcactccgcccggccccagccctagcgctggccgcgaccccggcgcctttgaaacttctgctggtgtgagtgccctcaggggttccccaggaatatcgatacaacaccaacaggctggagtgcagtggcttgatctccactcactgcaacatccgtctcccaggttcaagagattttcctgcctcagcctccctggtagctgggattacaggagatcatgaatcagacagataaaaatcaacaagaaatcccatcataccttaatgatgaaccaccagaaggttcaatgaaagatcacccacagcagcagccaggcatgttgtcccgtgtgactgggggtatcttcagtgttacaaagggagctgttggtgccaccattggtggtgtggcttggattggtggaaagagtctggaagtgaccaaaacagctgttacaactgtgccttccatgggaatagggctggtgaaagggggtgtctctgctgtggctggaggtgttacagctgttgggtctgctgttgtaaacaaagtgcccttaacaggaaagaagaaagacaaatctgactgaaatatagagatacacttgcgctccacagcactgtaatgccagtggcattg

SEQ ID NO: 194143 - DNA, 925 bp, Homo sapiens
  Payload ID: 18353
  Gene Name: transmembrane protein 263
  Uniprot ID: Q8WUH6
  ENST ID: ENST00000550344
  CDS Start-End: 390-740
acgtccgcagccagaggcctccgcctccaccaccgccgccacagtcttccagctccacatcctgagaggacgcctctggagccgcgactgcccggggttgtgccggccgccgctgccgcccaggccgcctcagctctcctctgcgccggcccgctcactccgcccggccccagccctagcgctggccgcgaccccggcgcctttgaaacttctgctggtgtgagtgccctcaggggttccccaggaatatcgatacaacaccaacagtcttgctctgtcgcccaggctggagtgcagtggcttgatctccactcactgcaacatccgtctcccaggttcaagagattttcctgcctcagcctccctggtagctgggattacaggagatcatgaatcagacagataaaaatcaacaagaaatcccatcataccttaatgatgaaccaccagaaggttcaatgaaagatcacccacagcagcagccaggcatgttgtcccgtgtgactgggggtatcttcagtgttacaaagggagctgttggtgccaccattggtggtgtggcttggattggtggaaagagtctggaagtgaccaaaacagctgttacaactgtgccttccatgggaatagggctggtgaaagggggtgtctctgctgtggctggaggtgttacagctgttgggtctgctgttgtaaacaaagtgcccttaacaggaaagaagaaagacaaatctgactgaaatatagagatacacttgcgctccacagcactgtaatgccagtggcattgaattgctaaattatggactacaaccaagtcaactgttttggacgtttatcttctaaactgctgtgttgaaagtattgatgactggctttcatctaaaaagaagagaccaatacgagcacagtatatgaaggtttc

SEQ ID NO: 194144 - DNA, 833 bp, Homo sapiens
  Payload ID: 18353
  Gene Name: transmembrane protein 263
  Uniprot ID: Q8WUH6
  ENST ID: ENST00000547081
  CDS Start-End: 372-722
agtgctgggtgtacaacgtggagcggagggaggaggtgccaagctcagtgctagccacggcgcctccagggtcattttctgcctcctgccacgtcactcactgctaaagaaaaaaaaaagatttgctagtgcctaaagggatcagtagggagagaaggggccacccggaagggtttagaaacacctagagaaaagggaagggttcttaatttgatttttgcgtccttgtgaacactgtgctaattccaaatgaaaatatttgctatatgtgattatttgctgtatgctattgtttagcctttgaaacttctgctggtgtgagtgccctcaggggttccccaggaatatcgatacaacaccaacaggagatcatgaatcagacagataaaaatcaacaagaaatcccatcataccttaatgatgaaccaccagaaggttcaatgaaagatcacccacagcagcagccaggcatgttgtcccgtgtgactgggggtatcttcagtgttacaaagggagctgttggtgccaccattggtggtgtggcttggattggtggaaagagtctggaagtgaccaaaacagctgttacaactgtgccttccatgggaatagggctggtgaaagggggtgtctctgctgtggctggaggtgttacagctgttgggtctgctgttgtaaacaaagtgcccttaacaggaaagaagaaagacaaatctgactgaaatatagagatacacttgcgctccacagcactgtaatgccagtggcattgaattgctaaattatggactacaaccaagtcaactgttttggacgtttatcttctaaactgc

SEQ ID NO: 194145 - DNA, 3349 bp, Homo sapiens
  Payload ID: 18353
  Gene Name: transmembrane protein 263
  Uniprot ID: Q8WUH6
  ENST ID: ENST00000548125
  CDS Start-End: 354-704
gccggaccctgcgagaacgggtgggcgtgtgcccggtgggcgcgggaggggcccgggctgcacgagcgcgcgtgcgcgtcggaactggagccgcgggaggaggcgggagctgaggaggcggcggagggggcgggtcgcgtcgggcgccacgtccgcagccagaggcctccgcctccaccaccgccgccacagtcttccagctccacatcctgagaggacgcctctggagccgcgactgcccggggttgtgccggccgccgctgccgcccaggccgcctcagctctcctctgcgccggcccgctcactccgcccggccccagccctagcgctggccgcgaccccggcggagatcatgaatcagacagataaaaatcaacaagaaatcccatcataccttaatgatgaaccaccagaaggttcaatgaaagatcacccacagcagcagccaggcatgttgtcccgtgtgactgggggtatcttcagtgttacaaagggagctgttggtgccaccattggtggtgtggcttggattggtggaaagagtctggaagtgaccaaaacagctgttacaactgtgccttccatgggaatagggctggtgaaagggggtgtctctgctgtggctggaggtgttacagctgttgggtctgctgttgtaaacaaagtgcccttaacaggaaagaagaaagacaaatctgactgaaatatagagatacacttgcgctccacagcactgtaatgccagtggcattgaattgctaaattatggactacaaccaagtcaactgttttggacgtttatcttctaaactgctgtgttgaaagtattgatgactggctttcatctaaaaagaagagaccaatacgagcacagtatatgaaggtttctcatacttaagttccaggtttttatctggtaaaatgttacacttactcggttgtaactgaagatatggtatgtttgaatatttactataagtctttcagtttgactaaaaatgtgaaagttgaatttagtagatgatcttcacagttccatatgtataatgtgccaggtaactcacctgccccttaagaagggaaccttgaattacataagccgtacctttgatgtgcctaatagtttcagatgtcttagttttttataaccatagttgattaggccaagaggcattcatttcttatttaagctggcaaaattagcaggaattagagaagtttaaaaagataaatggttttatgataatgttaaccatcttttgttagtaaatatgcgttctattattttaatcattgatgccttacaaaagaaaacatcttttctaataccctgaatatgtgctgttcttagaatcatctatggattcttttaaaggttgtttgtgaaattagttttccctttttagaatctcaggagtagtggggtaaagacatttcctgctgtcagtggataagacagagcttgttaactgttttggcagtagttaaaatcaaattgtacacttctcagcctgggttcatgcttcatcattaatacacctcacagtgcctaaggaacatttacttactggtcagaaggtattttggaagagtttcatattaaggaggaacaaataataattttaagttcttaaaaattacctaaaacaccccaaatataaaaagaagccttcacacctattctgtctttaggatgtcttaaattattagcagtactccttttttaaaaacactgtaaaagtaaccacaaatatgtgaggacttactattttaaatggaatggaatgagctccatagattagttttgaatataaagtatataaaagtgcatcagtggtttatataggctttaaaaacatgttatcttacagtcctttaaagcagccatagagtttgtatcatttttcaagccaatttcagtcagggatttgaattgtttgattatggatgataaatgtgtcatatcttattaatatgtctcatgtctcgttccttcttaatatgatttagctggaattcattttcttttcgtttcatgtttaatttcataaaacgtttaacaattggcatatatacttggcattcctgtccaccaaggattgtaatccaagcctgggaaaatcttaaatttctttttacttaaatctggaaatttgtctccattctgccacctttttttttttttttttttatagtggaggggaggaaaggggggtgataccttgcagtaagtaagtcgaaatagcatgcctgaaaatttgaaacagaccattctaacacccaaggcttgtttataaaatacttgagaattacattaatgtggaatcaacagatgcagaagaatataacataacttttaaaagctttcataaataccagcagcaattgtaagcaaatctacaaaggttcttgaacctttctattatatacaaaactgaaaagtcattaaggagttcaactaatcaggaattaaatggtcatttatttcatgcagtatgatttaaggtatttcttgagattctggtcaaatgtcataatcagcaaacgggattaaaaaaaaaactccaaaatcactaaataattatctaaataatggtattggagaacttgtttcctgctatttggaagagattgttgcttcattgctagtttgtatttctaacttctacagttatagactccactgtgctttgtgtctgaatttctcagtatagacattttgtttactgtatgcttgcatatttattttcaactttgtttgtctttaaaattgcttgaggaaaaatggttgtaattaatttctgctacagaaaagccacctggtacgttttgtctcatcaggattgttttaaattctaaactataagtttgttcagaggggcttttgcaatgatagcagaaaactgtacaaatgtacagttagttatagaggttcttgttgaaatgaacttaccatctgatgatatgtatgtacagctgtgtacttgagtcttttttagtttacttagaaagactagcagtttgacctgttaaacaggactagttcaagtcaagaaactaaggttgttgtatacacctggaggcatctgttattcagcttatcctttgagtgggtatttggcacaatgaggataaacttatgtgacccacttgaatggctgatctaataatgttgacattatgcattctgtacttagtgaaatgtcagatgaaaataactgatgaataatttttttgtattaaagggatgggaaaagaacacatgaatttgttaataaagcactatgatctgcaaacgatggaatgtttcataaagatctaaagaaataaaggaaactttaaaacagg

SEQ ID NO: 194146 - DNA, 621 bp, Homo sapiens
  Payload ID: 18353
  Gene Name: transmembrane protein 263
  ENST ID: ENST00000551489
  CDS Start-End: 297-467
gggggcgggtcgcgtcgggcgccacgtccgcagccagaggcctccgcctccaccaccgccgccacagtcttccagctccacatcctgagaggacgcctctggagccgcgactgcccggggttgtgccggccgccgctgccgcccaggccgcctcagctctcctctgcgccggcccgctcactccgcccggccccagccctagcgctggccgcgaccccggcgcctttgaaacttctgctggtgtgagtgccctcaggggttccccaggaatatcgatacaacaccaacaggagatcatgaatcagacagataaaaatcaacaagaaatcccatcataccttaatgatgaaccaccagaagagtcttactctgtcaacccaggctggagtgcaatggcacgatcttggcccactgcaacctccgcttcctgggttcaagcagttctcctgcctcagcctcccaagtagctgggattacaggttcaatgaaagatcacccacagcagcagccaggcatgttgtcccgtgtgactgggggtatcttcagtgttacaaagggagctgttggtgccaccattggtggtgtggcttggattggtggaaagagtctggaagtgaccaa

SEQ ID NO: 194147 - DNA, 1483 bp, Homo sapiens
  Payload ID: 18353
  Gene Name: transmembrane protein 263
  Uniprot ID: Q8WUH6
  ENST ID: ENST00000551813
  CDS Start-End: 183-533
tttattaaatgccgcagtttgaagtaggagagaaacaagatgaagactagttgtatagtgggtacaaaatgttgtttatctgaataatgttgatgaaatcgcaatttagcatgtgataagaggtagtctcacatgttgaggttaaaatgaaatgtgtttgtatgttttttttttaggagatcatgaatcagacagataaaaatcaacaagaaatcccatcataccttaatgatgaaccaccagaaggttcaatgaaagatcacccacagcagcagccaggcatgttgtcccgtgtgactgggggtatcttcagtgttacaaagggagctgttggtgccaccattggtggtgtggcttggattggtggaaagagtctggaagtgaccaaaacagctgttacaactgtgccttccatgggaatagggctggtgaaagggggtgtctctgctgtggctggaggtgttacagctgttgggtctgctgttgtaaacaaagtgcccttaacaggaaagaagaaagacaaatctgactgaaatatagagatacacttgcgctccacagcactgtaatgccagtggcattgaattgctaaattatggactacaaccaagtcaactgttttggacgtttatcttctaaactgctgtgttgaaagtattgatgactggctttcatctaaaaagaagagaccaatacgagcacagtatatgaaggtttctcatacttaagttccaggtttttatctggtaaaatgttacacttactcggttgtaactgaagatatggtatgtttgaatatttactataagtctttcagtttgactaaaaatgtgaaagttgaatttagtagatgatcttcacagttccatatgtataatgtgccaggtaactcacctgccccttaagaagggaaccttgaattacataagccgtacctttgatgtgcctaatagtttcagatgtcttagttttttataaccatagttgattaggccaagaggcattcatttcttatttaagctggcaaaattagcaggaattagagaagtttaaaaagataaatggttttatgataatgttaaccatcttttgttagtaaatatgcgttctattattttaatcattgatgccttacaaaagaaaacatcttttctaataccctgaatatgtgctgttcttagaatcatctatggattcttttaaaggttgtttgtgaaattagttttccctttttagaatctcaggagtagtggggtaaagacatttcctgctgtcagtggataagacagagcttgttaactgttttggcagtagttaaaatcaaattgtacacttctcagcctgggttcatgcttcatcattaatacacctcacagtgcctaaggaacatttacttactggtcagaaggtattttggaagagtttcatattaaggaggaacaaataataattttaagttcttaaaaattacctaaaacacccc

SEQ ID NO: 194148 - DNA, 995 bp, Homo sapiens
  Payload ID: 18354
  Gene Name: transmembrane protein 265
  Uniprot ID: A0A087WTH1
  ENST ID: ENST00000615541
  CDS Start-End: 331-657
agacgttcctcggagctctttgatgcctcagacctttcccttttatccctcttgctcaggtgcttcctttcacaactttttccagagggcaggcgtcctagctccagttgctccatcccttgggccctcccctgctcttcatctagccaaactggtttgagtcagccacaccccttcccagctccctgggctcttcacgtggtggctggccactcaaccccacccctgggcttggcttggagccctgagtcagctccatcaccacccaagccaaaccaaagctgaggcaggagccgaaactcagagtccttcaaggcctatagccaggtgatggaggacgaggagaaggcagtggagatcttgggcaacacggaagctgctcatcctccatcccccatccgctgctgctggctccgcctccgctgcttggcagctactagcattatctgtggctgctcttgcctgggagtcatggctctggtgtttgccatcaaggcggaagagcggcataaagcaggccggtccgaggaggcagtgcgctggggggcccgggcccggaaactcatcctggccagctttgctgtctggcttgctgtcctcattctgggtcccctgctgctgtggttgctctcctacgccatcgctcaggctgagtgaccctggatggcctctgctgagagccagccgagacctcctggatcctgcaatgcggcattgctaaggtcctgtgacagcagtggttggaaggatcctggttggaaggatggggactctctcaaggggctttggaagagctcttctagccctttataaaaggagggcagcagctgagactgatgagaggagggcagcctgctctgttctttcagggccccccacccccatctcccctaccctagcccaccctagggcctctacccagcgggaggggttgaagaccaggcctggttttattagaattcattttgtaataaaagccttttttagtggtgaaa

SEQ ID NO: 194149 - DNA, 2520 bp, Homo sapiens
  Payload ID: 18355
  Gene Name: transmembrane protein 266
  Uniprot ID: Q2M3C6
  ENST ID: ENST00000388942
  CDS Start-End: 277-1872
cgcgggctcggccaagccgccggcgcgaggcctcgcgcgcgcccccgagcgcggtgggcggaggggcggagggagcggcggggccgcgagggggcgggggggcggagaggggagccccgggagcgcgagccgcggccggcgccgctgcagagccgagcgaatcccgagcccgggcagcagggcactatatttgtatgtgtcttgtagaacccacgcttggaaatgctgacagcaggcttcaggacagctgagccccactaaacaccaagaaaacccatggctgtggctccatctttcaacatgaccaatccacagcctgccatagaaggaggaatttctgaagttgagatcatctcccaacaagtagacgaagaaaccaagagcattgctcctgtgcagctggtgaactttgcctatcgggacttgcccctggctgctgtcgatctctccacggcgggctcgcagctcctgtcaaatctggacgaagattaccaaagagaagggtctaactggctgaagccgtgctgtgggaagagagcagccgtgtggcaggtatttttgctcagtgcaagtctcaacagtttcctggtagcctgtgtaatattggtggtgattctcctgactctggaacttctaatagatataaagcttctccagttttccagcgcattccagtttgctggcgtgattcactggatcagcctggtcattctgtccgtgttcttctcagagactgttctacggattgtggtgcttgggatctgggattacatcgaaaacaaaatagaggtgtttgacggggctgtgatcatcctatctttggctccgatggtggcatccactgtggccaatggacccaggagcccctgggacgccatcagcctcatcatcatgctccggatctggagggtgaagagggtcattgatgcctacgtcctgccagtgaagctggagatggagatggttatccagcagtacgagaaggccaaggtcatccaagacgagcagctggagaggctgacgcagatctgtcaggagcaagggtttgagatccggcagctgcgcgcgcacctggcgcagcaggacctggacctggctgccgagcgcgaagcggcgctccaggccccgcacgtgctcagccagccgcgcagccgcttcaaagtgttggaggccggcacgtgggacgaggagacggcggccgagagcgtcgtggaggagctgcagccctcgcaagaagccacgatgaaggacgacatgaacagctacatcagtcagtattacaatgggcccagcagtgacagcggtgtcccagagccagctgtgtgtatggtcaccacggccgcaatagacattcaccagcccaacatctcctcggacctcttctctctggacatgcccctcaaactcggcggtaatggcaccagcgccacctcggagagtgcctcccgcagctcagtcacccgggcccagagtgacagcagccagacgctgggctcctccatggactgcagcactgcccgcgaggagccgtcctctgagcccggcccttctcccccgccgctgccatcccagcagcaggtggaggaggccacagtccaggacctgctgtcctccctgtcggaggacccctgcccttcccagaaggccttggacccagcccccctcgcccggcccagcccagcgggctcggcccaaaccagccccgagctggaacacagggtaagtctgttcaaccagaagaaccaggagggcttcactgtctttcagatcaggcctgtcatccacttccagcccactgtgcccatgctggaggacaagttcagatctttggaatccaaagagcaaaagctgcacagggtccctgaggcctagagcctgccatgggctgggtgagatgaggggagacagccatctcaaagctctcctgggaccctggaggctgccaagggccacacgcggggcccaggagcccacctggcctccctcagggtgctgcctgcctccagggaggcgacgccaggccaggaggccacaagcttcagacctcaaagcccagagctggcgcctcttctcgccctgctcaggggagggtggtgctcgtggctgggttttctttttaaccatttttacaaaaaccagcctgtggcccagcttcagcagggtagagtgtgggggggccagctcagcctcttgcgttgccttcgttcctgacgcccaccctggactctagggaacagcactgtgagcaggggctgtccagccccacccctaagccgtctttcccaggaatcctgggtggagtccaacacaatcacacggagaccaccatctgagcctatgtcatttgtcctcattctcattccagcatgagcgtttctgagtctcttcaagacgaatctagttttcaccttcacaggatataaagggatcaacctagaggtgggtgggagggtcctagagggcaggggaacaaccattttccaaccttggctttaataataaaaaccagctgcactgaga

SEQ ID NO: 194150 - DNA, 2292 bp, Homo sapiens
  Payload ID: 18355
  Gene Name: transmembrane protein 266
  ENST ID: ENST00000484722
  CDS Start-End: 156-461
agcgcgagccgcggccggcgccgctgcagagccgagcgaatcccgagcccgggcagcagggcactatatttgtatgtgtcttgtagaacccacgcttggaaatgctgacagcaggcttcaggacagctgagccccactaaacaccaagaaaacccatggctgtggctccatctttcaacatgaccaatccacagcctgccatagaaggaggaatttctgaagttgagatcatctcccaacaagtagacgaagaaaccaagagcattgctcctgtgcagctggtgaactttgcctatcgggacttgcccctggctgctgtcgatctctccacggcgggctcgcagctcctgtcaaatctggacgaagattaccaaagagaagggtctaactggctgaagccgtgctgtgggaagagagcagccgtgtggcagtttccagcgcattccagtttgctggcgtgattcactggatcagcctggtcattctgtccgtgttcttctcagagactgttctacggattgtggtgcttgggatctgggattacatcgaaaacaaaatagaggtgtttgacggggctgtgatcatcctatctttggctccgatggtggcatccactgtggccaatggacccaggagcccctgggacgccatcagcctcatcatcatgctccggatctggagggtgaagagggtcattgatgcctacgtcctgccagtgaagctggagatggagatggttatccagcagtacgagaaggccaaggtcatccaagacgagcagctggagaggctgacgcagatctgtcaggagcaagggtttgagatccggcagctgcgcgcgcacctggcgcagcaggacctggacctggctgccgagcgcgaagcggcgctccaggccccgcacgtgctcagccagccgcgcagccgcttcaaagtgttggaggccggcacgtgggacgaggagacggcggccgagagcgtcgtggaggagctgcagccctcgcaagaagccacgatgaaggacgacatgaacagctacatcagtcagtattacaatgggcccagcagtgacagcggtgtcccagagccagctgtgtgtatggtcaccacggccgcaatagacattcaccagcccaacatctcctcggacctcttctctctggacatgcccctcaaactcggcggtaatggcaccagcgccacctcggagagtgcctcccgcagctcagtcacccgggcccagagtgacagcagccagacgctgggctcctccatggactgcagcactgcccgcgaggagccgtcctctgagcccggcccttctcccccgccgctgccatcccagcagcaggtggaggaggccacagtccaggacctgctgtcctccctgtcggaggacccctgcccttcccagaaggccttggacccagcccccctcgcccggcccagcccagcgggctcggcccaaaccagccccgagctggaacacagggtaagtctgttcaaccagaagaaccaggagggcttcactgtctttcagatcaggcctgtcatccacttccagcccactgtgcccatgctggaggacaagttcagatctttggaatccaaagagcaaaagctgcacagggtccctgaggcctagagcctgccatgggctgggtgagatgaggggagacagccatctcaaagctctcctgggaccctggaggctgccaagggccacacgcggggcccaggagcccacctggcctccctcagggtgctgcctgcctccagggaggcgacgccaggccaggaggccacaagcttcagacctcaaagcccagagctggcgcctcttctcgccctgctcaggggagggtggtgctcgtggctgggttttctttttaaccatttttacaaaaaccagcctgtggcccagcttcagcagggtagagtgtgggggggccagctcagcctcttgcgttgccttcgttcctgacgcccaccctggactctagggaacagcactgtgagcaggggctgtccagccccacccctaagccgtctttcccaggaatcctgggtggagtccaacacaatcacacggagaccaccatctgagcctatgtcatttgtcctcattctcattccagcatgagcgtttctgagtctcttcaagacgaatctagttttcaccttcacaggatataaagggatcaacctagaggtgggtgggagggtcctagagggcaggggaacaaccattttccaaccttggctttaataataaaaaccagctgcactgag

SEQ ID NO: 194151 - DNA, 1762 bp, Homo sapiens
  Payload ID: 18355
  Gene Name: transmembrane protein 266
  ENST ID: ENST00000561302
  CDS Start-End: 129-494
agagccgagcgaatcccgagcccgggcagcagggcactatatttgtatgtgtcttgtagaacccacgcttggaaatgctgacagcaggcttcaggacagctgagccccactaaacaccaagaaaacccatggctgtggctccatctttcaacatgaccaatccacagcctgccatagaaggaggaatttctgaagttgagatcatctcccaacaagtagacgaagaaaccaagagcattgctcctgtgcagctggtgaactttgcctatcgggacttgcccctggctgctgtcgatctctccacggcgggctcgcagctcctgtcaaatctggacgaagattaccaaagagaaggtttccagcgcattccagtttgctggcgtgattcactggatcagcctggtcattctgtccgtgttcttctcagagactgttctacggattgtggtgcttgggatctgggattacatcgaaaacaaaatagaggtgtttgacggggctgtgatcatcctatctttggctccgatggtggcatccactgtggccaatggacccaggagcccctgggacgccatcagcctcatcatcatgctccggatctggagggtgaagagggtcattgatgcctacgtcctgccagtgaagctggagatggagatggttatccagcagtacgagaaggccaaggtcatccaagacgagcagctggagaggctgacgcagatctgtcaggagcaagggtttgagatccggcagctgcgcgcgcacctggcgcagcaggacctggacctggctgccgagcgcgaagcggcgctccaggccccgcacgtgctcagccagccgcgcagccgcttcaaagtgttggaggccggcacgtgggacgaggagacggcggccgagagcgtcgtggaggagctgcagccctcgcaagaagccacgatgaaggacgacatgaacagctacatcagtcagtattacaatgggcccagcagtgacagcggtgtcccagagccagctgtgtgtatggtcaccacggccgcaatagacattcaccagcccaacatctcctcggacctcttctctctggacatgcccctcaaactcggcggtaatggcaccagcgccacctcggagagtgcctcccgcagctcagtcacccgggcccagagtgacagcagccagacgctgggctcctccatggactgcagcactgcccgcgaggagccgtcctctgagcccggcccttctcccccgccgctgccatcccagcagcaggtggaggaggccacagtccaggacctgctgtcctccctgtcggaggacccctgcccttcccagaaggccttggacccagcccccctcgcccggcccagcccagcgggctcggcccaaaccagccccgagctggaacacaggatggagtctcgttctgtcaccctggctggactgcagtggcgcgatctcggctcactgcagcctccgcctcctggattcacgccattcttctgcctcagcctcccaagtagctgggaccacaggcgcccgccaccatgcccagctaattttttgtatttttagtagagatggggtttcatcgtgttagccaggatggtctcgatctcctgacctcaggtgatctgcccgcctcggcctcccaaagtgctgggattgcacgtggcctcaaccatattactgtgtattagttcagaaagtgctttcattagattcatttgatttaacaatcaaatcttgaattccttca

SEQ ID NO: 194152 - DNA, 1578 bp, Homo sapiens
  Payload ID: 18356
  Gene Name: transmembrane protein 27
  Uniprot ID: Q9HBJ8
  ENST ID: ENST00000380342
  CDS Start-End: 257-925
cttttgaggtagagtcagagtagggaaaacaactaatctgttttccaaacaggttttcataaataactgacaggagatgggctgtttttatggaagtattaacccaaatgatgggtgttaatcattaaacctttttggtggtggctcgcttgtttctctgatattctaatccgggtcacagaatggctaaggcagatttaagtgcagcgtggattttttttttctcactttgccttgtgttttccaccctgaaagaatgttgtggctgctcttttttctggtgactgccattcatgctgaactctgtcaaccaggtgcagaaaatgcttttaaagtgagacttagtatcagaacagctctgggagataaagcatatgcctgggataccaatgaagaatacctcttcaaagcgatggtagctttctccatgagaaaagttcccaacagagaagcaacagaaatttcccatgtcctactttgcaatgtaacccagagggtatcattctggtttgtggttacagacccttcaaaaaatcacacccttcctgctgttgaggtgcaatcagccataagaatgaacaagaaccggatcaacaatgccttctttctaaatgaccaaactctggaatttttaaaaatcccttccacacttgcaccacccatggacccatctgtgcccatctggattattatatttggtgtgatattttgcatcatcatagttgcaattgcactactgattttatcagggatctggcaacgtagaagaaagaacaaagaaccatctgaagtggatgacgctgaagataagtgtgaaaacatgatcacaattgaaaatggcatcccctctgatcccctggacatgaagggagggcatattaatgatgccttcatgacagaggatgagaggctcacccctctctgaagggctgttgttctgcttcctcaagaaattaaacatttgtttctgtgtgactgctgagcatcctgaaataccaagagcagatcatatattttgtttcaccattcttcttttgtaataaattttgaatgtgcttgaaagtgaaaagcaatcaattatacccaccaacaccactgaaatcataagctattcacgactcaaaatattctaaaatatttttctgacagtatagtgtataaatgtggtcatgtggtatttgtagttattgatttaagcatttttagaaataagatcaggcatatgtatatattttcacacttcaaagacctaaggaaaaataaattttccagtggagaatacatataatatggtgtagaaatcattgaaaatggatcctttttgacgatcacttatatcactctgtatatgactaagtaaacaaaagtgagaagtaattattgtaaatggatggataaaaatggaattactcatatacagggtggaattttatcctgttatcacaccaacagttgattatatattttctgaatatcagcccctaataggacaattctatttgttgaccatttctacaatttgtaaaagtccaatctgtgctaacttaataaagtaataatcatctctttttgattgtg

SEQ ID NO: 194153 - DNA, 4594 bp, Homo sapiens
  Payload ID: 18357
  Gene Name: transmembrane protein 30A
  Uniprot ID: Q9NV96
  ENST ID: ENST00000230461
  CDS Start-End: 331-1416
cccgtcacaggacagatgatcagggtgcgtccgccttttcgttcccgcttctatcctcctcccctttcccctccccatgtccctccttcttctccctcctccctctctccctccctctggcgtctccagccgactttcgcttcccgtcagcagcctttggcggaagagtgtcccgcctcttccgctctacagcggaggtggctgtggcggtggcgctggtggctgcggcggcggcggcggcagcggcgctcgagcggttcctgtcagggtcagccggcgggccccctgggtggtccacctgcaaatcgcggagcggcgccccagggatcgatggcgatgaactataacgcgaaggatgaagtggacggtgggcccccgtgtgctccggggggcaccgcgaagactcggagaccggataacacggccttcaaacagcaacggctgccagcttggcagcccatccttacggctggcacggtgctacctattttcttcatcatcggtctcatcttcattcccatcggcattggcatttttgtcacctccaacaacatccgcgagatcgagattgattataccggaacagagccttccagtccctgtaataaatgtttatctccggatgtgacaccttgcttttgtaccattaacttcacactggaaaagtcatttgagggcaacgtgtttatgtattatggactgtctaatttctatcaaaaccatcgtcgttacgtgaaatctcgagatgatagtcaactaaatggagattctagtgctttgcttaatcccagtaaggaatgtgaaccttatcgaagaaatgaagacaaaccaattgctccttgtggagctattgccaacagcatgtttaatgatacattagaattgtttctcattggcaatgattcttatcctatacctatcgctttgaaaaagaaaggtattgcttggtggacagataaaaatgtgaaattcagaaatccccctggaggagacaacctggaagaacgatttaaaggtacaacaaagcctgtgaactggcttaaaccagtttacatgctggattctgacccagataataatggattcataaatgaggattttattgtttggatgcgtactgcagcattacctacttttcgcaagttgtatcgtcttatagaaaggaaaagtgatttacatccaacattaccagctggccgatactctttgaatgtcacatacaattaccctgtacattattttgatggacgaaaacggatgatcttgagcactatttcatggatgggaggaaaaaatccatttttggggattgcttacatcgctgttggatccatctccttccttctgggagttgtactgctagtaattaatcataaatatagaaacagtagtaatacagctgacattaccatttaattttatattatgaaagcaaatcatctgcatgtgcatcaaggccagtcctattcaacctagctttcgaatgctgatatctggttagtatgtcattttgaagttggcacataacttttctaaaaaaaagcagtctttgttgtttgcttcttccctacggatgacttctaaaaatatatgacgggtataaaaaaattagctatattgatcatatcaacactgtaactgctgaaatggcattctaatgtttgctttttattcggacaggccacatgatgcatagagcctctttcatgtgacttgtgtctactgcttaaatctttatgctgtgttgatgatattatattgacatatgaagctgtatatgtgtatgtattttgtggagaaagggattacaagatgtatgagtataatgacttgctaacctttcaggattcagagaaagatgaagaaagaccatatctaaataatacacttcatcattttcatgtgtataaatgcttaaagtaccatctttgttgaggtggttcatgtatccagtttatccagtacagttatttgtcaagcttagctttgatttcaaaggacacgcttaccttgtctggcataagaattaatgctcatgtctgcagtggttgggtaggtcctgcttaggagaattaaaaaattcctctttccgtttggttgaatgttgcagtcaggaaccccaactcacttggaatgtttttatatgtaatcatttcccttgaagcttatactttataagggaagaaagaattcaggtgatatgggaaaactgcttggcagaccttcatcttctgcctcaactgtaaaccacatgtaagtgcttaatggagactgttttcattcttgtgatatttaacattcagaaaattacttcagctttggaaatactcaggctgtttttattctgcaggtaagtgttttgacttaagtactaatattccagaaatttttgaaagcagtaaccttaatttcctatgtatttcattccacttttgcatataggtcaaatagcaatgtgtatgcacattctctttagttaaggcaccaattgttttggttggttttcctaagacatactttaaaaagatgttctataaatttcctaattaaattatggggattttggagtatgtacatgataaattataatatgtatatggttgaagttattttattttttactaatgaattattttaatattccttattgaataaatgctgtaacttgtttgctatggaacttattcttaaagttctagttaaaaataatttttccacatgcatgaaaatatgtattaatcagaggtggcttaattacattgaaattgcttttttgttgttgtttttttactgaaataactcatgtttgtgtagaagaatgcctgtttactcagagtttatattttccttcagttatattttaaatcaaaaggtctgggtaatgtatacttttgattaatatatactttttttaaaaaacaaaaaacaatgtaatggttaatagtagaaatgtgccacacttttcaagttttatataacatatgaaattcagttaaaagaatgtgtgtttcataatgacttttaactggtaaaaatattacttgcacgaagtacttgatgtatggttatcctgaaatttcggagtatttggtgtgttctttgtctaaaaatagtctgttttgtcagtccttcagaatattatttattctgaagattgtccctcttgcacttggcagtttattttcggggatacattgttgggggagaggggtttctgccactctttccagattgagtctgtgctgtttaaggaggactaccatcctgcaactctttttctaactggggcacagaggatgtcgctaaagaaaagttgaagagccctttcagcactttctcatctgtggagaagatggaatcttaaaatacatttggagttttatctgttttacaagtccattgatggcctaagttcctcctgttttctgctgtttgatctctaaggaactcctgttgctaaatatgaagagtatggaacattcgtatagtctctgtgaagcatggggggagggaagacatttctttttcttataggctttatgctcaaatgtcatagtctcctttcaaagaattgtgttgcattttaaatgcacccagcttaagtagaagacattgaaggatgcattaattttcaggaactattttgaattatgaaaagattcccaattgaaaaaattattcaacaagtaaaagctaagaaatttcattgaaatcataaggcagtttaagcataaattgataaaaatagctgtgtactactaattaatagaaaatcattcaaccaagagaagagtcaagtgaatatcgtttgtttatttgctagtgagtttctttgtaacgttgattttattaaatgataatatttggttagtatgtcctatgttaataaaaatgaacaaaattaattttgctatgttcaggtgtcttgataaaataacaatgctccagtgttgttgcttacatttagcactaaattttaacacagcgtcagtgagtccaggttttaacttcttcatgcctggatgggataaaatgtaattcattgttaaattaattcatatttgtatttattaatcactgtgacaacattaaccatttgttcttaccaggaagtggtcagattatcatctgagttacagttagactggctaagtttggtattagatcaaggggaatgtccagtaaacagagaggtaagcatgatggaaataatgaagtggggtacacaggaaaaacctgactagtgaggaggagcagctgagagatagggtcagtgaatgcggttcagcctgctacctctcctgtcttcatagaaccattgccttagaattattgtatgacacattttttgttggttaagctgtaaggttttgttctttgtgaacatgggtattttgaggggagggtggagggagtagggaagtggtccttttacaagaattttgatgcataagtgtctattgtagggtttggatgatctagtaaagtgttttagaacccctttttatcccatgcaccattcagtaaacataaaaatcacaattctgctaatgtcatttggaacttcaaaataaatatcttgtctaaaaacaaa

SEQ ID NO: 194154 - DNA, 3775 bp, Homo sapiens
  Payload ID: 18357
  Gene Name: transmembrane protein 30A
  Uniprot ID: Q9NV96
  ENST ID: ENST00000370050
  CDS Start-End: 558-1286
acactggctaccatgggtttatggagaggaagaacccatctctccctttggtttctgaagtgggaggtggagccctgcatccttccaaaactcacaatggacagttccacaaaacttggaaacaattccagcaattgccagggtaattgtatttttaaaatgagatgatgtgtgttagataatcagtgccatgaagaaaagtcagcatagagacagaggacctctcagaaacgcagtctttactttctgcagaaagggcgctccttgaagatggaacaatggtgagagcacacttgaacaaaggaaaagcaacatatttatcccttatgcatttggatcatccttactgtcgtatcctgcatccattggctggagctggacctcacagttttaaactgatacccgatttgctaataacctaaaactttcctaaatagattgattataccggaacagagccttccagtccctgtaataaatgtttatctccggatgtgacaccttgcttttgtaccattaacttcacactggaaaagtcatttgagggcaacgtgtttatgtattatggactgtctaatttctatcaaaaccatcgtcgttacgtgaaatctcgagatgatagtcaactaaatggagattctagtgctttgcttaatcccagtaaggaatgtgaaccttatcgaagaaatgaagacaaaccaattgctccttgtggagctattgccaacagcatgtttaatgatacattagaattgtttctcattggcaatgattcttatcctatacctatcgctttgaaaaagaaaggtattgcttggtggacagataaaaatgtgaaattcagaaatccccctggaggagacaacctggaagaacgatttaaaggtacaacaaagcctgtgaactggcttaaaccagtttacatgctggattctgacccagataataatggattcataaatgaggattttattgtttggatgcgtactgcagcattacctacttttcgcaagttgtatcgtcttatagaaaggaaaagtgatttacatccaacattaccagctggccgatactctttgaatgtcacatacaattaccctgtacattattttgatggacgaaaacggatgatcttgagcactatttcatggatgggaggaaaaaatccatttttggggattgcttacatcgctgttggatccatctccttccttctgggagttgtactgctagtaattaatcataaatatagaaacagtagtaatacagctgacattaccatttaattttatattatgaaagcaaatcatctgcatgtgcatcaaggccagtcctattcaacctagctttcgaatgctgatatctggttagtatgtcattttgaagttggcacataacttttctaaaaaaaagcagtctttgttgtttgcttcttccctacggatgacttctaaaaatatatgacgggtataaaaaaattagctatattgatcatatcaacactgtaactgctgaaatggcattctaatgtttgctttttattcggacaggccacatgatgcatagagcctctttcatgtgacttgtgtctactgcttaaatctttatgctgtgttgatgatattatattgacatatgaagctgtatatgtgtatgtattttgtggagaaagggattacaagatgtatgagtataatgacttgctaacctttcaggattcagagaaagatgaagaaagaccatatctaaataatacacttcatcattttcatgtgtataaatgcttaaagtaccatctttgttgaggtggttcatgtatccagtttatccagtacagttatttgtcaagcttagctttgatttcaaaggacacgcttaccttgtctggcataagaattaatgctcatgtctgcagtggttgggtaggtcctgcttaggagaattaaaaaattcctctttccgtttggttgaatgttgcagtcaggaaccccaactcacttggaatgtttttatatgtaatcatttcccttgaagcttatactttataagggaagaaagaattcaggtgatatgggaaaactgcttggcagaccttcatcttctgcctcaactgtaaaccacatgtaagtgcttaatggagactgttttcattcttgtgatatttaacattcagaaaattacttcagctttggaaatactcaggctgtttttattctgcaggtaagtgttttgacttaagtactaatattccagaaatttttgaaagcagtaaccttaatttcctatgtatttcattccacttttgcatataggtcaaatagcaatgtgtatgcacattctctttagttaaggcaccaattgttttggttggttttcctaagacatactttaaaaagatgttctataaatttcctaattaaattatggggattttggagtatgtacatgataaattataatatgtatatggttgaagttattttattttttactaatgaattattttaatattccttattgaataaatgctgtaacttgtttgctatggaacttattcttaaagttctagttaaaaataatttttccacatgcatgaaaatatgtattaatcagaggtggcttaattacattgaaattgcttttttgttgttgtttttttactgaaataactcatgtttgtgtagaagaatgcctgtttactcagagtttatattttccttcagttatattttaaatcaaaaggtctgggtaatgtatacttttgattaatatatactttttttaaaaaacaaaaaacaatgtaatggttaatagtagaaatgtgccacacttttcaagttttatataacatatgaaattcagttaaaagaatgtgtgtttcataatgacttttaactggtaaaaatattacttgcacgaagtacttgatgtatggttatcctgaaatttcggagtatttggtgtgttctttgtctaaaaatagtctgttttgtcagtccttcagaatattatttattctgaagattgtccctcttgcacttggcagtttattttcggggatacattgttgggggagaggggtttctgccactctttccagattgagtctgtgctgtttaaggaggactaccatcctgcaactctttttctaactggggcacagaggatgtcgctaaagaaaagttgaagagccctttcagcactttctcatctgtggagaagatggaatcttaaaatacatttggagttttatctgttttacaagtccattgatggcctaagttcctcctgttttctgctgtttgatctctaaggaactcctgttgctaaatatgaagagtatggaacattcgtatagtctctgtgaagcatggggggagggaagacatttctttttcttataggctttatgctcaaatgtcatagtctcctttcaaagaattgtgttgcattttaaatgcacccagcttaagtagaagacattgaaggatgcattaattttcaggaactattttgaattatgaaaagattcccaattgaaaaaattattcaacaagtaaaagctaagaaatttcattgaaatcataaggcagtttaagcataaattgataaaaatagctgtgtactactaattaatagaaaatcattcaaccaagagaagagtcaagtgaatatcgtttgtttatttgctagtgagtttctttgtaacgttgattttattaaatgataatatttggttagtatgtcctatgttaataaaaatgaacaaaattaa

SEQ ID NO: 194155 - DNA, 445 bp, Homo sapiens
  Payload ID: 18357
  Gene Name: transmembrane protein 30A
  ENST ID: ENST00000518161
  CDS Start-End: 213-445
agttgactggctgacctcgcgccgtccaccacccccttccctctgtttctctgttttttctttctctttctgcgggtttcctgaatttgcagattgattataccggaacagagccttccagtccctgtaataaatgtttatctccggatgtgacaccttgcttttgtaccattaacttcacactggaaaagtcatttgagggcaacgtgtttatgtattatggactgtctaatttctatcaaaaccatcgtcgttacgtgaaatctcgagatgatagtcaactaaatggagattctagtgctttgcttaatcccagtaaggaatgtgaaccttatcgaagaaatgaagacaaaccaattgctccttgtggagctattgccaacagcatgtttaatgatacattagaattgtttctcattggcaatgattcttatcctatacctat

SEQ ID NO: 194156 - DNA, 2791 bp, Homo sapiens
  Payload ID: 18357
  Gene Name: transmembrane protein 30A
  Uniprot ID: Q9NV96
  ENST ID: ENST00000475111
  CDS Start-End: 311-1288
cagggtgcgtccgccttttcgttcccgcttctatcctcctcccctttcccctccccatgtccctccttcttctccctcctccctctctccctccctctggcgtctccagccgactttcgcttcccgtcagcagcctttggcggaagagtgtcccgcctcttccgctctacagcggaggtggctgtggcggtggcgctggtggctgcggcggcggcggcggcagcggcgctcgagcggttcctgtcagggtcagccggcgggccccctgggtggtccacctgcaaatcgcggagcggcgccccagggatcgatggcgatgaactataacgcgaaggatgaagtggacggtgggcccccgtgtgctccggggggcaccgcgaagactcggagaccggataacacggccttcaaacagcaacggctgccagcttggcagcccatccttacggctggcacggtgctacctattttcttcatcatcggtctcatcttcattcccatcggcattggcatttttgtcacctccaacaacatccgcgagatcgagggcaacgtgtttatgtattatggactgtctaatttctatcaaaaccatcgtcgttacgtgaaatctcgagatgatagtcaactaaatggagattctagtgctttgcttaatcccagtaaggaatgtgaaccttatcgaagaaatgaagacaaaccaattgctccttgtggagctattgccaacagcatgtttaatgatacattagaattgtttctcattggcaatgattcttatcctatacctatcgctttgaaaaagaaaggtattgcttggtggacagataaaaatgtgaaattcagaaatccccctggaggagacaacctggaagaacgatttaaaggtacaacaaagcctgtgaactggcttaaaccagtttacatgctggattctgacccagataataatggattcataaatgaggattttattgtttggatgcgtactgcagcattacctacttttcgcaagttgtatcgtcttatagaaaggaaaagtgatttacatccaacattaccagctggccgatactctttgaatgtcacatacaattaccctgtacattattttgatggacgaaaacggatgatcttgagcactatttcatggatgggaggaaaaaatccatttttggggattgcttacatcgctgttggatccatctccttccttctgggagttgtactgctagtaattaatcataaatatagaaacagtagtaatacagctgacattaccatttaattttatattatgaaagcaaatcatctgcatgtgcatcaaggccagtcctattcaacctagctttcgaatgctgatatctggttagtatgtcattttgaagttggcacataacttttctaaaaaaaagcagtctttgttgtttgcttcttccctacggatgacttctaaaaatatatgacgggtataaaaaaattagctatattgatcatatcaacactgtaactgctgaaatggcattctaatgtttgctttttattcggacaggccacatgatgcatagagcctctttcatgtgacttgtgtctactgcttaaatctttatgctgtgttgatgatattatattgacatatgaagctgtatatgtgtatgtattttgtggagaaagggattacaagatgtatgagtataatgacttgctaacctttcaggattcagagaaagatgaagaaagaccatatctaaataatacacttcatcattttcatgtgtataaatgcttaaagtaccatctttgttgaggtggttcatgtatccagtttatccagtacagttatttgtcaagcttagctttgatttcaaaggacacgcttaccttgtctggcataagaattaatgctcatgtctgcagtggttgggtaggtcctgcttaggagaattaaaaaattcctctttccgtttggttgaatgttgcagtcaggaaccccaactcacttggaatgtttttatatgtaatcatttcccttgaagcttatactttataagggaagaaagaattcaggtgatatgggaaaactgcttggcagaccttcatcttctgcctcaactgtaaaccacatgtaagtgcttaatggagactgttttcattcttgtgatatttaacattcagaaaattacttcagctttggaaatactcaggctgtttttattctgcaggtaagtgttttgacttaagtactaatattccagaaatttttgaaagcagtaaccttaatttcctatgtatttcattccacttttgcatataggtcaaatagcaatgtgtatgcacattctctttagttaaggcaccaattgttttggttggttttcctaagacatactttaaaaagatgttctataaatttcctaattaaattatggggattttggagtatgtacatgataaattataatatgtatatggttgaagttattttattttttactaatgaattattttaatattccttattgaataaatgctgtaacttgtttgctatggaacttattcttaaagttctagttaaaaataatttttccacatgcatgaaaatatgtattaatcagaggtggcttaattacattgaaattgcttttttgttgttgtttttttactgaaataactcatgtttgtgtagaagaatgcctgtttactcagagtttatattttccttcagttatattttaaatcaaaaggtctgggtaatgtatacttttgattaatatatactttttttaaaaaa

SEQ ID NO: 194157 - DNA, 4471 bp, Homo sapiens
  Payload ID: 18358
  Gene Name: transmembrane protein 30B
  Uniprot ID: Q3MIR4
  ENST ID: ENST00000555868
  CDS Start-End: 694-1749
aaacagatttatcataacgtaattccctggacactcccaacttgagactgaaagctgggcgaaagcggtttgtgaagctaacctaaaagacaaaatggtctagagccaccttttccccgcaaataacagaggattaaggatctgaaatcttcaagcctccaggaccacggtgcaagccctcagcaaaaatttctgctggaggccggagcgccttttgatttcgggagactggcccaggaactctagtcacttggaaggcggaagagaaggtggtacctgagccaggtaggagccactcagaggcagcccggggccgccactcacctaggagaggaggtggagtccgatgacctggactgagaggaaacgcgagactgagtctaccaggtgaggtaaaaaacacccacctgctcacctcggaaggggcgggcgaggtgcggctcccggtgacccgcgggggtgcagcgcacctgggcggaggcggaactgggagggtgtgggcactgctcgtagggcctggaactaaactcacctgtgacggaggcagaggaggggcccgggcaaaaacccacctgagctggcgggaaacccgacccgcgagcagtccccgggcttgcgcggcgcggagagggaggcgccccgcggcggggcccccactcggtcagcccgcgcgtcggtccccgcgcggccgccatgacctggagcgccacggcccggggcgcccaccagcccgacaacaccgccttcactcagcagcgcctccccgcctggcagccgctgctgtcggccagcatcgcgctgccgctcttcttctgcgcgggcctggccttcatcggcctgggcctgggcctctactactcctccaacggcatcaaggagctggagtacgactatacaggcgacccgggcaccggtaactgctcggtgtgcgccgcggctggccagggccgggcgctgccgcccccctgctcgtgcgcctggtacttctcgctgcccgagctcttccagggcccagtgtacctctactacgagctgaccaacttctaccagaacaaccggcgctacggcgtgtcccgcgacgacgcgcagctgagcggactccccagcgcgctgcgccaccctgtcaacgagtgcgccccctaccagcgcagcgcggccggcctgcccatcgcgccctgcggcgccatcgccaacagcctcttcaacgactccttctcgctttggcaccagcgccagcccggcgggccctacgtcgaggtgccgctcgaccgctccggcatcgcctggtggaccgactaccacgtcaagttccgcaacccgccgctggtcaacggcagcctggcgttggccttccagggcacggcgcccccgcccaactggcgccggccagtctacgagctcagccccgaccccaacaacaccggcttcatcaatcaggacttcgtggtgtggatgcgcacggcggcgctgcccacgttccgcaaactgtacgcgcgcatccgccagggcaactactcggccgggctgccgcggggcgcctaccgcgtcaacatcacctacaactacccggtgcgcgcgttcggcggccacaagctcctcatcttcagcagcatctcgtggatgggtggcaagaaccccttcctgggcatcgcctacctggtcgtcggctccctctgcatcctcaccggctttgtcatgctggtcgtctacattcgctaccaggaccaggacgacgacgacgaggagtgattccggctttccagggatccctcctgcttcttgccaaaactcttgcaaggtgcttttggcatctcctcctcgcccgtcacccaattccaacctcgcctagcttttcctccctttgtgaatgaggggaccagataagggaattaccccccttgctcttggggggctgctagactgtcttgccgcggggagggatgttgactgcagagtgaaacatccttgcaaactcttcccacctccttcacgacactgagttgccatgtgaggttcttcaagtctgagagtggaagggatccctatggagactcctattaaacccctattagaggaagagattgagagacctagcaatgtgaagtaacaaagatcaggcagctgcaagtgactcctgaatcttgagtccagggctttcgccactacagtacagtggttttcttttctttggtcggggagagtgggctggaatggagagtgaggcccacaaattacctgcagagacgtggaggcgtgagggagaacatgcttgttaaatatgcaggtagattaggagacaccaaacagagattcagacacagtaaggctgggatgagatcctcgaagctgtgttttaacaaactccactggagagtcccatattccctcaaatttgggaatcacgaccctgaaccaggttgggcctgaagcagtcaactgaattcactttttcggatagtaatttgttcccaggggcagtgacaaccatgatgttccaggtttggtctggcactctgccttgaacgtaggaagctcttgatgatttgtggaatgaatttttaaaaaattactatctggggaaaactagttggcatacagagttgtaggacagggtttatgtgattcatttgatattttagtattttggtgtaaaagccaacaggcaaactttgccaggtactgtgtagaaactcgaaaatgtgaggccagtttgtacagttcagaggaaatgctttaacgtagaatcagatagctggaagagatcttcgagggaaagtaagttccctaaagtcacatctatgtctcctagctcagtgttctttgtcattgtgtgtgtgtgtgtgtgtgtgtgtgtgtgtgtgtgtgattagaaagggcttcattcataccttttcccttggacctggaaaaaaaattttttttatcttttcaaatgaaatctattgatttctagtaatcatatttgaatcaatgttaaagcatatatagtcttatatgtaaactagattcttaagattatttgaacctttgagatgaagtttacactcaactaaaatcattccattgattttattgattaacatcaatcagtatgtttaaagttattctaagaagcaatagtttatttttaaaaaccttgtatagcaaaataacttaaaaccctttgtgatatcatcttaccagtttatttggtaaaaacaaacagttatttggtatttgtcagaattcttcagtgcctgctattacagctattttccaattactaacttgattatactcactcaaggcagtgcaagatcttgaagtactttttagcagttaagtaatattgaattgtattgaatagtttacatagtttattctagtctttgaaaattactgaacatggacaatgtgcatgtcattgacatctgccttagaacttctgggacaatcctgattcgagagattctatcccattatttacatataccaaaaatactttgttaatttaatgtgttggcttcccaactcctgaacacgacacaattttattattagattttgtatggtgattttaggctatgaaaacatgatcattatatgtatatagatacatttttatttgttacaaatgtttgagcagctcactagcccacccctcctctattttgggtaagagaatttactaccttttttaactatgtagttgagagcaacatgtattttgttatttttagaatggtcagtatattgctataaaattttaaatgagactatgaaagttaaagtattctgattctggttaaattaacgaatatggttccaggccctgttctctgggtttttgagagagaataaaggttatgtttgtcttacctttgttatcgagtttgctgaattcttttgaacgatgatcttaaaggcacaaacaccaccagccactttgctaatttcttaatagcagatttacattgcagcaagaaaaccatcttttatagtaacattcagttaaaatgaactcaattcattgttaacttcctaaaacagaatttgaactttatcaacctcaacgtgtatataaactagatagtcctcaatactttatcaacctcaacatgtatataaactagatagtcctcaaatactgtttgaatttaataaatgtcaatttaaaaatttttgtagtagtcttctgcattttacttcaattataaattgcaattatttattggatattttggacttcaaagcagcagaaactttaaaactgaaatgggaaacgttttcctgcaatgatccctgtgctgtaacattttgtctggtgtctcaggcttccaggttcttgttggcctgaattcccttgttgcccagtaaatgttcactagctagaagtatcttcaggaagtgagatagaaaagagtgaacctcaacaattggactggaaatgagctttgacctaactttgtaaaataaaagcataaaagagaaa

SEQ ID NO: 194158 - DNA, 454 bp, Homo sapiens
  Payload ID: 18359
  Gene Name: transmembrane protein 30C
  ENST ID: ENST00000476804
  CDS Start-End: 1-205
cctttgtatgggcatcatccttatattgtctgcaaggagcactcaggaaatagagattaattacacaagaatatgtgcaaattgtgcaaaactgcgagaaaatgcctctaattttgacaaggaatgcacctgctctattcccttttacctttcaggaaaaatgatggtaggtgaaattcaagaaactcggttgactttacactgatctattcctatgtaacacttagcagtaagttcacaatttccatgaaatgctttccaaaactgaaaatatgaaacataaagcaggatggtggtggtgaatccgaaagattgttgagttcatatcccctccctcctttttgagtattattctcctcctttgtttctaagttgcaagattctttacctatccaactttgtaacataaatcttatctaccaaacaggttttactctaaatatcagcacaggga

SEQ ID NO: 194159 - DNA, 728 bp, Homo sapiens
  Payload ID: 18360
  Gene Name: transmembrane protein 31
  Uniprot ID: Q5JXX7
  ENST ID: ENST00000319560
  CDS Start-End: 192-698
aggcagttgcgggttgcaggagttcaggaaaggaggtgggactagagtcaacctggaatagctctacagtaacaatggcagcctttttgttgctgggacatccatacaggcaacttagctggtgaaaggactctggattggttggcagtctgcttttttttttccaaggtgatcactttactgtagaagaaatgaggttaacagaaaagagtgagggagaacaacaactcaagcccaacaactctaatgcacccaatgaagatcaagaagaagaaatccaacagtcagaacagcatactccagcaaggcagcgaacacaaagagcagacacacagccatccagatgtcgattgccttcacgtaggacacctacaacatccagcgacagaacgatcaaccttcttgaagtccttccgtggcctactgagtggattttcaacccctatcgattgcctgctctttttgagctttatcctgaatttcttctggtgtttaaagaagccttccatgacatatcccattgtctgaaagcccagatggaaaagatcggactgcccatcatactccacctcttcgcactctccaccctctacttctacaagtttttccttcctacaattctttccctttctttctttattcttcttgtacttctgcttctgctttttattattgtcttcattctgatcttcttctgattcttttgtttcaataaacagcaatgagca

SEQ ID NO: 194160 - DNA, 1570 bp, Homo sapiens
  Payload ID: 18361
  Gene Name: transmembrane protein 33
  ENST ID: ENST00000264452
  CDS Start-End: 357-563
aaaggagcacttccgggttcggcaataacctggagccggcggcgtaggttggctctttagggcttcaccccgaagctccaccttcgctcccgtctttctggaaacaccgctttgatctcggcggtgcgggacaggtacctcccggctgctgcgggtgccctggatccagtcggctgcaccaggcgagcgagacccttccctggtggaggctcagagttccggcagggtgcatccggcctgtgtgtggcgcgaggcagggaagccggtacccgggtcctggccccagcgctgacgttttctctcccctttcttctctcttcgcggttgcggcgtcgcagacgctagtgtgagcccccatggcagatacgaccccgaacggcccccaaggggcgggcgctgtgcaattcatgatgaccaataaactggacacggcaatgtggctttctcgcttgttcacagtttactgctctgctctgtttgttctgcctcttcttggtgagtatcttcccagtcttgttattctctttgcttcatgctgccacatatacgaaaaaggtccttgacgcaaggggctcaaatagtttacctctgctgagatctgtcttggacaaattaagtgctaatcaacaaaatattctgaaattcattgcttgcaatgaaatattcctgatgcctgcgacagtttttatgctttttagtggtcaaggaagtttgctccaaccttttatatactatagatttcttacccttcgatattcgtctcgaagaaacccatattgtcggaccttatttaatgaactgaggattgttgttgaacacataataatgaaacctgcttgcccactgtttgtgagaagactttgtctccagagcattgcctttataagcagattggcaccaacagttccatagtttaacatctagttaagctacaaatatagtataagcattattagcagctggtacttctgctaggggttgtaaattccaggtgttacactgacctcaatccaatttacataatttacataaatgcatctcggtggaaaaataatcattttcttggcatgttaaatcaagcttaaaaagttttgagaaaattttactgcgctgtgttgctaatggttaaagaagtctgtatctagtgataaatataccagtttttttaaaaagatgctgttgtgcctatatcatgaagtacattaatttctcatgtaaaaaaaatagctctaaaatttgtttcaacctaattggtaacctgagtttatatctggcatgaattcattatggtgatacacatatgtgaattcagtacattttgagacagtattctaccattcagtaattttggttaatgattttaacacttctcagtgtatttaatttcaaattgtttttttaattggttttatgctgctttgttaggacagatgtgttttgaatgtaccattataagaagaattctatgtatcttaaactatgatcttctaaaattttatttccgtaagtacttctgtggccttgagtattttttaaaaggctcaactgtaagcctcttagccagttggat

SEQ ID NO: 194161 - DNA, 677 bp, Homo sapiens
  Payload ID: 18361
  Gene Name: transmembrane protein 33
  ENST ID: ENST00000513558
  CDS Start-End: 1-467
ctctgaggctgcatcaaagattaccacacttccagttaagcagagcattcctggcccaggctttgttagaggacagctgccactacctgttgtattcactcatctttgtaaattcctatccagttacaatgagtatcttcccagtcttgttattctctttgcttcatgctgccacatatacgaaaaaggtccttgacgcaaggggctcaaatagtttacctctgctgagatctgtcttggacaaattaagtgctaatcaacaaaatattctgaaattcattgcttgcaatgaaatattcctgatgcctgcgacagtttttatgctttttagtggtcaaggaagtttgctccaaccttttatatactatagatttcttacccttcgatattcgtctcgaagaaacccatattgtcgtttgtggtgccccaaaacagttacaatagtaacaccaaagagatcaccgtaacagaacagatcacagatcaccataatagattaataatgaaaacatttgaaatagtggaagaattggcaaagtgtgacgcagagacatgaagtgagcacatgctgttggaaagtggcactgatagtcttgctgtatgcggtgttgcaacaaaccttcaatttgtaaaaaatgaaatatctatggagtacaataaaatgaggtaagcctgtg

SEQ ID NO: 194162 - DNA, 7482 bp, Homo sapiens
  Payload ID: 18361
  Gene Name: transmembrane protein 33
  Uniprot ID: P57088
  ENST ID: ENST00000504986
  CDS Start-End: 366-1109
acggaaatgaaaggagcacttccgggttcggcaataacctggagccggcggcgtaggttggctctttagggcttcaccccgaagctccaccttcgctcccgtctttctggaaacaccgctttgatctcggcggtgcgggacaggtacctcccggctgctgcgggtgccctggatccagtcggctgcaccaggcgagcgagacccttccctggtggaggctcagagttccggcagggtgcatccggcctgtgtgtggcgcgaggcagggaagccggtacccgggtcctggccccagcgctgacgttttctctcccctttcttctctcttcgcggttgcggcgtcgcagacgctagtgtgagcccccatggcagatacgaccccgaacggcccccaaggggcgggcgctgtgcaattcatgatgaccaataaactggacacggcaatgtggctttctcgcttgttcacagtttactgctctgctctgtttgttctgcctcttcttgggttgcatgaagcagcaagcttttaccaacgtgctttgctggcaaatgctcttaccagtgctctgaggctgcatcaaagattaccacacttccagttaagcagagcattcctggcccaggctttgttagaggacagctgccactacctgttgtattcactcatctttgtaaattcctatccagttacaatgagtatcttcccagtcttgttattctctttgcttcatgctgccacatatacgaaaaaggtccttgacgcaaggggctcaaatagtttacctctgctgagatctgtcttggacaaattaagtgctaatcaacaaaatattctgaaattcattgcttgcaatgaaatattcctgatgcctgcgacagtttttatgctttttagtggtcaaggaagtttgctccaaccttttatatactatagatttcttacccttcgatattcgtctcgaagaaacccatattgtcggaccttatttaatgaactgaggattgttgttgaacacataataatgaaacctgcttgcccactgtttgtgagaagactttgtctccagagcattgcctttataagcagattggcaccaacagttccatagtttaacatctagttaagctacaaatatagtataagcattattagcagctggtacttctgctaggggttgtaaattccaggtgttacactgacctcaatccaatttacataatttacataaatgcatctcggtggaaaaataatcattttcttggcatgttaaatcaagcttaaaaagttttgagaaaattttactgcgctgtgttgctaatggttaaagaagtctgtatctagtgataaatataccagtttttttaaaaagatgctgttgtgcctatatcatgaagtacattaatttctcatgtaaaaaaaatagctctaaaatttgtttcaacctaattggtaacctgagtttatatctggcatgaattcattatggtgatacacatatgtgaattcagtacattttgagacagtattctaccattcagtaattttggttaatgattttaacacttctcagtgtatttaatttcaaattgtttttttaattggttttatgctgctttgttaggacagatgtgttttgaatgtaccattataagaagaattctatgtatcttaaactatgatcttctaaaattttatttccgtaagtacttctgtggccttgagtattttttaaaaggctcaactgtaagcctcttagccagttggataaatatttggggtcacctagccattgaaagcagaaagcagtagtgacacagctttcccttcaaagagccattgagaaacatttctcaaacaggaaatccttcttttactaatgtggacatatagattattcgtattatagtttgtagaactacctagttcagaatcttgactgccagttttcttggtttcttaggcttgaattttcatagacaattgcaacagtttagatgccttttgaaaggaatgtaatgaagattcagcatctgactatatgtgtgtctatcctgaaataataatggagagtatactgtagattacatgtttacccatcaaatctgacttaaaaggttaaatggaaggttttataggtaaggtaattgattgggaatggggtagggggaggagttgtgggggaataatgtgcatttcagtctcaacgcatagataaatttaggggaattggatgtattattcaactttgatttgggttgtaaaatgtgttaaatcctgttcattgaactcccatcaactcttataaaattcatgctgatcttcattaccgttgcatgattggaaatgtttaaaacattgtacagttttagtatagagaaatgtaatggtttttgtgaccagtttctgtctgcatgtaatttggatttctcaaatacattcattagtaatttatcagtaacattagttttatttttgttcatctccttatctataaaaaggggatattcttaggataaatacatgaaaaattatacttgatagcttaactataatcagctatttttgtatttttgtaatatttgtccactaagctggagaagcagcctcatacagttgattttgtgtatgtggctagtcttattgtcactatgtaagtaatccaatggttttagaaactaaactttctagagcaataaaatgactataatgttaagtaaacataatgttgatttctaattatgttttaaaaaatgaagtcttgaattatatcaagaaattttggcagctgaagtcatgtttattttgaagctgttagttttttcctataatttaaaaagatcttttagatttatagaagagtcagaaatgtacaagagagtttttttgttgttgtttttgttttttgagacagagtctgtctctgtcgccaaggctggagtgcagtggcgcaatcctggctcactgtagcctctgcctcctgggttcaagtgcttctcctgcctcagcctcccgagtagctgggactacaggtgcacgccaccacgcctgtagtcccagctgtattgtaaaaatacaaaattttagtatttttagtagagacagggtttcaccatgttggccaggatggtctcgatctcctgacctcgtgatctgcctgcctcggcctcccaaagtgccgggattacaggtgtgagccaccgcgccctgccaagaagagttcttttgcataccctttactcaggtcctctcatgttaacgttttacataactgtagaacatttatctaaagtaagatattagcccagaacaatactactaactgaagtataaaacttatttgaatttcaacagtttttttttcatttcttattttccttttgtgtgctctgtttataccatgatccatgatttttttaaaatcatgattgtcttttaaagatctgtgtgtctctgttttgagtttttcctgtttattttgaaaagtactgttggtcaagataattggtcaataatccatgttggttttaacaaaaagcattttaacattaaaaatattacagtataaaataacactctgtgctttaaattgaggttttatgtcattttagcagaattataatatttctgatatactcatgtttgacaagttgaaacagatttgtttcttaaaggaaggtttaatatacaaaaaaaggtaatcttaaacttacgaaaaagtaaattttacaatttgagcattactagatgtttagtttgcatgaactcatagttagaaattctgcaataggaatatctacaaccggctgatttggaatttgaaattatagtgttacatgtatacctatcaaattaaaattaaggaaatacaatagcaatatatagaatgaatgtagtaacagaaattaactctttactgcatcattgaacttattgttagttacaggtttaaaagaagttcatttaacatccagtgtgtctaattcttctggaagtggtgtagtaccattgttcttctggcatttttaaatattaaacctttttggatagatggaagccttatacaaaatctactttattttagcaaggattctctgtccttttgtatagttggtaccttactaatttaaactctaatatcaatctaaagagaaatttattatgcaatttgtatttaggtttttttttttttttttggaatgaagttcagaggtagatcctcctggaagaaagaaagcaagcgaactttttaaagaaaattagacttgaatatttaagaatgtcccttacagagaaaaggccaactataatactaagctaaaagttatgaaaaattaataggttcttttatagagctaagaatgatgaaaccatcaatacttccttcttcctaaaaatccagatcaaaacttcaggttaggtttctaagtttaggacatgaatattatttttttctggaaaagaagatgagtatatgtgtaataagacaagtagaactgagagatttagttttttttttttttaagttttagttcagaataacattaattttgagagattgaggtaaagaaccttaactaatgctaaggagtttattttgattaacataggttattctgaccaccacctcttccttccttaatctccttagaatctgacagtctcaaagctgtcacacaaattagactaattttgacactttgaaatgaaaacttcaaggaagaagtagccacggacagttatgtttataatcagtaggtggcactctttcctcaggtagccccccattttcacatgatgtgtttgaaggttaaatgccaccaaaagtgctgagtcagctataaaactaagtccctgaattccatggcccttttaaatatgtaatcattcaagattgaaaaaaaaaattaagcattttttgtttgtttgcttgtttgtttttgagacggagtttcactcttgttggccaggctggagtgcaatggcgccatctcagctcactgcaacctctgcctcccggattcaagcaattctccttcagccctccaagtagctggggttacaggtgcccgccaccatgcccagctagtttttgtatttttagtagagatgaggtttcaccatgttggccaggctggtcttgaactcctgacctcgtgatccccccacctcggccttccaaagtgctggattacaggcgtgagccactgtgcctggcttgcatttttaaaatactgaattattcaaaagaagtaccctgtcaatatgtgctttctaggaaaacagtaaaataggccacaatttggagtgacaccattcagatcaaggtctatccagttttttcttttcatgctaagtgcctacatcaccgaaacacactaatataaaattatcctttctccttcattttcagatgtgtaaaaaatggtacttaaagtgttttcatgatcattttgtaggtagactagatatagcccgttgaacctcttttaaaatttagacttttgatagtaatataaaagcatattgaaatttgtagatattatatgaggaatggcacctagatttgaaaattatgcttggcttgtagagacaactagtttctctcgctcttttttttttttttttttttttttttgagacagattctcactcagttgcccaggctggagtgcagtggtgcagtcttggctcactgcaacctctgcctcctgggttaaagcgattctcatgcctcagcctccctagtagctgagactacaggcgtgcaccaccacgcccagctaatttttgtatttttagtagagacaggatttcaccatgttcaccatgttggtcaggctggtcttgaactcctggcctcaagtgatctgcccgcctcgacctcccagagtgctgggattataggtgtgagccactaagcctggctgagacaactagtttcccttaactcattggaattctctaggattaggagaattccacagagcctatatgatattatagctcaacatttagtataccaaaggcatacccgtgtaaatctaggagttatttccagagattgttttaaggagcagtcttatattcagggtagaaagttatgattggatctgctgttaaggagaacaaaggagcttctaaaggtttgggaggtttactggtagtaactattctaggaaatatttatgttttaaggtgatgttcacatgggttctttagaaggaacatagtcaagtgtgatggattaactctatatagtctttctcctcttgtgcgtgtaggaaatctgacctgcagtgtcagttgatgtgacaagagataaagaaagcacagtattttaaaatctaaagcagattcctttcttagaaaacaataggaaaaaattatagatggatgtctttgctgaaatctaacaattagctcatattccatgagaaagagtggcctaagaattatttcatgttacctagccttctgaagctactcacttgatgtgcctagcactttgaaactaaccttttctttctttgttcatgacagtttaattccaaatatttactattttctcttgtaactgttagaacagttccttttgacattaatttttgcctacatatatatttttaagttgagaccaaatcggtgaagtgttgagcaagtaacatttatgatgtgtgtatattggaacaaatgtaaaagggttacaaagattagaaacagagtcataaaaaatggcttgatttataaaggcattacttttggtgctttatataatggcatatattgaactaaaaatttgtatatacagtatgtcagcatttcttagtaacttctcttgaatccatttttaatatctaatattgtacaggttggggagttacattcttcaggccaatactatccagactatataaatttataaaataaattgaaaaattcattcccctgtattcaagaccaaagcacataaatgctaatgtagggctcagaggggaaatacagttctcctgcatatttgagaaaatgtgaagtcctttcaagaaaatctaataaacataataatcatagcctgctgacactaaggaaaaaggacctcattcactctttcttttatgcagtgatttactggtccctactgatttccaaattggatcacgatagtaaattatccatgctggtacctgtgaaagtaagccctgggatccatatttgttttgtgttctgcttaaatcagcaagaatgataaatttgatggtgtgaaattggaagtatcaagggctttctttggtgattgagggaaataatgtctctacttgtaatttattgtgaccctttttcactgtatatgctttgtatgtctaatatttatttcaatgcaaattcaattgttccttcatctgtattgttatatctaagattttattgatgttaaaatctaattgtggaataaaaatctctctggaatttagcagatacaaaaa

SEQ ID NO: 194163 - DNA, 574 bp, Homo sapiens
  Payload ID: 18361
  Gene Name: transmembrane protein 33
  ENST ID: ENST00000506794
  CDS Start-End: 42-248
tcttcgcggttgcggcgtcgcagacgctagtgtgagcccccatggcagatacgaccccgaacggcccccaaggggcgggcgctgtgcaattcatgatgaccaataaactggacacggcaatgtggctttctcgcttgttcacagtttactgctctgctctgtttgttctgcctcttcttggtgtccagatgtcttgctttaaaaaagagaggtcctcagctctttccatcttaaccccagtgaactagatacaaatggaatttaaccaagaaacaacttatttaagcagtgagtatcttcccagtcttgttattctctttgcttcatgctgccacatatacgaaaaaggtccttgacgcaaggggctcaaatagtttacctctgctgagatctgtcttggacaaattaagtgctaatcaacaaaatattctgaaattcattgcttgcaatgaaatattcctgatgcctgcgacagtttttatgctttttagtggtcaaggaagtttgctccaaccttttatatactatagatttcttacccttcgatattcgtctcgaagaaacccatattgtc

SEQ ID NO: 194164 - DNA, 867 bp, Homo sapiens
  Payload ID: 18361
  Gene Name: transmembrane protein 33
  ENST ID: ENST00000508448
  CDS Start-End: 201-867
aaaggagcacttccgggttcggcaataacctggagccggcggcgtaggttggctctttagggcttcaccccgaagctccaccttcgctcccgtctttctggaaacaccgctttgatctcggcggtgcgggacaggtacctcccggctgctgcgggtgccctggatccagtcggctgcaccagacgctagtgtgagcccccatggcagatacgaccccgaacggcccccaaggggcgggcgctgtgcaattcatgatgaccaataaactggacacggcaatgtggctttctcgcttgttcacagtttactgctctgctctgtttgttctgcctcttcttgggttgcatgaagcagcaagcttttaccaacgtgctttgctggcaaatgctcttaccagtgctctgaggctgcatcaaagattaccacacttccagttaagcagagcattcctggcccaggctttgttagaggacagctgccactacctgttgtattcactcatctttgtaaattcctatccagttacaatgagtatcttcccagtcttgttattctctttgcttcatgctgccacatatacgaaaaaggtccttgacgcaaggggctcaaatagtttacctctgctgagatctgtcttggacaaattaagtgctaatcaacaaaatattctgaaattcattgcttgcaatgaaatattcctgatgcctgcgacagtttttatgctttttagtggtcaaggaagtttgctccaaccttttatatactatagatttcttacccttcgatattcgtctcgaagaaacccatattgtcggaccttatttaatgaactgaggattgttgttgaacacataataatgaaacctg

SEQ ID NO: 194165 - DNA, 1092 bp, Homo sapiens
  Payload ID: 18361
  Gene Name: transmembrane protein 33
  Uniprot ID: P57088
  ENST ID: ENST00000513702
  CDS Start-End: 153-896
aaaggagcacttccgggttcggcaataacctggagccggcggcgtaggttggctctttagggcttcaccccgaagctccaccttcgctcccgtctttctggaaacaccgctttgatctcggcggtgcgggacagacgctagtgtgagcccccatggcagatacgaccccgaacggcccccaaggggcgggcgctgtgcaattcatgatgaccaataaactggacacggcaatgtggctttctcgcttgttcacagtttactgctctgctctgtttgttctgcctcttcttgggttgcatgaagcagcaagcttttaccaacgtgctttgctggcaaatgctcttaccagtgctctgaggctgcatcaaagattaccacacttccagttaagcagagcattcctggcccaggctttgttagaggacagctgccactacctgttgtattcactcatctttgtaaattcctatccagttacaatgagtatcttcccagtcttgttattctctttgcttcatgctgccacatatacgaaaaaggtccttgacgcaaggggctcaaatagtttacctctgctgagatctgtcttggacaaattaagtgctaatcaacaaaatattctgaaattcattgcttgcaatgaaatattcctgatgcctgcgacagtttttatgctttttagtggtcaaggaagtttgctccaaccttttatatactatagatttcttacccttcgatattcgtctcgaagaaacccatattgtcggaccttatttaatgaactgaggattgttgttgaacacataataatgaaacctgcttgcccactgtttgtgagaagactttgtctccagagcattgcctttataagcagattggcaccaacagttccatagtttaacatctagttaagctacaaatatagtataagcattattagcagctggtacttctgctaggggttgtaaattccaggtgttacactgacctcaatccaatttacataatttacataaatgcatctcggtggaaaaataatcattttcttggcatgttaaatcaagcttaaaaagttttgagaaaattttactg

SEQ ID NO: 194166 - DNA, 6221 bp, Homo sapiens
  Payload ID: 18361
  Gene Name: transmembrane protein 33
  Uniprot ID: P57088
  ENST ID: ENST00000325094
  CDS Start-End: 334-1077
aataacctggagccggcggcgtaggttggctctttagggcttcaccccgaagctccaccttcgctcccgtctttctggaaacaccgctttgatctcggcggtgcgggacaggtacctcccggctgctgcgggtgccctggatccagtcggctgcaccaggcgagcgagacccttccctggtggaggctcagagttccggcagggtgcatccggcctgtgtgtggcgcgaggcagggaagccggtacccgggtcctggccccagcgctgacgttttctctcccctttcttctctcttcgcggttgcggcgtcgcagacgctagtgtgagcccccatggcagatacgaccccgaacggcccccaaggggcgggcgctgtgcaattcatgatgaccaataaactggacacggcaatgtggctttctcgcttgttcacagtttactgctctgctctgtttgttctgcctcttcttgggttgcatgaagcagcaagcttttaccaacgtgctttgctggcaaatgctcttaccagtgctctgaggctgcatcaaagattaccacacttccagttaagcagagcattcctggcccaggctttgttagaggacagctgccactacctgttgtattcactcatctttgtaaattcctatccagttacaatgagtatcttcccagtcttgttattctctttgcttcatgctgccacatatacgaaaaaggtccttgacgcaaggggctcaaatagtttacctctgctgagatctgtcttggacaaattaagtgctaatcaacaaaatattctgaaattcattgcttgcaatgaaatattcctgatgcctgcgacagtttttatgctttttagtggtcaaggaagtttgctccaaccttttatatactatagatttcttacccttcgatattcgtctcgaagaaacccatattgtcggaccttatttaatgaactgaggattgttgttgaacacataataatgaaacctgcttgcccactgtttgtgagaagactttgtctccagagcattgcctttataagcagattggcaccaacagttccatagtttaacatctagttaagctacaaatatagtataagcattattagcagctggtacttctgctaggggttgtaaattccaggtgttacactgacctcaatccaatttacataatttacataaatgcatctcggtggaaaaataatcattttcttggcatgttaaatcaagcttaaaaagttttgagaaaattttactgcgctgtgttgctaatggttaaagaagtctgtatctagtgataaatataccagtttttttaaaaagatgctgttgtgcctatatcatgaagtacattaatttctcatgtaaaaaaaatagctctaaaatttgtttcaacctaattggtaacctgagtttatatctggcatgaattcattatggtgatacacatatgtgaattcagtacattttgagacagtattctaccattcagtaattttggttaatgattttaacacttctcagtgtatttaatttcaaattgtttttttaattggttttatgctgctttgttaggacagatgtgttttgaatgtaccattataagaagaattctatgtatcttaaactatgatcttctaaaattttatttccgtaagtacttctgtggccttgagtattttttaaaaggctcaactgtaagcctcttagccagttggataaatatttggggtcacctagccattgaaagcagaaagcagtagtgacacagctttcccttcaaagagccattgagaaacatttctcaaacaggaaatccttcttttactaatgtggacatatagattattcgtattatagtttgtagaactacctagttcagaatcttgactgccagttttcttggtttcttaggcttgaattttcatagacaattgcaacagtttagatgccttttgaaaggaatgtaatgaagattcagcatctgactatatgtgtgtctatcctgaaataataatggagagtatactgtagattacatgtttacccatcaaatctgacttaaaaggttaaatggaaggttttataggtaaggtaattgattgggaatggggtagggggaggagttgtgggggaataatgtgcatttcagtctcaacgcatagataaatttaggggaattggatgtattattcaactttgatttgggttgtaaaatgtgttaaatcctgttcattgaactcccatcaactcttataaaattcatgctgatcttcattaccgttgcatgattggaaatgtttaaaacattgtacagttttagtatagagaaatgtaatggtttttgtgaccagtttctgtctgcatgtaatttggatttctcaaatacattcattagtaatttatcagtaacattagttttatttttgttcatctccttatctataaaaaggggatattcttaggataaatacatgaaaaattatacttgatagcttaactataatcagctatttttgtatttttgtaatatttgtccactaagctggagaagcagcctcatacagttgattttgtgtatgtggctagtcttattgtcactatgtaagtaatccaatggttttagaaactaaactttctagagcaataaaatgactataatgttaagtaaacataatgttgatttctaattatgttttaaaaaatgaagtcttgaattatatcaagaaattttggcagctgaagtcatgtttattttgaagctgttagttttttcctataatttaaaaagatcttttagatttatagaagagtcagaaatgtacaagagagtttttttgttgttgtttttgttttttgagacagagtctgtctctgtcgccaaggctggagtgcagtggcgcaatcctggctcactgtagcctctgcctcctgggttcaagtgcttctcctgcctcagcctcccgagtagctgggactacaggtgcacgccaccacgcctgtagtcccagctgtattgtaaaaatacaaaattttagtatttttagtagagacagggtttcaccatgttggccaggatggtctcgatctcctgacctcgtgatctgcctgcctcggcctcccaaagtgccgggattacaggtgtgagccaccgcgccctgccaagaagagttcttttgcataccctttactcaggtcctctcatgttaacgttttacataactgtagaacatttatctaaagtaagatattagcccagaacaatactactaactgaagtataaaacttatttgaatttcaacagtttttttttcatttcttattttccttttgtgtgctctgtttataccatgatccatgatttttttaaaatcatgattgtcttttaaagatctgtgtgtctctgttttgagtttttcctgtttattttgaaaagtactgttggtcaagataattggtcaataatccatgttggttttaacaaaaagcattttaacattaaaaatattacagtataaaataacactctgtgctttaaattgaggttttatgtcattttagcagaattataatatttctgatatactcatgtttgacaagttgaaacagatttgtttcttaaaggaaggtttaatatacaaaaaaaggtaatcttaaacttacgaaaaagtaaattttacaatttgagcattactagatgtttagtttgcatgaactcatagttagaaattctgcaataggaatatctacaaccggctgatttggaatttgaaattatagtgttacatgtatacctatcaaattaaaattaaggaaatacaatagcaatatatagaatgaatgtagtaacagaaattaactctttactgcatcattgaacttattgttagttacaggtttaaaagaagttcatttaacatccagtgtgtctaattcttctggaagtggtgtagtaccattgttcttctggcatttttaaatattaaacctttttggatagatggaagccttatacaaaatctactttattttagcaaggattctctgtccttttgtatagttggtaccttactaatttaaactctaatatcaatctaaagagaaatttattatgcaatttgtatttaggtttttttttttttttttggaatgaagttcagaggtagatcctcctggaagaaagaaagcaagcgaactttttaaagaaaattagacttgaatatttaagaatgtcccttacagagaaaaggccaactataatactaagctaaaagttatgaaaaattaataggttcttttatagagctaagaatgatgaaaccatcaatacttccttcttcctaaaaatccagatcaaaacttcaggttaggtttctaagtttaggacatgaatattatttttttctggaaaagaagatgagtatatgtgtaataagacaagtagaactgagagatttagttttttttttttttaagttttagttcagaataacattaattttgagagattgaggtaaagaaccttaactaatgctaaggagtttattttgattaacataggttattctgaccaccacctcttccttccttaatctccttagaatctgacagtctcaaagctgtcacacaaattagactaattttgacactttgaaatgaaaacttcaaggaagaagtagccacggacagttatgtttataatcagtaggtggcactctttcctcaggtagccccccattttcacatgatgtgtttgaaggttaaatgccaccaaaagtgctgagtcagctataaaactaagtccctgaattccatggcccttttaaatatgtaatcattcaagattgaaaaaaaaaattaagcattttttgtttgtttgcttgtttgtttttgagacggagtttcactcttgttggccaggctggagtgcaatggcgccatctcagctcactgcaacctctgcctcccggattcaagcaattctccttcagccctccaagtagctggggttacaggtgcccgccaccatgcccagctaatttttgtatttttagtagagacaggatttcaccatgttcaccatgttggtcaggctggtcttgaactcctggcctcaagtgatctgcccgcctcgacctcccagagtgctgggattataggtgtgagccactaagcctggctgagacaactagtttcccttaactcattggaattctctaggattaggagaattccacagagcctatatgatattatagctcaacatttagtataccaaaggcatacccgtgtaaatctaggagttatttccagagattgttttaaggagcagtcttatattcagggtagaaagttatgattggatctgctgttaaggagaacaaaggagcttctaaaggtttgggaggtttactggtagtaactattctaggaaatatttatgttttaaggtgatgttcacatgggttctttagaaggaacatagtcaagtgtgatggattaactctatatagtctttctcctcttgtgcgtgtaggaaatctgacctgcagtgtcagttgatgtgacaagagataaagaaagcacagtattttaaaatctaaagcagattcctttcttagaaaacaataggaaaaaattatagatggatgtctttgctgaaatctaacaattagctcatattccatgagaaagagtggcctaagaattatttcatgttacctagccttctgaagctactcacttgatgtgcctagcactttgaaactaaccttttctttctttgttcatgacagtttaattccaaatatttactattttctcttgtaactgttagaacagttccttttgacattaatttttgcctacatatatatttttaagttgagaccaaatcggtgaagtgttgagcaagtaacatttatgatgtgtgtatattggaacaaatgtaaaagggttacaaagattagaaacagagtcataaaaaatggcttgatttataaaggcattacttttggtgctttatataatggcatatattgaactaaaaatttgtatatacagtatgtcagcatttcttagtaacttctcttgaatccatttttaatatctaatattgtacaggttggggagttacattcttcaggccaatactatccagactatataaatttataaaataaattgaaaaattcattcccctgta

SEQ ID NO: 194167 - DNA, 2195 bp, Homo sapiens
  Payload ID: 18362
  Gene Name: transmembrane protein 35
  Uniprot ID: Q53FP2
  ENST ID: ENST00000372930
  CDS Start-End: 284-787
tttgaagtttccgtctttcctttagggcttcatttaacttcgagactgtccttttggcctgtgagcacacgtagggcattaggacccagcgtttgttgtagtgagagtggttgaatctcgatctctcaatttttctctcgagctccctcctctccctttgtcattctagctgcctgctgcctccgcagcgtccccccagctctccctgtgctaactgcctgcaccttggacagagcgggtgcgcaaatcagaaggattagttgggacctgccttggcgaccccatggcatcccccagaaccgtaactattgtggccctctcagtggccctgggactcttctttgttttcatggggactatcaagctgacccccaggctcagcaaggatgcctacagtgagatgaaacgtgcttacaagagctatgttcgagccctccctctgctgaagaaaatggggatcaattccattctcctccgaaaaagcattggtgcccttgaagtggcctgtggcatcgtcatgacccttgtgcctgggcgtcccaaagatgtggccaacttcttcctactgttgctggtgttggctgtgctcttcttccaccagctggtcggtgatcctctcaaacgctacgcccatgctctggtgtttggaatcctgctcacttgccgcctgctgattgctcgcaagcccgaagaccggtcttctgagaagaagcctttgccagggaatgctgaggagcaaccctccttatatgagaaggcccctcagggcaaagtgaaggtgtcatagaaaagtggaagtgcaaagagtggaccttccaggcagttgcgtccatgacaccaggaagatgtcagtgtgtgtttttcatttgatttatttatcttggggaaagtgaaaaatgtaatctgcaagttaatgaccctattggcttgtgtacatctatatgctaaaatgacttccccacattgacatttgtgcgccacctttaatcactctggggcaactctcacatcttgctgcatgtacatgtatacggctactattgaagtgtaattgtgagatggactccaacaagcatgtgactgtgagattgtgtgtgggaaaatgtatttaactactctgtgtgtgtgtgtgtgtgtgtgtgcgcgcgcgcgcgcacgcgcacacactcacgcacacacaagcagagaaggcgctgatcttgaactaatcctgcacaggcatccttccctttatagattgattccagcaaaggcggaataaaacaaatttcctatgaagagaatcctgatatgaaacaagtcatgtagtctcatggccgggaatctctccacagatactaacaacttaaacttactactttaggagaaaaaaaaaaacattcaatttcggacactgagttatatatgaaattaattaggctctagtccaacagttgtttacattttaaatagtccatattgaatttaattaaaacaagggatgcatgcagtcaaattgatagtttaattcttcaagtgataatataggaagtttcaccttgcctttgtccaagccccacctattaaaaccctttactcacagtttgaaactgaagcagtaaacttgtttccagacatctttttcagattgtcttaagcccaaagttgcctcacttccactattctcagcagccaaccaggatttggcagctgctccactgttacggttgagggaacagggatcagtcctgttagaagtctgtgagcctcaaactctacctgttctctgcaatcatccaaaatttgaaaaagaagctatatccagtgtttcactgccaaacagattcactactcttactgattcttcactgagctttgctagtataagcagagttccaagtctcccctagggttgtctctacatttctttatcattccagtgggtagggtttagctgggggaaggacatttcataagggttagttggactgagcagtatggacatttgcttttttcattacgtactgttgtttttccttgttaggtgtgctttggtggttttaatattattgtgccagggatggggaaatggggggggttgtgtgggaagagtacttattattgtgttttcttcagtgtaattgttcttggtaattgatacctctctgttttatttctctcattctttcaaaataaaactttttgaaatttggagg

SEQ ID NO: 194168 - DNA, 1688 bp, Homo sapiens
  Payload ID: 18363
  Gene Name: transmembrane protein 37
  Uniprot ID: Q8WXS4
  ENST ID: ENST00000306406
  CDS Start-End: 36-608
gcgatcgaggctgcagcgcggccgccgggcgcagcatgactgccgtcggcgtgcaggcccagaggcctttgggccaaaggcagccccgccggtccttctttgaatccttcatccggaccctcatcatcacgtgtgtggccctggctgtggtcctgtcctcggtctccatttgtgatgggcactggctcctggctgaggaccgcctcttcgggctctggcacttctgcaccaccaccaaccagacgatctgcttcagagacctgggccaggcccatgtgcccgggctggccgtgggcatgggcctggtacgcagcgtgggcgccttggccgtggtggccgccatttttggcctggagttcctcatggtgtcccagttgtgcgaggacaaacactcacagtgcaagtgggtcatgggttccatcctcctcctggtgtctttcgtcctctcctccggcgggctcctgggttttgtgatcctcctcaggaaccaagtcacactcatcggcttcaccctaatgttttggtgcgaattcactgcctccttcctcctcttcctgaacgccatcagcggccttcacatcaacagcatcacccatccctgggaatgaccgtggaaattttaggccccctccagggacatcagattccacaagaaaatatggtcaaaatgggacttttccagcatgtggcctctggtggggctgggttggacaagggccttgaaacggctgcctgtttgccgataacttgtgggtggtcagccagaaatggcccgggggcctctgcacctggtctgcagggccagaggccaggagggtgcctcagtgccaccaactgcacaggcttagccagatgttgattttagaggaagaaaaaaacattttaaaactccttcttgaattttcttccctggactggaatacagttggaagcacaggggtaactggtacctgagctagctgcacagccaaggatagttcatgcctgtttcattgacacgtgctgggataggggctgcagaatccctggggctcccagggttgttaagaatggatcattcttccagctaagggtccaatcagtgcctaggactttcttccaccagctcaaagggccttcgtatgtatgtccctggcttcagctttggtcatgccaaagaggcagagttcaggattccctcagaatgccctgcacacagtaggtttccaaaccatttgactcggtttgcctccctgcccgttgtttaaaccttacaaaccctggataaccccatcttctagcagctggctgtgcctctgggagctctgcctatcagaaccctaccttaaggtgggtttccttccgagaagagttcttgagcaagctctcccaggagggcccacctgactgctaatacacagccctccccaaggcccgtgtgtgcatgtgtctgtcttttgtgagggttagacagcctcagggcaccatttttaatcccagaacacatttcaaagagcacgtatctagacctgctggactctgcagggggtgagggggaacagcgagagcttgggtaatgattaacacccatgctggggatgcatggaggtgaagggggccaggaaccagtggagatttccatccttgccagcacgtctgtacttctgttcattaaagtgctccctttctagtcctttttctgcccagaa

SEQ ID NO: 194169 - DNA, 794 bp, Homo sapiens
  Payload ID: 18363
  Gene Name: transmembrane protein 37
  ENST ID: ENST00000409826
  CDS Start-End: 27-635
gaaactggagaaggcagtgggtgcagatgacccgacctgactgttcttctgattttaattccaggcacttccctcttggccaggcccagaggcctttgggccaaaggcagccccgccggtccttctttgaatccttcatccggaccctcatcatcacgtgtgtggccctggctgtggtcctgtcctcggtctccatttgtgatgggcactggctcctggctgaggaccgcctcttcgggctctggcacttctgcaccaccaccaaccagacgatctgcttcagagacctgggccaggcccatgtgcccgggctggccgtgggcatgggcctggtacgcagcgtgggcgccttggccgtggtggccgccatttttggcctggagttcctcatggtgtcccagttgtgcgaggacaaacactcacagtgcaagtgggtcatgggttccatcctcctcctggtgtctttcgtcctctcctccggcgggctcctgggttttgtgatcctcctcaggaaccaagtcacactcatcggcttcaccctaatgttttggtgcgaattcactgcctccttcctcctcttcctgaacgccatcagcggccttcacatcaacagcatcacccatccctgggaatgaccgtggaaattttaggccccctccagggacatcagattccacaagaaaatatggtcaaaatgggacttttccagcatgtggcctctggtggggctgggttggacaagggccttgaaacggctgcctgtttgccgataacttgtgggtggtcagccagaa

SEQ ID NO: 194170 - DNA, 522 bp, Homo sapiens
  Payload ID: 18363
  Gene Name: transmembrane protein 37
  ENST ID: ENST00000417645
  CDS Start-End: 323-522
gtgaaaggatacccccgcaacaggacaggtcttcctttcccatgtgggctctttatccagaacccagagctgcggagagtctggcttctgggacccttgactggggagaaagcaggtgggggccacggagggaaggccccagagcagagaggcaccaggctggctgagcctgggcagctgccctttgccttagctcagtggttctcaaagcctggcccccaggccagcagcaccaacatcacttgaggccactcagccagaaactctgcagtggggcctcgcaatctgttttaacaaaccttccaggtgactctggtgcagaatggtggcaagaactcaaacctggactaggcctgctgggcccagaggcctttgggccaaaggcagccccgccggtccttctttgaatccttcatccggaccctcatcatcacgtgtgtggccctggctgtggtcctgtcctcggtctccatttgtgatgggcactggctcctggctgaggaccgcctcttcgggctctgg

SEQ ID NO: 194171 - DNA, 2649 bp, Homo sapiens
  Payload ID: 18364
  Gene Name: transmembrane protein 38A
  Uniprot ID: Q9H6F2
  ENST ID: ENST00000187762
  CDS Start-End: 92-991
agctgcgggggcgcagtcgccgggccgcgggcggcgggacggacgaggccggggccccgggtggcacccggcaggcgggcaggcgggcgccatggagctgctctcggcgctgagcctgggcgaactggcgctcagcttctcgcgggtgccgctcttccccgtcttcgacctcagttacttcatcgtctccatcctctacctcaagtatgagccaggagcagtcgaactgtcccggcgccaccccatcgcgtcctggctgtgcgccatgctgcattgcttcgggagctacatcctggctgatctgctccttggggagccactgatcgattacttcagcaacaactccagcatcctgctggcctcagctgtctggtacttgattttcttctgccccctggacctcttctacaagtgtgtctgcttcctgcctgtgaaactcatcttcgtggccatgaaggaggtggtgcgagtccgcaagatcgcggtgggcatccatcacgcccatcaccactaccaccacgggtggttcgtcatgattgcaactgggtgggtcaaaggttctggtgtcgccctcatgtccaactttgagcagctgctccgaggggtctggaagccagagaccaacgagatcctgcacatgtctttccccaccaaggccagcctgtatggagccatcctcttcaccctccagcagacccgctggctcccagtgtccaaagccagcctcatcttcatcttcaccttgttcatggtgtcctgtaaggtgtttctgacagccacccactcacacagctccccctttgatgccctggagggctacatctgccccgtgctgtttggttcggcctgcgggggtgaccatcaccacgacaaccatggtgggtcccacagcggtggtgggccaggagctcagcattcggccatgcccgccaagtccaaggaggagttgagcgagggctccaggaagaagaaggccaagaaggcggattagggggtggcccaaggggcaccggggagaggacccggacccaggaccctctgagctgggaggcttcctgcgctcagatctatcctttcctggccttgacttccccatctgcaaatcagggtcattggctcaccctccagggctgatgtgggggttgagatatggggatgaggatgaagaacttttgtagaaatcggggttccctctttctctctgccaggaccccatagagtcacagcttttggaggggttcacagaatcctggcagcagctccagtcaagaatgtcactggttggcatgatattcttagttgtatttttccttctttaaaattgcatcttgaccaggcacagtggctcatgcctataatcctagcactttgggaggccgaggcgggcagatcacctgaggtcaggagttcaagaccagcttggccaacatggtgaaaccccatctctaccaaaaatacaaaaattagccagacgtggtggtgcacgcctttaatcccagctactcgggaggctgaggcaggagaatcacatgaatccaggaggtggaggttgcagtgagctgagatcttcccactgcactccagcctggccaataagacctgtctccagcaagaccctgtctcaaaaaaaaaaaaaaaaattgcatattgactcctgaagaacttcaagccatgttgagatccattcatttgatggacattttctaagtacctgtgagccaggtgctgccatttcaaagtctcttcttaccacgctcctcagtggctagacattttcacgtggccagaaagtcccgactcttgctgggcgtccctggacaagttgccttcctcctctgagcttggcgctccccatctgtatagtggagacccttggcccccctctgtacggaagggccgatgcgaagctgcagttaaaaaaggctcacatgctcctagcctcgtgcagtcaggaggggagaccaggacagttggaaattatgattgcaaatggctttgcattttagatcattcgtgtgtgtggatcagagaaacgcacaagttccctggcacaaaggaagccctcagtagacacgtctagggcaggcttgagagatcagatggcgtgaaaggcttgtgatctgttcgtctcaggctccccctaaaccaaagaaatggaaacagctggttggggttccacgatccagctctatcaaggggctctgagtgtgcacagttgggacctggatgtatcaggtctccctcaggctggagtccactgtcactcattcagccattgaacaaacatacagatgcttacctgctctgtggtcagccttgtgctgctgctgggcgggccaggagcctgcttcagtgtgagcgaggtggatgatattatagctgaagggtccctcctggtcaccctcatctcagcctaggtcaccaggatgtctgagaggggtgggtgcatgggacgggcgtggccagtctcaggtgaggtttgggcccagacctcgttggagtcccagacgttgccaggctgttggaaaattgccttgttcctgtgatgcctgggagttaggtgggtcctggggaggtttcatcctcttgcttgtccacctcagctcggtgtggaggggcagccaataaatcattgtgaatgaaccctca

SEQ ID NO: 194172 - DNA, 410 bp, Homo sapiens
  Payload ID: 18364
  Gene Name: transmembrane protein 38A
  ENST ID: ENST00000599479
  CDS Start-End: 1-347
gcttctcgcgggtgccgctcttccccgtcttcgacctcagttacttcatcgtctccatcctctacctcaagtatgagccaggagcagtcgaactgtcccggcgccaccccatcgcgtcctggctgtgcgccatgctgcattgcttcgggagctacatcctggctgatctgctccttggggagccactgatcgattacttcagcaacaactccagcatcctgctggcctcagctgtctggtacttgattttcttctgccccctggacctcttctacaagtgtgtctgcttcctgcctgtgaaactcatcttcgtggccatgaaggaggtggaggttgcagtgagctgagatcttcccactgcactccagcctggccaataagacctgtctccagcaagaccctgtctcaaa

SEQ ID NO: 194173 - DNA, 3956 bp, Homo sapiens
  Payload ID: 18365
  Gene Name: transmembrane protein 38B
  ENST ID: ENST00000374688
  CDS Start-End: 711-1424
gcagtgtttcctccacaggggtctcagtctgggctctaaagagctcctccaccaagtttctaaattttaataatttcagcctattgttcccccagagtagtaactgctttctggaactgaactctgtgataatgtagtatttactttttgccttttcaataacctagttaacaattttatacctactgagttctatttaaataatggtattttctatctcctgactggacagatacccaggagtagggtttgaacttcctactttctggtttgcatatatcttattaagataactaaagtacttgctacttgccagtcttcagacccggtcagtgtaatgtcatcagtgcagcagatcagtgtgatgtgtgatttctcaatgtgatcaaaatctctggactattttagagagcaagagtgttaacatagacctgaagcaagactgtaatggttgaacaaagcacaaagtgcttctgagattttttgcaaattaataggaagaaaaaagcatttgcttccaagttataagaattgtgttgatttgaccccgtaaaaatactacatcttgaatactagctgcaattacagtcacgacctttctgtgtttataattcatagctattctccaagatccatctgtcttatatttagatcaaacaggagcagctgcattggcatggaagaatcctatttcaagctggtttactgctatgctccactgttttggtggaggaattttatcctgtctactgcttgcagagcctccattgaagtttcttgcaaaccacactaacatattactggcatcttcaatctggtatattacatttttttgcccgcatgacctagtttcccagggctattcatatctacctgttcaactactggcttcgggaatgaaggaagtgaccagaacttggaaaatagtaggtggagtcacacatgctaatagctattacaaaaatggctggatagtcatgatagctattggatgggcccgaggtgcaggtggtaccattataacgaattttgagaggttggtaaaaggagattggaaaccagaaggtgatgaatggctgaagatgtcataccctgccaaggtaaccctgctggggtcagttatcttcacattccagcacacccagcatctggcaatatcaaagcataatcttatgttcctttataccatctttattgtggccacaaagataaccatgatgactacacagacttctactatgacatttgctccttttgaggatacattgagttggatgctatttggctggcagcagccgttttcatcatgtgagaagaaaagtgaagcaaagtcaccttccaatggcgttgggtcattggcctcaaagccggtagatgttgcctcagataatgttaaaaagaaacatactaagaagaatgaataaatttacgtgatgagctctacaaggccaaaaattttttttcttatctacctgttatattgtgctaatttttctatgtatgtgatgtgaaatgaagactatatatatggaatggaggtgacagaaagaaagaaattctttgtttgagggagacttcccctttctggattgtatttgtagagtgttacgagtgtatcatgtgattatgctttaccggtataagagattctgttgtgattatttgaatagttttatattaataaaagaagacaaaattttttaaatgttagaaaaagcagatctgtcattgcaaagtaacaaaaattttaagcttttaaaaatgtagatttttcatatttttaaaatttgaatctatttgagctttagttcagcagaattaaatttttacttgacattatcattaaaattgctaggtatggagaacaattcctattttattttgaacactgagaagagtaaacttttcctaaaacactttatattataaatgaaaataaattgctagtttatattttagatataaacatcatattttttattaatacctacatcaaatggaaaatatctgaaattttttttccatagcaggtattttctactagaagtagttttactacttttcatttagaacagagtatgagtcttaatctgaagtctttttcatgcccttgttttaaaaaaactactttttttggcctcaaaaaaatcaagggtgtaatttttaataaattgttaatcctatgttttgtaattttcattttaggagcttgacttatttttttctctctcataaaaacacatttgttttaattgtaggagaaattttctcagcattttgcatgttctttctaatctttgttggtctgaatatattggtagtaattactgtaattattcaacaaaaagcatatccgttcaaaaatttttccactatgtcttttttctagtggctactgttttagttttctagttgaatatctctgacaagctttcgtatggttttgttatattttcatctacatgtaatgtgttattaattttattaaatgaaaactaatcaccttcatgtggaaatgctctgagaattgtccttaggcatttggtagtaaccagctaaccaagaagaaacagagaaaccagaacttcatatggcagtccatttagatgaagaatgatgatataaaatctggttccttcttagcaaaataaaaaacaaacaagaaaagatactaaatgatgttaattttcttactttatgatttagaagtccagttataatattaaaactctgtgacatagtttcttttaccaaaaccatgaacctactccccgtatcaggtattttcgatggtttagaagtactcaagtcacatcacattcaagttagaagttttttttttgttgttgttattttaaatttttaacaaatataaacaccagcagatactattacttgcttaaaaaattgggagggggcacttttcatagtcttggaatgctaagaagttttatttttaatattgtgacagaaagctttaagtatttaagagctctgtattatatttgatactcttacagttaaaaacttttcaaaattaatacattgttaattattgaccagttttgaagtttgggtttaactgtagttgaaatggaaggactcttgttttacacttgtattaaagataaatttattaaaataagttatttagcaccaatggagtattacattatttttatgttttatatttttcttgaggtagagtttcagaactcatctagtattttgactaatatagtatatattcagtgattactgttcaaatgggacattggtagaaactttattaatctatgcaagtatcctataaccctcaattcaaggctcttttgtaaaaaatgtactggagaacatggcttaggcctgaaacccatcctgaatctattcaggtcacctgtagagtcttgacttggatttgcaaagcagattgttagactccttacccaatgtgaagtgtgaataaggcctataggcctgcctcacacagctaatcagaggtggcactgagaaagtcaagtcctaataggtctccttaaaaaaaaaaaggagacaaaaagctggcaagaacatgagccagcttccctcagtgctgtcactctcaagtaaaacatggccaaatgaatatcaaactggtttatcagattagtcactcttccttactgagggagtatcaagtaagggctggagagagaccagatatgtggagttgttggctttcagtggaaatggtagcctccctgtgggtagagaccaaaaggtagagagatgacagaagggagactctgattagtgtattttttttttgtctattccttaaagcccagacacctttccattaaaatctacttcaaatcacaagttgattacaattgagtggaacatcccatgttgtaaatggaataatgtgttcagaatgctctttctttcccccaataaagccctttatagtgttt

SEQ ID NO: 194174 - DNA, 3525 bp, Homo sapiens
  Payload ID: 18365
  Gene Name: transmembrane protein 38B
  Uniprot ID: Q9NVV0
  ENST ID: ENST00000374692
  CDS Start-End: 118-993
gctggagccggcgcggaggagcgggcggccgcggctgtgccctctcctactcctcaccgcgcgagcgcggggaaccagtagccgcggctgcttcggttgccgcggtcggtggtcgttatggattctccatgggacgagttggctctggccttctcccgcacgtccatgtttcccttttttgacatcgcgcactatctagtgtcagtgatggcggtgaaacgtcagccgggagcagctgcattggcatggaagaatcctatttcaagctggtttactgctatgctccactgttttggtggaggaattttatcctgtctactgcttgcagagcctccattgaagtttcttgcaaaccacactaacatattactggcatcttcaatctggtatattacatttttttgcccgcatgacctagtttcccagggctattcatatctacctgttcaactactggcttcgggaatgaaggaagtgaccagaacttggaaaatagtaggtggagtcacacatgctaatagctattacaaaaatggctggatagtcatgatagctattggatgggcccgaggtgcaggtggtaccattataacgaattttgagaggttggtaaaaggagattggaaaccagaaggtgatgaatggctgaagatgtcataccctgccaaggtaaccctgctggggtcagttatcttcacattccagcacacccagcatctggcaatatcaaagcataatcttatgttcctttataccatctttattgtggccacaaagataaccatgatgactacacagacttctactatgacatttgctccttttgaggatacattgagttggatgctatttggctggcagcagccgttttcatcatgtgagaagaaaagtgaagcaaagtcaccttccaatggcgttgggtcattggcctcaaagccggtagatgttgcctcagataatgttaaaaagaaacatactaagaagaatgaataaatttacgtgatgagctctacaaggccaaaaattttttttcttatctacctgttatattgtgctaatttttctatgtatgtgatgtgaaatgaagactatatatatggaatggaggtgacagaaagaaagaaattctttgtttgagggagacttcccctttctggattgtatttgtagagtgttacgagtgtatcatgtgattatgctttaccggtataagagattctgttgtgattatttgaatagttttatattaataaaagaagacaaaattttttaaatgttagaaaaagcagatctgtcattgcaaagtaacaaaaattttaagcttttaaaaatgtagatttttcatatttttaaaatttgaatctatttgagctttagttcagcagaattaaatttttacttgacattatcattaaaattgctaggtatggagaacaattcctattttattttgaacactgagaagagtaaacttttcctaaaacactttatattataaatgaaaataaattgctagtttatattttagatataaacatcatattttttattaatacctacatcaaatggaaaatatctgaaattttttttccatagcaggtattttctactagaagtagttttactacttttcatttagaacagagtatgagtcttaatctgaagtctttttcatgcccttgttttaaaaaaactactttttttggcctcaaaaaaatcaagggtgtaatttttaataaattgttaatcctatgttttgtaattttcattttaggagcttgacttatttttttctctctcataaaaacacatttgttttaattgtaggagaaattttctcagcattttgcatgttctttctaatctttgttggtctgaatatattggtagtaattactgtaattattcaacaaaaagcatatccgttcaaaaatttttccactatgtcttttttctagtggctactgttttagttttctagttgaatatctctgacaagctttcgtatggttttgttatattttcatctacatgtaatgtgttattaattttattaaatgaaaactaatcaccttcatgtggaaatgctctgagaattgtccttaggcatttggtagtaaccagctaaccaagaagaaacagagaaaccagaacttcatatggcagtccatttagatgaagaatgatgatataaaatctggttccttcttagcaaaataaaaaacaaacaagaaaagatactaaatgatgttaattttcttactttatgatttagaagtccagttataatattaaaactctgtgacatagtttcttttaccaaaaccatgaacctactccccgtatcaggtattttcgatggtttagaagtactcaagtcacatcacattcaagttagaagttttttttttgttgttgttattttaaatttttaacaaatataaacaccagcagatactattacttgcttaaaaaattgggagggggcacttttcatagtcttggaatgctaagaagttttatttttaatattgtgacagaaagctttaagtatttaagagctctgtattatatttgatactcttacagttaaaaacttttcaaaattaatacattgttaattattgaccagttttgaagtttgggtttaactgtagttgaaatggaaggactcttgttttacacttgtattaaagataaatttattaaaataagttatttagcaccaatggagtattacattatttttatgttttatatttttcttgaggtagagtttcagaactcatctagtattttgactaatatagtatatattcagtgattactgttcaaatgggacattggtagaaactttattaatctatgcaagtatcctataaccctcaattcaaggctcttttgtaaaaaatgtactggagaacatggcttaggcctgaaacccatcctgaatctattcaggtcacctgtagagtcttgacttggatttgcaaagcagattgttagactccttacccaatgtgaagtgtgaataaggcctataggcctgcctcacacagctaatcagaggtggcactgagaaagtcaagtcctaataggtctccttaaaaaaaaaaaggagacaaaaagctggcaagaacatgagccagcttccctcagtgctgtcactctcaagtaaaacatggccaaatgaatatcaaactggtttatcagattagtcactcttccttactgagggagtatcaagtaagggctggagagagaccagatatgtggagttgttggctttcagtggaaatggtagcctccctgtgggtagagaccaaaaggtagagagatgacagaagggagactctgattagtgtattttttttttgtctattccttaaagcccagacacctttccattaaaatctacttcaaatcacaagttgattacaattgagtggaacatcccatgttgtaaatggaataatgtgttcagaatgctctttctttcccccaataaagccctttatagtgttt

SEQ ID NO: 194175 - DNA, 502 bp, Homo sapiens
  Payload ID: 18365
  Gene Name: transmembrane protein 38B
  ENST ID: ENST00000434214
  CDS Start-End: 396-502
gctggagccggcgcggaggagcgggcggccgcggctgtgccctctcctactcctcaccgcgcgagcgcggggaaccagtagccgcggctgcttcggttgccgcggtcggtggtcgttatggattctccatgggacgagttggctctggccttctcccgcacgtccatgtttcccttttttgacatcgcgcactatctagtgtcagtgatggcggtgaaacgtcagccggggtctcactgtgttgtctaggctgagtgcattggcactatcatggctcactgcagcctggaactcctgggctcagtgattcttccactttagcctcctgagtagctgagactacaggagcagctgcattggcatggaagaatcctatttcaagctggtttactgctatgctccactgttttggtggaggaattttatcctgtctactgcttgcagagcctccattgaagtttcttgcaaaccacactaacatattactggcatcttcaatctg

SEQ ID NO: 194176 - DNA, 721 bp, Homo sapiens
  Payload ID: 18365
  Gene Name: transmembrane protein 38B
  ENST ID: ENST00000435034
  CDS Start-End: 1-488
tatcctgtctactgcttgcagagcctccattgaagtttcttgcaaaccacactaacatattactggcatcttcaatctggtatattacatttttttgcccgcatgacctagtttcccagggctattcatatctacctgttcaactactggcttcgggaatgaaggaagtgaccagaacttggaaaatagtaggtggagtcacacatgctaatagctattacaaaaatggctggatagtcatgatagctattggatgggcccgaggtgcaggtggtaccattataacgaattttgagaggttggtaaaaggagattggaaaccagaaggtgatgaatggctgaagatgtcataccctgccaaggtaaccctgctggggtcagttatcttcacattccagcacacccagcatctggcaatatcaaagcataatcttatgttcctttataccatctttattgtggccacaaagtctctgaattggagatgatctgtggctgtaattcagataaccatgatgactacacagacttctactatgacatttgctccttttgaggatacattgagttggatgctatttggctggcagcagccgttttcatcatgtgagaagaaaagtgaagcaaagtcaccttccaatggcgttgggtcattggcctcaaagccggtagatgttgcctcagataatgttaaaaagaaacatactaagaagaatgaata

SEQ ID NO: 194177 - DNA, 451 bp, Homo sapiens
  Payload ID: 18365
  Gene Name: transmembrane protein 38B
  ENST ID: ENST00000451560
  CDS Start-End: 1-244
ctggatagtcatgatagctattggatgggcccgaggtgcaggtggtaccattataacgaattttgagaggttggtaaaaggagattggaaaccagaaggtgatgaatggctgaagatgtcataccctgccaaggtaaccctgctggggtcagttatcttcacattccagcacacccagcatctggcaatatcaaagcataatcttatgttcctttataccatctttattgtggccacaaagtagtctctgaattggagatgatctgtggctgtaattcaggtaacaaatattggaggcaaaatctcttcacatgtagtctcttccagtcctcaaatgttgagccgtgtatatttttttctaacagctttattgagatatattttccatactgtgttagtctgttctcatgctgctaataaagacatacctgatactgggtaatttataaag

SEQ ID NO: 194178 - DNA, 4369 bp, Homo sapiens
  Payload ID: 18366
  Gene Name: transmembrane protein 39A
  Uniprot ID: Q9NV64
  ENST ID: ENST00000319172
  CDS Start-End: 422-1888
gcactcgcggctggggcagaccgcggtcgcgtagctgacgtcatcgccgtgcgctgccacgtctgctcagctccgcggtaatggaggctagggatgggtgctgaagtatcaggctctggctctagctttagctctggcactggaactgcgtcggagtctgggtctgagtctggcagcccgaagcctggacaccttttcttgattctctaggcgggggctgcctgcgtccaagcagctggtttgcagcgttccaacgctgggagggagttcccttacctggggtccagtctgtaaagttgtcgccgctttctagggaccccgccccaccggctgggactcttccatgcagttgaaactggttgacaaccattaacctgggttgcaactacaggtggcactggaagcagactggttcctggacatgcccggtggaaggaggggccctagtcggcaacagctaagccgttcagctttaccttctttgcagactttggttggtggaggctgtggcaatggaacaggcttgagaaacaggaatggtagtgctattggccttccagtcccacctatcacagccttaatcaccccaggtcctgttcgtcattgccaaattcctgacttgcctgtggatgggagcctactctttgaattcctttttttcatctacctgttggttgctcttttcattcagtacatcaacatttataaaacagtgtggtggtatccttacaatcatcctgcttcttgtacatcactgaattttcatctcattgattatcatctggcagcattcatcacagtgatgcttgcgaggaggcttgtatgggctctcatctcagaggctactaaggcaggtgcagcatcaatgattcactacatggttctgatatcagctcgcttggtactactcactttgtgtggatgggtactttgttggaccctcgtcaatctctttcgaagccattcagtcctcaatctccttttccttggctacccgtttggtgtttatgttcctctttgctgttttcatcaagatagtagagcacatcttcttctcacagactacaactatgtggttcagcacgaggcagtagaggaaagtgcctcgactgtgggaggcttggccaaatccaaagactttctctccttgttgctggagtcgctaaaagaacagtttaataatgccacacccatccccacccacagttgtcccctatctccagacctcattcgcaatgaagtagaatgtctgaaagcagatttcaaccacagaatcaaggaggttctcttcaactccctcttcagtgcctactatgttgcatttctccccctgtgttttgtgaagagtacccagtactatgacatgcgctggtcatgtgagcacctcattatggtgtggatcaatgcttttgtcatgctcaccacgcaactgttgccatccaaatactgtgatttgctacataaatcagctgctcacctgggcaagtggcagaagttggaacatgggtcctacagcaatgctccacagcacatttggtcagaaaatacaatatggcctcaaggggtgctggtgcggcacagcagatgtttatatagagccatggggccttacaacgtggcagtgccttcagatgtatctcatgcccgcttttatttcttatttcatcgaccattaaggctgttaaatctgctcatccttattgagggcagtgtcgtcttctatcagctctattccttgctgcggtcggagaagtggaaccacacactttccatggctctcatcctcttctgcaactactatgttttatttaaacttctccgggacagaatagtattaggcagggcatactcctacccactcaacagttatgaactcaaggcaaactaagctgcctctcaacaatgagggagaactcagataaaaatattttcatacgttctatttttttcttgtgatttttataaatatttaagatattttatattttgtatactattatgttttgaaagtcgggaagagtaagggatattaaatgtatccgtaaacaaggtgatgtgatctttcatgtgttagtatattcgaataatatacatatgagaggtatgcctgtccagtaaagagattgatttgtttgtatggctctggaataactcattcgtttatgaacacatctcatgtattacttgacacagtacctttggtatgtctgcttttctttcaatcctcattatctttagccctcagctggccagtacttattgctaaagaaagggagatcaatggagttgcctaccagcacccattctcttttagttcagctggctaatagtattggaatacattgggaaaagagtgggttaaagtcctaggtggggttctctttgttgcctaccaggagaaagcagtaggcttcctttctaagatacggactcagctggtctattttaccctgtgacatttaaatatacttttgaataagctactatcctgaggctgagggttttgctgccacttttcctgtgtttccacttctgcttccaaagattttcctcttagttgtttgaaataatactttgccagacaggaagtctttagactgcccacattcatgaagaagatgatgtgtggctggatcagtaggagaagctgagtgcaaatgccatgtgggctagagtatgggaaggttgaaaattccaagtaactgggagagtgggcaagtcctcagctgaacaatcttggatgtagtctagcagcaacccacctacaatggcgttatgtttggagttatgaggggaagtgaaagataagaattacctacagctttgtactcagataatttatatccaaaatttgtgttttaaatttcatactccagaactttcatgtttatgagtattagccttttaagttatgggaggtgatatacttagtccattgatgttgtcacttgtcatctaaacttatgagaccttgtcttagagaatctaaaatatattgtcatatgttttctgtgctgagtttggtttgttacactgtgaagcttttggtgaaacaaaataagacttatgaagtaaaaagaccaatcatgtcgttgacaagctggctctgaaaataattcttgcagaagagttcctgaaaggcttcaccaaggggaagtattgtgaggagtgtttgtaaaaccaaggtacccaatatcagttttatgtttaaatcaataattgtttctttaaatattttgatgtgtatactttttttttaagttaacattatttggcattcagtctgagtctgttcaaccattcaacaaatatatattaaccagtaggcactatattaggccctggggatatagcagtgaatgagaaatgcaaaggtcctacttgcacagagcttacaatatgcgtgggggtgggggagttaggtggtgcagaaaatacagcaaataaatttatgtgtaatataacattccctggtagtagtgataagtgtagcaaagggaaatcaggacaaggaaatagtggtaagaatagcactgctagaaggcatctttgaggagatgatttttaagcaaagaaaaagcaagactgaatcatataaatagctttggggagaattccatgttacagtagcagaaagggcagtgccctgaggtggggacaagttggtatattggaagaatagcaagaaaatatattaggttagttgctttttaaagtagttcagcctaaatatagtggttcttgaggtaggggtgggaagggtagggaatctgccatctttctattctttctgtaggatcttgaaaatatgcttctcttggcagcaacattttcatgagattactcagcagttgagagcaaaatgggtggcatgggcacagagatatctcatcaaaattgccccaacttggctccagcttgggaaagtaacccagaaaaccctgattagagataacagaccagtcttatgaactaatatgatgccccttctggcttgatctgtcttggtcctatcctaagggaatagcacagaaccagatgctggcttggctaaataagtaagtggatataagaaataaataaaaattaattttggctaatggaattgcaaagttcctcctaccctcacctccagatatggcagcatacggggcataagaccgtttagttcaacgtgttctacacattccagctgttttttgtttgtttgttttgttgttttgtttttgtaggggccacgttcatggaagagagaaaaattactagttacccggatatcctattatagttcatgtaacagaagggacactatatttgctcactgatagtagaaaaatgtgtaatcattaaagaatgaccttttttgtaa

SEQ ID NO: 194179 - DNA, 4393 bp, Homo sapiens
  Payload ID: 18366
  Gene Name: transmembrane protein 39A
  Uniprot ID: Q9NV64
  ENST ID: ENST00000438581
  CDS Start-End: 337-777
ggctagggatgggtgctgaagtatcaggctctggctctagctttagctctggcactggaactgcgtcggagtctgggtctgagtctggcagcccgaagcctggacaccttttcttgattctctaggcgggggctgcctgcgtccaagcagctggtttgcagcgttccaacgctgggagggagttcccttacctggggtccagtctgtaaagttgtcgccgctttctagggaccccgccccaccggctgggactcttccatgcagttgaaactggttgacaaccattaacctgggttgcaactacaggtggcactggaagcagactggttcctggacatgcccggtggaaggaggggccctagtcggcaacagctaagccgttcagctttaccttctttgcagactttggttggtggaggctgtggcaatggaacaggcttgagaaacaggaatggtagtgctattggccttccagtcccacctatcacagccttaatcaccccaggtcctgttcgtcattgccaaattcctgacttgcctgtggatgggagcctactctttgaattcctttttttcatctacctgttggttgctcttttcattcagtacatcaacatttataaaacagtgtggtggtatccttacaatcatcctgcttcttgtacatcactgaattttcatctcattgattatcatctggcagcattcatcacagtgatgcttgcgaggaggcttgtatgggctctcatctcagaggtctgtgtgtgtaagctctgattttcaggaaccctatttctggaagcagagtaactggaaatactaagtcaagatctgaaaaccatttgaagttaaccaaaaagcacaggctactaaggcaggtgcagcatcaatgattcactacatggttctgatatcagctcgcttggtactactcactttgtgtggatgggtactttgttggaccctcgtcaatctctttcgaagccattcagtcctcaatctccttttccttggctacccgtttggtgtttatgttcctctttgctgttttcatcaagatagtagagcacatcttcttctcacagactacaactatgtggttcagcacgaggcagtagaggaaagtgcctcgactgtgggaggcttggccaaatccaaagactttctctccttgttgctggagtcgctaaaagaacagtttaataatgccacacccatccccacccacagttgtcccctatctccagacctcattcgcaatgaagtagaatgtctgaaagcagatttcaaccacagaatcaaggaggttctcttcaactccctcttcagtgcctactatgttgcatttctccccctgtgttttgtgaagagtacccagtactatgacatgcgctggtcatgtgagcacctcattatggtgtggatcaatgcttttgtcatgctcaccacgcaactgttgccatccaaatactgtgatttgctacataaatcagctgctcacctgggcaagtggcagaagttggaacatgggtcctacagcaatgctccacagcacatttggtcagaaaatacaatatggcctcaaggggtgctggtgcggcacagcagatgtttatatagagccatggggccttacaacgtggcagtgccttcagatgtatctcatgcccgcttttatttcttatttcatcgaccattaaggctgttaaatctgctcatccttattgagggcagtgtcgtcttctatcagctctattccttgctgcggtcggagaagtggaaccacacactttccatggctctcatcctcttctgcaactactatgttttatttaaacttctccgggacagaatagtattaggcagggcatactcctacccactcaacagttatgaactcaaggcaaactaagctgcctctcaacaatgagggagaactcagataaaaatattttcatacgttctatttttttcttgtgatttttataaatatttaagatattttatattttgtatactattatgttttgaaagtcgggaagagtaagggatattaaatgtatccgtaaacaaggtgatgtgatctttcatgtgttagtatattcgaataatatacatatgagaggtatgcctgtccagtaaagagattgatttgtttgtatggctctggaataactcattcgtttatgaacacatctcatgtattacttgacacagtacctttggtatgtctgcttttctttcaatcctcattatctttagccctcagctggccagtacttattgctaaagaaagggagatcaatggagttgcctaccagcacccattctcttttagttcagctggctaatagtattggaatacattgggaaaagagtgggttaaagtcctaggtggggttctctttgttgcctaccaggagaaagcagtaggcttcctttctaagatacggactcagctggtctattttaccctgtgacatttaaatatacttttgaataagctactatcctgaggctgagggttttgctgccacttttcctgtgtttccacttctgcttccaaagattttcctcttagttgtttgaaataatactttgccagacaggaagtctttagactgcccacattcatgaagaagatgatgtgtggctggatcagtaggagaagctgagtgcaaatgccatgtgggctagagtatgggaaggttgaaaattccaagtaactgggagagtgggcaagtcctcagctgaacaatcttggatgtagtctagcagcaacccacctacaatggcgttatgtttggagttatgaggggaagtgaaagataagaattacctacagctttgtactcagataatttatatccaaaatttgtgttttaaatttcatactccagaactttcatgtttatgagtattagccttttaagttatgggaggtgatatacttagtccattgatgttgtcacttgtcatctaaacttatgagaccttgtcttagagaatctaaaatatattgtcatatgttttctgtgctgagtttggtttgttacactgtgaagcttttggtgaaacaaaataagacttatgaagtaaaaagaccaatcatgtcgttgacaagctggctctgaaaataattcttgcagaagagttcctgaaaggcttcaccaaggggaagtattgtgaggagtgtttgtaaaaccaaggtacccaatatcagttttatgtttaaatcaataattgtttctttaaatattttgatgtgtatactttttttttaagttaacattatttggcattcagtctgagtctgttcaaccattcaacaaatatatattaaccagtaggcactatattaggccctggggatatagcagtgaatgagaaatgcaaaggtcctacttgcacagagcttacaatatgcgtgggggtgggggagttaggtggtgcagaaaatacagcaaataaatttatgtgtaatataacattccctggtagtagtgataagtgtagcaaagggaaatcaggacaaggaaatagtggtaagaatagcactgctagaaggcatctttgaggagatgatttttaagcaaagaaaaagcaagactgaatcatataaatagctttggggagaattccatgttacagtagcagaaagggcagtgccctgaggtggggacaagttggtatattggaagaatagcaagaaaatatattaggttagttgctttttaaagtagttcagcctaaatatagtggttcttgaggtaggggtgggaagggtagggaatctgccatctttctattctttctgtaggatcttgaaaatatgcttctcttggcagcaacattttcatgagattactcagcagttgagagcaaaatgggtggcatgggcacagagatatctcatcaaaattgccccaacttggctccagcttgggaaagtaacccagaaaaccctgattagagataacagaccagtcttatgaactaatatgatgccccttctggcttgatctgtcttggtcctatcctaagggaatagcacagaaccagatgctggcttggctaaataagtaagtggatataagaaataaataaaaattaattttggctaatggaattgcaaagttcctcctaccctcacctccagatatggcagcatacggggcataagaccgtttagttcaacgtgttctacacattccagctgttttttgtttgtttgttttgttgttttgtttttgtaggggccacgttcatggaagagagaaaaattactagttacccggatatcctattatagttcatgtaacagaagggacactatatttgctcactgatagtagaaaaatgtgtaatcattaaagaatgaccttttttgtaa

SEQ ID NO: 194180 - DNA, 868 bp, Homo sapiens
  Payload ID: 18366
  Gene Name: transmembrane protein 39A
  ENST ID: ENST00000490099
  CDS Start-End: 351-491
tccgcggtaatggaggctagggatgggtgctgaagtatcaggctctggctctagctttagctctggcactggaactgcgtcggagtctgggtctgagtctggcagcccgaagcctggacaccttttcttgattctctaggcgggggctgcctgcgtccaagcagctggtttgcagcgttccaacgctgggagggagttcccttacctggggtccagtctgtaaagttgtcgccgctttctagggaccccgccccaccggctgggactcttccatgcagttgaaactggttgacaaccattaacctgggttgcaactacaggtggcactggaagcagactggttcctggacatgcccggtggaaggaggggccctagtcggcaacagctaagccgttcagctttaccttctttgcagactttggttggtggaggctgtggcaatggaacaggcttgagaaacaggtcctgttcgtcattgccaaattcctgacttgcctgtggatgggagcctactctttgaattcctttttttcatctacctgttggttgctcttttcattcagtacatcaacatttataaaacagtgtggtggtatccttacaatcatcctgcttcttgtacatcactgaattttcatctcattgattatcatctggcagcattcatcacagtgatgcttgcgaggaggcttgtatgggctctcatctcagaggctactaaggcaggtgcagcatcaatgattcactacatggttctgatatcagctcgcttggtactactcactttgtgtggatgggtactttgttggaccctcgtcaatctctttcgaagccattcagtcctcaatctccttttccttggctacc

SEQ ID NO: 194181 - DNA, 935 bp, Homo sapiens
  Payload ID: 18366
  Gene Name: transmembrane protein 39A
  ENST ID: ENST00000468676
  CDS Start-End: 361-935
agaccgcggtcgcgtagctgacgtcatcgccgtgcgctgccacgtctgctcagctccgcggtaatggaggctagggatgggtgctgaagtatcaggctctggctctagctttagctctggcactggaactgcgtcggagtctgggtctgagtctggcagcccgaagcctggacaccttttcttgattctctaggcgggggctgcctgcgtccaagcagctggtttgcagcgttccaacgctgggagggagttcccttacctggggtccagtctgtaaagttgtcgccgctttctagggaccccgccccaccggctgggactcttccatgcgtggcactggaagcagactggttcctggacatgcccggtggaaggaggggccctagtcggcaacagctaagccgttcagctttaccttctttgcagactttggttggtggaggctgtggcaatggaacaggcttgagaaacaggaatggtagtgctattggccttccagtcccacctatcacagccttaatcaccccaggtcctgttcgtcattgccaaattcctgacttgcctgtggatgggagcctactctttgaattcctttttttcatctacctgttggttgctcttttcattcagtacatcaacatttataaaacagtgtggtggtatccttacaatcatcctgcttcttgtacatcactgaattttcatctcattgattatcatctggcagcattcatcacagtgatgcttgcgaggaggcttgtatgggctctcatctcagaggctactaaggcaggtgcagcatcaatgattcactacatggttctgatatcagctcgcttggtactactcactttgtgtggatgggtactttgttggaccctcgtcaatctctttcgaagccattcagtcctcaatctccttttccttggctaccc

SEQ ID NO: 194182 - DNA, 588 bp, Homo sapiens
  Payload ID: 18366
  Gene Name: transmembrane protein 39A
  ENST ID: ENST00000461654
  CDS Start-End: 253-588
gacgtcatcgccgtgcgctgccacgtctgctcagctccgcggcgggggctgcctgcgtccaagcagctggtttgcagcgttccaacgctgggagggagttcccttacctggggtccagtctgtaaagttgtcgccgctttctagggaccccgccccaccggctgggactcttccatgcagttgaaactggttgacaaccattaacctgggttgcaactacaggtggcactggaagcagactggttcctggacatgcccggtggaaggaggggccctagtcggcaacagctaagccgttcagctttaccttctttgcagactttggttggtggaggctgtggcaatggaacaggcttgagaaacaggaatggtagtgctattggccttccagtcccacctatcacagccttaatcaccccaggtcctgttcgtcattgccaaattcctgacttgcctgtggatgggagcctactctttgaattcctttttttcatctacctgttggttgctcttttcattcagtacatcaacatttataaaacagtgtggtggtatccttacaatcatcctgcttcttgtacatcactg

SEQ ID NO: 194183 - DNA, 590 bp, Homo sapiens
  Payload ID: 18366
  Gene Name: transmembrane protein 39A
  ENST ID: ENST00000497993
  CDS Start-End: 171-590
gtggggaggataaacgaatggaccagttgcctatcctccctccctggcacccctgggaaaataggtctgcagccagaaaactgaaggtcagagaggagttgaaactggttgacaaccattaacctgggttgcaactacaggtggcactggaagcagactggttcctggacatgcccggtggaaggaggggccctagtcggcaacagctaagccgttcagctttaccttctttgcagactttggttggtggaggctgtggcaatggaacaggcttgagaaacaggaatggtagtgctattggccttccagtcccacctatcacagccttaatcaccccaggtcctgttcgtcattgccaaattcctgacttgcctgtggatgggagcctactctttgaattcctttttttcatctacctgttggttgctcttttcattcagtacatcaacatttataaaacagtgtggtggtatccttacaatcatcctgcttcttgtacatcactgaattttcatctcattgattatcatctggcagcattcatcacagtgatgcttgcgaggaggcttgtatgggctctcatctcagag

SEQ ID NO: 194184 - DNA, 852 bp, Homo sapiens
  Payload ID: 18366
  Gene Name: transmembrane protein 39A
  ENST ID: ENST00000491685
  CDS Start-End: 356-852
tcagctccgcggtaatggaggctagggatgggtgctgaagtatcaggctctggctctagctttagctctggcactggaactgcgtcggagtctgggtctgagtctggcagcccgaagcctggacaccttttcttgattctctaggcgggggctgcctgcgtccaagcagctggtttgcagcgttccaacgctgggagggagttcccttacctggggtccagtctgtaaagttgtcgccgctttctagggaccccgccccaccggctgggactcttccatgcagttgaaactggttgacaaccattaacctgggttgcaactacaggtggcactggaagcagactggttcctggacatgcccggtggaaggaggggccctagtcggcaacagctaagccgttcagctttaccttctttgcagactttggttggtggaggctgtggcaatggaacaggcttgagaaacaggtttggtgtttatgttcctctttgctgttttcatcaagatagtagagcacatcttcttctcacagactacaactatgtggttcagcacgaggcagtagaggaaagtgcctcgactgtgggaggcttggccaaatccaaagactttctctccttgttgctggagtcgctaaaagaacagtttaataatgccacacccatccccacccacagttgtcccctatctccagacctcattcgcaatgaagtagaatgtctgaaagcagatttcaaccacagaatcaaggaggttctcttcaactccctcttcagtgcctactatgttgcatttctccccctgtgttttgtgaagagtacccagtactatgacatgcgctggtcatgtga

SEQ ID NO: 194185 - DNA, 3043 bp, Homo sapiens
  Payload ID: 18366
  Gene Name: transmembrane protein 39A
  ENST ID: ENST00000473684
  CDS Start-End: 1-57
tcctacagcaatgctccacagcacatattagcacaggccttcaagcccaggaactgaaagagattgggccaggctgaaaagaaacccgactgtgggcaaaggacagatttcaataaaaattgaaaatacaatccacagtactagtactgtacatcttcaggctactgatggcacatggccatgaggtgtatcatcactttaatgctgttggtcagaaaatacaatatggcctcaaggggtgctggtgcggcacagcagatgtttatatagagccatggggccttacaacgtggcagtgccttcagatgtatctcatgcccgcttttatttcttatttcatcgaccattaaggctgttaaatctgctcatccttattgagggcagtgtcgtcttctatcagctctattccttgctgcggtcggagaagtggaaccacacactttccatggctctcatcctcttctgcaactactatgttttatttaaacttctccgggacagaatagtattaggcagggcatactcctacccactcaacagttatgaactcaaggcaaactaagctgcctctcaacaatgagggagaactcagataaaaatattttcatacgttctatttttttcttgtgatttttataaatatttaagatattttatattttgtatactattatgttttgaaagtcgggaagagtaagggatattaaatgtatccgtaaacaaggtgatgtgatctttcatgtgttagtatattcgaataatatacatatgagaggtatgcctgtccagtaaagagattgatttgtttgtatggctctggaataactcattcgtttatgaacacatctcatgtattacttgacacagtacctttggtatgtctgcttttctttcaatcctcattatctttagccctcagctggccagtacttattgctaaagaaagggagatcaatggagttgcctaccagcacccattctcttttagttcagctggctaatagtattggaatacattgggaaaagagtgggttaaagtcctaggtggggttctctttgttgcctaccaggagaaagcagtaggcttcctttctaagatacggactcagctggtctattttaccctgtgacatttaaatatacttttgaataagctactatcctgaggctgagggttttgctgccacttttcctgtgtttccacttctgcttccaaagattttcctcttagttgtttgaaataatactttgccagacaggaagtctttagactgcccacattcatgaagaagatgatgtgtggctggatcagtaggagaagctgagtgcaaatgccatgtgggctagagtatgggaaggttgaaaattccaagtaactgggagagtgggcaagtcctcagctgaacaatcttggatgtagtctagcagcaacccacctacaatggcgttatgtttggagttatgaggggaagtgaaagataagaattacctacagctttgtactcagataatttatatccaaaatttgtgttttaaatttcatactccagaactttcatgtttatgagtattagccttttaagttatgggaggtgatatacttagtccattgatgttgtcacttgtcatctaaacttatgagaccttgtcttagagaatctaaaatatattgtcatatgttttctgtgctgagtttggtttgttacactgtgaagcttttggtgaaacaaaataagacttatgaagtaaaaagaccaatcatgtcgttgacaagctggctctgaaaataattcttgcagaagagttcctgaaaggcttcaccaaggggaagtattgtgaggagtgtttgtaaaaccaaggtacccaatatcagttttatgtttaaatcaataattgtttctttaaatattttgatgtgtatactttttttttaagttaacattatttggcattcagtctgagtctgttcaaccattcaacaaatatatattaaccagtaggcactatattaggccctggggatatagcagtgaatgagaaatgcaaaggtcctacttgcacagagcttacaatatgcgtgggggtgggggagttaggtggtgcagaaaatacagcaaataaatttatgtgtaatataacattccctggtagtagtgataagtgtagcaaagggaaatcaggacaaggaaatagtggtaagaatagcactgctagaaggcatctttgaggagatgatttttaagcaaagaaaaagcaagactgaatcatataaatagctttggggagaattccatgttacagtagcagaaagggcagtgccctgaggtggggacaagttggtatattggaagaatagcaagaaaatatattaggttagttgctttttaaagtagttcagcctaaatatagtggttcttgaggtaggggtgggaagggtagggaatctgccatctttctattctttctgtaggatcttgaaaatatgcttctcttggcagcaacattttcatgagattactcagcagttgagagcaaaatgggtggcatgggcacagagatatctcatcaaaattgccccaacttggctccagcttgggaaagtaacccagaaaaccctgattagagataacagaccagtcttatgaactaatatgatgccccttctggcttgatctgtcttggtcctatcctaagggaatagcacagaaccagatgctggcttggctaaataagtaagtggatataagaaataaataaaaattaattttggctaatggaattgcaaagttcctcctaccctcacctccagatatggcagcatacggggcataagaccgtttagttcaacgtgttctacacattccagctgttttttgtttgtttgttttgttgttttgtttttgtaggggccacgttcatggaagagagaaaaattactagttacccggatatcctattatagttcatgtaacagaagggacactatatttgctcactgatagtagaaaaatgtgtaatcattaaagaatgaccttttttgtaa

SEQ ID NO: 194186 - DNA, 1813 bp, Homo sapiens
  Payload ID: 18367
  Gene Name: transmembrane protein 39B
  Uniprot ID: Q9GZU3
  ENST ID: ENST00000336294
  CDS Start-End: 147-1625
gtatgcaaatgtagcggcgcggcgggagcgcgcggctgatacccgggactgggctgcggcggttagtcctctcccggccgccgtcgcctccgacatattgcccgcaggagctgcggcggcgaagcggagagcaccggggggaggagatgggaggacgaagaggtcccaacaggacatcttactgtcgaaatccgctctgtgagccgggatcctcggggggctctagtggaagccacacttccagtgcatcggtgaccagtgttcgttcccgcaccaggagcagttctggaacaggcctctccagccctcctctggccacccaaactgttgtgcctctacagcactgcaagatccccgagctgccagtccaggccagcattctgtttgagttgcagctcttcttctgccagctcatagcactcttcgtccactacatcaacatctacaagacagtgtggtggtatccaccttcccacccaccctcccacacctccctgaacttccatctgatcgacttcaacttgctgatggtgaccaccatcgttctgggccgccgcttcattgggtccatcgtgaaggaggcctctcagagggggaaggtctccctctttcgctccatcctgctgttcctcactcgcttcaccgttctcacggcaacaggctggagtctgtgccgatccctcatccacctcttcaggacctactccttcctgaacctcctgttcctctgctatccgtttgggatgtacattccgttcctgcagctgaattgcgacctccgcaagacaagcctcttcaaccacatggcctccatggggccccgggaggcggtcagtggcctggcaaagagccgggactacctcctgacactgcgggagacgtggaagcagcacacaagacagctgtatggcccggacgccatgcccacccatgcctgctgcctgtcacccagcctcatccgcagtgaggtggagttcctcaagatggacttcaactggcgcatgaaggaagtgctcgtcagctccatgctgagcgcctactatgtggcctttgtgcctgtctggttcgtgaagaacacacattactatgacaagcgctggtcctgtgaactcttcctgctggtgtccatcagcacctccgtgatcctcatgcagcacctgctgcctgccagctactgtgacctgctgcacaaggccgccgcccatctgggctgttggcagaaggtggacccagcgctgtgctccaacgtgctgcagcacccgtggactgaagaatgcatgtggccgcagggcgtgctggtgaagcacagcaagaacgtctacaaagccgtaggccactacaacgtggctatcccctctgacgtctcccacttccgcttccatttctttttcagcaaacccctgcggatcctcaacatcctcctgctgctggagggcgctgtcattgtctatcagctgtactccctaatgtcctctgaaaagtggcaccagaccatctcgctggccctcatcctcttcagcaactactatgccttcttcaagctgctccgggaccgcttggtattgggcaaggcctactcatactctgctagcccccagagagacctggaccaccgtttctcctgagccctggggtcacctcagggacagcgtccaggcttcagccaagggctccctggcaaggggctgttgggtagaagtggtggtgggggggacaaaagacaaaaaaatccaccagagctttgtatttttgttacgtactgtttctttgataattgatgtgataaggaaaaaagtcctatttttatactccc

SEQ ID NO: 194187 - DNA, 1538 bp, Homo sapiens
  Payload ID: 18367
  Gene Name: transmembrane protein 39B
  ENST ID: ENST00000441402
  CDS Start-End: 106-687
cccgggactgggctgcggcggttagtcctctcccggccgccgtcgcctccgacatattgcccgcaggagctgcggcggcgaagcggagagcaccggggggaggagatgggaggacgaagaggtcccaacaggacatcttactgtcgaaatccgctctgtgagccgggatcctcggggggctctagtggaagccacacttccagtgcatcggtgaccagtgttcgttcccgcaccaggagcagttctggaacaggcctctccagccctcctctggccacccaaactgttgtgcctctacagcactgcaagatccccgagctgccagtccaggccagcattctgtttgagttgcagctcttcttctgccagctcatagcactcttcgtccactacatcaacatctacaagacagtgtggtggtatccaccttcccacccaccctcccacacctccctggtttgggatgtacattccgttcctgcagctgaattgcgacctccgcaagacaagcctcttcaaccacatggcctccatggggccccgggaggcggtcagtggcctggcaaagagccgggactacctcctgacactgcgggagacgtggaagcagcacacaagacagctgtatggcccggacgccatgcccacccatgcctgctgcctgtcacccagcctcatccgcagtgaggtggagttcctcaagatggacttcaactggcgcatgaaggaagtgctcgtcagctccatgctgagcgcctactatgtggcctttgtgcctgtctggttcgtgaagaacacacattactatgacaagcgctggtcctgtgaactcttcctgctggtgtccatcagcacctccgtgatcctcatgcagcacctgctgcctgccagctactgtgacctgctgcacaaggccgccgcccatctgggctgttggcagaaggtggacccagcgctgtgctccaacgtgctgcagcacccgtggactgaagaatgcatgtggccgcagggcgtgctggtgaagcacagcaagaacgtctacaaagccgtaggccactacaacgtggctatcccctctgacgtctcccacttccgcttccatttctttttcagcaaacccctgcggatcctcaacatcctcctgctgctggagggcgctgtcattgtctatcagctgtactccctaatgtcctctgaaaagtggcaccagaccatctcgctggccctcatcctcttcagcaactactatgccttcttcaagctgctccgggaccgcttggtattgggcaaggcctactcatactctgctagcccccagagagacctggaccaccgtttctcctgagccctggggtcacctcagggacagcgtccaggcttcagccaagggctccctggcaaggggctgttgggtagaagtggtggtgggggggacaaaagacaaaaaaatccaccagagctttgtatttttgttacgtactgtttctttgataattgatgtgataaggaaaaaagtcctatttttatactcccaacaa

SEQ ID NO: 194188 - DNA, 690 bp, Homo sapiens
  Payload ID: 18367
  Gene Name: transmembrane protein 39B
  ENST ID: ENST00000438825
  CDS Start-End: 114-690
ggctgatacccgggactgggctgcggcggttagtcctctcccggccgccgtcgcctccgacatattgcccgcaggagctgcggcggcgaagcggagagcaccggggggaggagatgggaggacgaagaggtcccaacaggacatcttactgtcgaaatccgctctgtgagccgggatcctcggggggctctagtggaagccacacttccagtgcatcggtgaccagtgttcgttcccgcaccaggagcagttctggaacaggcctctccagccctcctctggccacccaaactgttgtgcctctacagcactgcaagatccccgagctgccagtccaggccagcattctgtttgagttgcagctcttcttctgccagctcatagcactcttcgtccactacatcaacatctacaagacagtgtggtggtatccaccttcccacccaccctcccacacctccctggcctctcagagggggaaggtctccctctttcgctccatcctgctgttcctcactcgcttcaccgttctcacggcaacaggctggagtctgtgccgatccctcatccacctcttcaggacctactccttcctgaacctcctgttcctctgctatccgtttgggatgtacattccgttcctgcagctgaattgcgacctccgcaagacaagcctcttcaaccacatgg

SEQ ID NO: 194189 - DNA, 984 bp, Homo sapiens
  Payload ID: 18368
  Gene Name: transmembrane protein 40
  Uniprot ID: Q8WWA1
  ENST ID: ENST00000264728
  CDS Start-End: 216-917
tttttaacttgtttaactaagggtggctcctgttgagaggtgacagcgtgttggcagccctcgcagccctcgcttgctcttggtgcctcctcagcctcggcgcccactctggccgcacttgaggagcccttcagcccgctgctgcactgtgggagtcccttcctgggatggccgaggccggagccggctccctcagccttccgggaggaaaagccatggagacttcagcatcctcctcccagcctcaggacaacagtcaagtccacagagaaacagaagatgtagactatggagagacagatttccacaagcaagatgggaaggctggactcttttcccaagaacaatatgagagaaacaagtcttcttcctcctcctcctcttcctcctcatcctcctcatcttcttcatcctcctcctcctcagagagcaatgatgaggaccagcaacccagagcaaccggaaaacatcgacggagcctgggggctggatacccccacgggaacggctcacccggtcctgggcatggggagcctgacgttttgaaggatgagcttcaactctatggagatgctcctggagaggtggtaccctctggggaatcaggactccgaaggagaggctctgacccagcaagtggagaagtggaggcctctcagttaagaagactgaatataaagaaagatgatgagtttttccatttcgtcctcctgtgctttgccatcggggccttgctggtgtgttatcactattacgcagactggttcatgtctcttggggtcggcctgctcaccttcgcctccctggaaaccgttggcatctacttcggactagtgtaccgtatccacagcgtcctccaaggcttcatccccctcttccagaagtttaggctgacagggttcaggaagactgactgaggccacttccaggtgggcagcagaggcaggccccagtgtgaccaccactgcgacccctgagcccaca

SEQ ID NO: 194190 - DNA, 2308 bp, Homo sapiens
  Payload ID: 18368
  Gene Name: transmembrane protein 40
  Uniprot ID: Q8WWA1
  ENST ID: ENST00000314124
  CDS Start-End: 358-1059
agagcttggtacagccaagggtggcacagctgcccccatttcactgtctcctggagtctgaaggcatggctgtggccctgaggcaggaccaggcatgtagctgccccacctgcccctccgcagtgttgtagggaagagtcaagtcagacaggaaggcctggggctgatagcaccagcaggaaggaatgccatcccagtgagcgagtggggcccagggacaacgtcacggtagtcccgccctccttgctgtcacaggtgcagcctgtcctctccttcccctgaccagcccagcatccacatagtctacacagagctccccttgctgcccagacaagctgaaggaccacaggaaaagccatggagacttcagcatcctcctcccagcctcaggacaacagtcaagtccacagagaaacagaagatgtagactatggagagacagatttccacaagcaagatgggaaggctggactcttttcccaagaacaatatgagagaaacaagtcttcttcctcctcctcctcttcctcctcatcctcctcatcttcttcatcctcctcctcctcagagagcaatgatgaggaccagcaacccagagcaaccggaaaacatcgacggagcctgggggctggatacccccacgggaacggctcacccggtcctgggcatggggagcctgacgttttgaaggatgagcttcaactctatggagatgctcctggagaggtggtaccctctggggaatcaggactccgaaggagaggctctgacccagcaagtggagaagtggaggcctctcagttaagaagactgaatataaagaaagatgatgagtttttccatttcgtcctcctgtgctttgccatcggggccttgctggtgtgttatcactattacgcagactggttcatgtctcttggggtcggcctgctcaccttcgcctccctggaaaccgttggcatctacttcggactagtgtaccgtatccacagcgtcctccaaggcttcatccccctcttccagaagtttaggctgacagggttcaggaagactgactgaggccacttccaggtgggcagcagaggcaggccccagtgtgaccaccactgcgacccctgagcccacaagggcagagcagcattctgagagacgcacaggagaccaagccagaccaataaacagaacacttttccttccatgtggtctgaatgttggcaccagcccgggcaggggcatctcatttgggcagtactgctgtgcaacccagctgcaaggatggaaggcagagggtgggtgtggggcctgaggcttcacagtacctggaccagcaggaagattctgggaggtcactgctctcagaggacagcaagggaccctgagctctgcaagctgtgatctgtctgggttcatggtttttctcaaatcccaggctatctgcatgcgctctcaggtgctaccgagccatcctgggagagatggatggtccactgctttgaggcagggagccatcgggctggggccccttggtgaacctgatgcaggtaagatgctgaggactaaaaccattttttttgcacccaaaaaaaaaggcaggaaaatgatcatcagaaactaaatggcagccaggcatgggggctcacaactgtaatcctcgcactttgggaggctcaggctaagggtcgcttgaagctgagagttcaagaccaacctgggcaacatagtgagacccccatctctacaatttttttttaatgaccaaatgtggcggtacatacctgtacatacctgcggttccagctactcaagaggctgaggcaggaggactgcttgagcccaggagttcagggctgcagtgaggtacgatcaagccactgcactccagcctgggcgacagagcaagatcgtttctctaaaattaaaaaaaaaaaaaaaagacaaataaaaattgcatgtatttgtagtgtacaacatgttttgaaatatgtggaatggctaaatcaagctaattaacatatgtatccctcacataccctttttttatgatgagaacagtaaaaacctactgtcagcaatttgcaaagtatacaatacattgttattaactatggtcaccatgctatgtgattgatatcctgaacttgaactgagttcttgatggtcacagacatgctgttctcaaaactcagaagggtaacttctgaggttttgatttcaagtacttgtatgtaacctaatttaacgggagcccagagtgcacagatcagatatttattaaacatataaataaaacacagttttcacgatagaa

SEQ ID NO: 194191 - DNA, 431 bp, Homo sapiens
  Payload ID: 18368
  Gene Name: transmembrane protein 40
  ENST ID: ENST00000428020
  CDS Start-End: 1-294
ctccatccaggtcctgggcatggggagcctgacgttttgaaggatgagcttcaactctatggagatgagtttttccatttcgtcctcctgtgctttgccatcggggccttgctggtgtgttatcactattacgcagactggttcatgtctcttggggtcggcctgctcaccttcgcctccctggaaaccgttggcatctacttcggactagtgtaccgtatccacagcgtcctccaaggcttcatccccctcttccagaagtttaggctgacagggttcaggaagactgactgaggccacttccaggtgggcagcagaggcaggccccagtgtgaccaccactgcgacccctgagcccacaagggcagagcagcattctgagagacgcacaggagaccaagccagaccaataaacagaacacttttccttc

SEQ ID NO: 194192 - DNA, 1785 bp, Homo sapiens
  Payload ID: 18368
  Gene Name: transmembrane protein 40
  Uniprot ID: Q8WWA1
  ENST ID: ENST00000435575
  CDS Start-End: 96-569
ctgtcctctccttcccctgaccagcccagcatccacatagtctacacagagctccccttgctgcccagacaagctgaaggaccacaggaaaagccatggagacttcagcatcctcctcccagcctcaggacaacagtcaagtccacagagaaacagaagatgtagactgtcctgggcatggggagcctgacgttttgaaggatgagcttcaactctatggagatgctcctggagaggtggtaccctctggggaatcaggactccgaaggagaggctctgacccagcaagtggagaagtggaggcctctcagttaagaagactgaatataaagaaagatgatgagtttttccatttcgtcctcctgtgctttgccatcggggccttgctggtgtgttatcactattacgcagactggttcatgtctcttggggtcggcctgctcaccttcgcctccctggaaaccgttggcatctacttcggactagtgtaccgtatccacagcgtcctccaaggcttcatccccctcttccagaagtttaggctgacagggttcaggaagactgactgaggccacttccaggtgggcagcagaggcaggccccagtgtgaccaccactgcgacccctgagcccacaagggcagagcagcattctgagagacgcacaggagaccaagccagaccaataaacagaacacttttccttccatgtggtctgaatgttggcaccagcccgggcaggggcatctcatttgggcagtactgctgtgcaacccagctgcaaggatggaaggcagagggtgggtgtggggcctgaggcttcacagtacctggaccagcaggaagattctgggaggtcactgctctcagaggacagcaagggaccctgagctctgcaagctgtgatctgtctgggttcatggtttttctcaaatcccaggctatctgcatgcgctctcaggtgctaccgagccatcctgggagagatggatggtccactgctttgaggcagggagccatcgggctggggccccttggtgaacctgatgcaggtaagatgctgaggactaaaaccattttttttgcacccaaaaaaaaaggcaggaaaatgatcatcagaaactaaatggcagccaggcatgggggctcacaactgtaatcctcgcactttgggaggctcaggctaagggtcgcttgaagctgagagttcaagaccaacctgggcaacatagtgagacccccatctctacaatttttttttaatgaccaaatgtggcggtacatacctgtacatacctgcggttccagctactcaagaggctgaggcaggaggactgcttgagcccaggagttcagggctgcagtgaggtacgatcaagccactgcactccagcctgggcgacagagcaagatcgtttctctaaaattaaaaaaaaaaaaaaaagacaaataaaaattgcatgtatttgtagtgtacaacatgttttgaaatatgtggaatggctaaatcaagctaattaacatatgtatccctcacataccctttttttatgatgagaacagtaaaaacctactgtcagcaatttgcaaagtatacaatacattgttattaactatggtcaccatgctatgtgattgatatcctgaacttgaactgagttcttgatggtcacagacatgctgttctcaaaactcagaagggtaacttctgaggttttgatttcaagtacttgtatgtaacctaatttaacgggagcccagagtgcacagatcagatatttattaa

SEQ ID NO: 194193 - DNA, 1547 bp, Homo sapiens
  Payload ID: 18368
  Gene Name: transmembrane protein 40
  Uniprot ID: Q8WWA1
  ENST ID: ENST00000435218
  CDS Start-End: 78-689
gaccagcccagcatccacatagtctacacagagctccccttgctgcccagacaagctgaaggaccacaggaaaagccatggagacttcagcatcctcctcccagcctcaggacaacagtcaagtccacagagaaacagaagatgtagactatggagagacagatttccacaagcaagatgggaaggctggactcttttcccaagaacaatatgagagaaacaagtcttcttcctcctcctcctcttcctcctcatcctcctcatcttcttcatcctcctcctcctcaggtcctgggcatggggagcctgacgttttgaaggatgagcttcaactctatggagatgctcctggagaggtggtaccctctggggaatcaggactccgaaggagaggctctgacccagcaagtggagaagtggaggcctctcagttaagaagactgaatataaagaaagatgatgagtttttccatttcgtcctcctgtgctttgccatcggggccttgctggtgtgttatcactattacgcagactggttcatgtctcttggggtcggcctgctcaccttcgcctccctggaaaccgttggcatctacttcggactagtgtaccgtatccacagcgtcctccaaggcttcatccccctcttccagaagtttaggctgacagggttcaggaagactgactgaggccacttccaggtgggcagcagaggcaggccccagtgtgaccaccactgcgacccctgagcccacaagggcagagcagcattctgagagacgcacaggagaccaagccagaccaataaacagaacacttttccttccatgtggtctgaatgttggcaccagcccgggcaggggcatctcatttgggcagtactgctgtgcaacccagctgcaaggatggaaggcagagggtgggtgtggggcctgaggcttcacagtacctggaccagcaggaagattctgggaggtcactgctctcagaggacagcaagggaccctgagctctgcaagctgtgatctgtctgggttcatggtttttctcaaatcccaggctatctgcatgcgctctcaggtgctaccgagccatcctgggagagatggatggtccactgctttgaggcagggagccatcgggctggggccccttggtgaacctgatgcaggtaagatgctgaggactaaaaccattttttttgcacccaaaaaaaaaggcaggaaaatgatcatcagaaactaaatggcagccaggcatgggggctcacaactgtaatcctcgcactttgggaggctcaggctaagggtcgcttgaagctgagagttcaagaccaacctgggcaacatagtgagacccccatctctacaatttttttttaatgaccaaatgtggcggtacatacctgtacatacctgcggttccagctactcaagaggctgaggcaggaggactgcttgagcccaggagttcagggctgcagtgaggtacgatcaagccactgcactccagcctgggcgacagagcaagatcgtttctctaaaatt

SEQ ID NO: 194194 - DNA, 1060 bp, Homo sapiens
  Payload ID: 18369
  Gene Name: transmembrane protein 41A
  ENST ID: ENST00000296254
  CDS Start-End: 27-305
cccgcgggccggggtgcggagccgacatgcgcccgcttctcggcctccttctggtcttcgccggctgcaccttcgccttgtacttgctgtcgacgcgactgccccgcgggcggagactgggctccaccgaggaggctggaggcaggtcgctgtggttcccctccgacctggcagagctgcgggagctctctgaggtccttcgagagtaccggaaggagcaccaggcctacgtgttcctgctcttctgcggcgcctacctctacaaacagggctttgccatccccggctccagcttcctggtttgatcccatataatttcatctgtgtgcagacagggtccatcctgtcaaccctaacctctctggatgctcttttctcctgggacactgtctttaagctgttggccattgccatggtggcattaattcctggaaccctcattaaaaaatttagtcagaaacatctgcaattgaatgaaacaagtactgctaatcatatacacagtagaaaagacacatgatctggattttctgtttgccacatccctggactcagttgcttatttgtgtaatggatgtggtcctctaaagcccctcattgtttttgattgccttctataggtgatgtggacactgtgcatcaatgtgcagtgtcttttcagaaaggacactctgctcttgaaggtgtattacatcaggttttcaaaccagccctggtgtagcagacactgcaacagatgcctcctagaaaatgctgtttgtggccgggcgcggtggctcacgcctgtaatcccagcactttgggaggccgaggccggtgattcacaaggtcaggagttcaagaccagcctggccaagatggtgaaatcctgtctctaataaaaatacaaaaattagccaggcgtggtggcaggcacctgtaatcccagctactcgggaggctgaggcaggagaattgcttgaaccaaggtggcagaggttgcagtaagccaagatcacaccactgcactccagcctgggtgatagagtgagacactgtcttgacaaaaaaaaaaaaaaaa

SEQ ID NO: 194195 - DNA, 541 bp, Homo sapiens
  Payload ID: 18369
  Gene Name: transmembrane protein 41A
  ENST ID: ENST00000382227
  CDS Start-End: 75-374
agtccgcccgccgctgcgtcccggagtgcaagtgagcttctcggctgccccgcgggccggggtgcggagccgacatgcgcccgcttctcggcctccttctggtcttcgccggctgcaccttcgccttgtacttgctgtcgacgcgactgccccgcgggcggagactgggctccaccgaggaggctggaggcaggtcgctgtggttcccctccgacctggcagagctgcgggagctctctgaggtccttcgagagtaccggaaggagcaccaggcctacgtgttcctgctcttctgcggcgcctacctctacaaacagggctttgccatccccggctccagcttcctgggtacctatgatggcgggcctgcatgagatgctggaagacgtgtagaactgagtgaaattttctttgtcctcagagaggtgatggctctattaaagtgtccagagagaactcatctcacaccaagggcataggagcagccacacttaagatcaactgtccttaaccacagcatcatgatacgctggattaccca

SEQ ID NO: 194196 - DNA, 2827 bp, Homo sapiens
  Payload ID: 18369
  Gene Name: transmembrane protein 41A
  Uniprot ID: Q96HV5
  ENST ID: ENST00000421852
  CDS Start-End: 97-891
agtgaacgtgctccgcgggctcagtccgcccgccgctgcgtcccggagtgcaagtgagcttctcggctgccccgcgggccggggtgcggagccgacatgcgcccgcttctcggcctccttctggtcttcgccggctgcaccttcgccttgtacttgctgtcgacgcgactgccccgcgggcggagactgggctccaccgaggaggctggaggcaggtcgctgtggttcccctccgacctggcagagctgcgggagctctctgaggtccttcgagagtaccggaaggagcaccaggcctacgtgttcctgctcttctgcggcgcctacctctacaaacagggctttgccatccccggctccagcttcctgaatgttttagctggtgccttgtttgggccatggctggggcttctgctgtgctgtgtgttgacctcggtgggtgccacatgctgctacctgctctccagtatttttggcaaacagttggtggtgtcctactttcctgataaagtggccctgctgcagagaaaggtggaggagaacagaaacagcttgttttttttcttattgtttttgagacttttccccatgacaccaaactggttcttgaacctctcggccccaattctgaacattcccatcgtgcagttcttcttctcagttcttatcggtttgatcccatataatttcatctgtgtgcagacagggtccatcctgtcaaccctaacctctctggatgctcttttctcctgggacactgtctttaagctgttggccattgccatggtggcattaattcctggaaccctcattaaaaaatttagtcagaaacatctgcaattgaatgaaacaagtactgctaatcatatacacagtagaaaagacacatgatctggattttctgtttgccacatccctggactcagttgcttatttgtgtaatggatgtggtcctctaaagcccctcattgtttttgattgccttctataggtgatgtggacactgtgcatcaatgtgcagtgtcttttcagaaaggacactctgctcttgaaggtgtattacatcaggttttcaaaccagccctggtgtagcagacactgcaacagatgcctcctagaaaatgctgtttgtggccgggcgcggtggctcacgcctgtaatcccagcactttgggaggccgaggccggtgattcacaaggtcaggagttcaagaccagcctggccaagatggtgaaatcctgtctctaataaaaatacaaaaattagccaggcgtggtggcaggcacctgtaatcccagctactcgggaggctgaggcaggagaattgcttgaaccaaggtggcagaggttgcagtaagccaagatcacaccactgcactccagcctgggtgatagagtgagacactgtcttgacaaaaaaaaaaaaaaaaagagaaaaaaagaaaatgctgtttgtattttgtggtctaataaggagttcgggatagcctgttgtatttgcctcatgccagcccctgagctgccttgggagaagatgctgattgtccttgtccagagtactgcttttgcagagtgacaggctgctgggacagatgtcctcctgttgcatctttgtggatgtttagtaccaatgatgacacgggaactcacatcactgacaccgctcttcatcttctgttagtctcttgaagagcatttttttgtacttctttgctgatgacctacctcttcataagccaagtgaaacaagttgacgaactgcctaggacttccacgtgttgctcacatacatgatgatttctgtcacgctcttgtgttcagacacactgacattaccatgtatgtcagacctccttatgatcgcatgtcctgacagttaagctgattgcaaacagactattaaatatgaatggagcaaacgctgtatgtcatggatatgttctggagaaattcttacccatctggatggggcagggcccttgactcacctgaatcatgaccaggcaaacattttatctgtcctttctgcaggaatccgttctgtgtcatgctaggagaatgggttcagtatatggggccatcaggcagtataccctctgaatgtttttcattgttgtatttgcttagagtaactaaacaattgtatcttttaatttatcttttaattcaaagaggaaaccttggcttctgataactttgttgtgttgtatcttaatggcctatagctgtcattacttcctgtagctgcagtacagaattgttacagacctggattaatgcttccaaagacagaaggaccttggcacctaaactgaccagccctgtgatcctgcaccccacaggagtaactcatcaggacttaccagactgctgcttttgggcatcatctgctgggttgatgatttggtttggccaagagtcttgccaagactttaatctatgcctcttgttctacatgaattcttgggaattactcacgttccataggaagagtgcatccccaggtgatggtttttggttatggtatgatcctttcacaccgaggatttcattgtttaaaacgtgtttctttaaaagaagccttgataacgagagtgggggaaggaggcagcagactttgaagactgtggcctttggtgttctggagtagggggagggaaggagaaacatgttttccacatcatcgcaagtgtgtgccctttgccccttttcaggatccttagagttgcctccctccctccaccccgacagttttgcaataatgtgccttatcagttgtgagtttacaggtgaagcaatttcccaaataaatggatgtaagtgttc

SEQ ID NO: 194197 - DNA, 1443 bp, Homo sapiens
  Payload ID: 18370
  Gene Name: transmembrane protein 41B
  Uniprot ID: Q5BJD5
  ENST ID: ENST00000299596
  CDS Start-End: 127-1002
tcgggtgaggaggtcgcgccggaagtggctctagccgtggcgcttcggcgtagtaaggagcctgcaacagagttttgttgtttagggggcgcggcaccgcaccgctcccttcaccttgcagcagccatggcgaaaggcagagtcgccgaacgatcgcagttgggcgctcaccacacgacccccgtgggggacggggcagcggggacgcggggtctcgcggcgcctggcagcagagaccaccagaaggaaaaatcctgggtagaagctggatcagcaagaatgtcactccttatattggtgtccattttcttatctgcagcttttgttatgtttttggtatataaaaattttcctcagcttagtgaagaagaaagagtgaatatgaaggttcccagagatatggatgatgccaaggctctaggaaaagttttatccaaatacaaggacaccttttatgttcaagtacttgtagcttattttgctacatatattttcttgcaaacatttgctattccaggctctatatttctcagtatactctcagggtttctttatccctttccactagccttatttcttgtttgtttgtgttctggacttggtgcctctttctgttatatgctttcctatttagttgggagaccagttgtatacaaatacctaacagagaaagcagtaaaatggtcacagcaggttgaacgtcatagagaacatctcattaactacattatatttttgagaataacaccatttctgcctaattggtttattaatatcacatctcctgtgataaacgtgccattgaaagttttttttattggtacttttctaggtgtcgcacctccttcttttgtagccattaaggcaggaacaacactgtatcaacttacaacagcaggagaagctgtttcctggaactcaatatttattctgatgatcttggctgttctttctattctgccagccatcttccaaaaaaaactaaagcagaaatttgagtaaaaataatcatctgatttttagttttgctgtcatcaccatctcaggattaacagctgcgactttaggtggggtatattttcttctcctaagagaatagacagtttttccagattcatcatcattgactgtcaagaaaggacccttcagcaaggctgtaccctcaatgcagttgatggcctgtcttcacggatttacagacttggcctgatgcccatgtaaattcaagctttggcttgtggtaacaaccacaagaagacaagcatctgtggtgcggaggcaagcaggctaactaggagttgacaagctaagaaagtgaaactgttctttcttagttaactgtctttctctggagctctgttattttgagtataatatttccatgacacttagtaaatgcaagctaaaatgtaataataataaattgtattggagaaacctaaa

SEQ ID NO: 194198 - DNA, 3848 bp, Homo sapiens
  Payload ID: 18370
  Gene Name: transmembrane protein 41B
  Uniprot ID: Q5BJD5
  ENST ID: ENST00000524543
  CDS Start-End: 196-774
gggtttagcctgtggtgggcgctgcgggtgtttgcaggaggttgcagtactcgctgggctgaggtcgtctcgggtgaggaggtcgcgccggaagtggctctagccgtggcgcttcggcgtagtaaggagcctgcaacagagttttgttgtttagggggcgcggcaccgcaccgctcccttcaccttgcagcagccatggcgaaaggcagagtcgccgaacgatcgcagttgggcgctcaccacacgacccccgtgggggacggggcagcggggacgcggggtctcgcggcgcctggcagcagagaccaccagaaggaaaaatcctgggtagaagctggatcagcaagaatgtcactccttatattggtgtccattttcttatctgcagcttttgttatgtttttggtatataaaaattttcctcagcttagtgaagaagaaagagtgaatatgaaggttcccagagatatggatgatgccaaggctctaggaaaagttttatccaaatacaaggacaccttttatgttcaagtacttgtagcttattttgctacatatattttttaccagcttgcaaacatttgctattccaggctctatatttctcagtatactctcagggtttctttatccctttccactagccttatttcttgtttgtttgtgttctggacttggtgcctctttctgttatatgctttcctatttagttgggagaccagttgtatacaaatacctaacagagaaagcagtaaaatggtcacagcaggttgaacgtcatagagaacatctcattaactacattatatttttgagaataacaccatttctgcctaattggtttattaatatcacatctcctgtgataaacgtgccattgaaagttttttttattggtacttttctaggtgtcgcacctccttcttttgtagccattaaggcaggaacaacactgtatcaacttacaacagcaggagaagctgtttcctggaactcaatatttattctgatgatcttggctgttctttctattctgccagccatcttccaaaaaaaactaaagcagaaatttgagtaaaaataatcatctgatttttagttttgctgtcatcaccatctcaggattaacaggtgcatccatttatgttttaaaatcacctcttcagtaattaaacaaggaatttgtaaaataaaatttcctatcagatagttaaagtaatacatttaagtgacaaggggagaagaaagtaaaaatggaaattggtatactgtgaaaagtgctatcaatagttaaggtagacatcttagacatcttataaattattataccaagggtagctgtagataatagtagtgtggtaggaaattgttgatccagctaattcattcaatttaattgaatattttttatctttaataactaaaatagatatttttaaattctagattttttaaagtagtgttgcaggttttgttaatgttaggcttttttcagagcataaactggaaaacttaaaaagagatttacattttcttcctctttttttttttttttttttttctgttttgagacggagtctagctctgccgcccaggctggagtgcagtggcgcgatctccactcactgcaagctccacctcctgggttcacgccattctcctgtctcagcctcctgagtagctgggactacaggcgcccgccaccatgcccagctaatttttttgtatttttagtagagacggggtttcaccgtgttagccaggatggtctcgatctcctgacctcgtgatctgcccgccttggcctcccaaagtgctgggattacaggcgtgagccaccgcgcctggcccattttcttcctcttttgaggtaatggatttgtttggagatggcatgttagtagacgactgaatatggaaaggatatcaagttatctattttgttaattttatttttgttttttatcatctagatttttatcatggattagtctgaaatttaaagttctggccagtcggttttctttcatcttgtagtttttacagtatttccactgtgcatatgcaaaatgggtattacataactgtatcatatttggtattgataattttttttttttttgagacggagtcttgctgttgcccaggctggagtggagtgcgtggtgtgatctcggctcactgcaaactccgcctcctgggttcaagcgattctcctggcccagcctcctgagtagctgggattacaggtgtgtgccaccgtgcccagctaatttttgtgtttttagtagagacggggtttcaccatgttggccgggctggtcttgaactcctgacctcaggctatatgcccacttccacctcccaaagtgctgggattacaggcatgagccactgtgcccagcctggtattgataatttatattcagataatttgttatggctctttaatatcccacaaggggctctaaaaagcaaacattcaagagtatgtagtttttagacattaagttaattattttaaacagtgacagcaaaacacaagtgattaaatatagtttatttgttccaatgactaaattttacctcatttattaatctggtcattaaggaatatatttaataatattatgtaattattctttttatgcatgatacacctagaaaaatgccttttgtttctattgatggctttgttgtttggagctacttttgattacttattgcagtttcccaatttagtctttactttatctaactcacaaagtaaaattaactgatcacatggcaactactgtatttaaatagttctggaaaaatgaaagtgctttttgctgcttggtaaatgggtaatgcccttgattccttgactgtaggacatagctgatctaaagtactctgtcagttttaccttcacccatgactgttattagttgtcaaagttgaaaagtactttagctgtgagaaatccttgtatgtttttattataagaggtataatcatcctcaaagcctgtttttattacatgatgtggactgattattttttctatcacagtgttaacagatggattttattgtaaatacaaagaaaacatattgattattgtagtattcttatgtcacctggccttttgcgtgagattatttattatttctagcaaggctttcttcctttcttattgcccagagactgactgatacatcttttgttatttttacacataaattaaacatagcctttttggacaaattcactaaatattaatgtataaaatgtaattgagtaaatttttatcagaattttaaaaataaaagagcttagactcagtagaactcagtagaagcttcactatttactccagcgtgtgtaaattgtacttactctattctcagagtatatttactgtccttaccattgattctttccctttgctaatttttttttttgttaatggtagctgcgactttaggtggggtatattttcttctcctaagagaatagacagtttttccagattcatcatcattgactgtcaagaaaggacccttcagcaaggctgtaccctcaatgcagttgatggcctgtcttcacggatttacagacttggcctgatgcccatgtaaattcaagctttggcttgtggtaacaaccacaagaagacaagcatctgtggtgcggaggcaagcaggctaactaggagttgacaagctaagaaagtgaaactgttctttcttagttaactgtctttctctggagctctgttattttgagtataatatttccatgacacttagtaaatgcaagctaaaatgtaataataataaattgtattggagaaacctaaa

SEQ ID NO: 194199 - DNA, 3968 bp, Homo sapiens
  Payload ID: 18370
  Gene Name: transmembrane protein 41B
  Uniprot ID: Q5BJD5
  ENST ID: ENST00000528080
  CDS Start-End: 340-1215
tgctctcgccccagcgcccggcggccacctctttcccgcgggcgggccggggcggggcactgaagggggcggtccaggaccctgacttgtctcgcggttactgggccggcgcgagcacgcgaggctcgggggcggcacggggcggggtttagcctgtggtgggcgctgcgggtgtttgcaggaggttgcagtactcgctgggctgaggtcgtctcgggtgaggaggtcgcgccggaagtggctctagccgtggcgcttcggcgtagtaaggagcctgcaacagagttttgttgtttagggggcgcggcaccgcaccgctcccttcaccttgcagcagccatggcgaaaggcagagtcgccgaacgatcgcagttgggcgctcaccacacgacccccgtgggggacggggcagcggggacgcggggtctcgcggcgcctggcagcagagaccaccagaaggaaaaatcctgggtagaagctggatcagcaagaatgtcactccttatattggtgtccattttcttatctgcagcttttgttatgtttttggtatataaaaattttcctcagcttagtgaagaagaaagagtgaatatgaaggttcccagagatatggatgatgccaaggctctaggaaaagttttatccaaatacaaggacaccttttatgttcaagtacttgtagcttattttgctacatatattttcttgcaaacatttgctattccaggctctatatttctcagtatactctcagggtttctttatccctttccactagccttatttcttgtttgtttgtgttctggacttggtgcctctttctgttatatgctttcctatttagttgggagaccagttgtatacaaatacctaacagagaaagcagtaaaatggtcacagcaggttgaacgtcatagagaacatctcattaactacattatatttttgagaataacaccatttctgcctaattggtttattaatatcacatctcctgtgataaacgtgccattgaaagttttttttattggtacttttctaggtgtcgcacctccttcttttgtagccattaaggcaggaacaacactgtatcaacttacaacagcaggagaagctgtttcctggaactcaatatttattctgatgatcttggctgttctttctattctgccagccatcttccaaaaaaaactaaagcagaaatttgagtaaaaataatcatctgatttttagttttgctgtcatcaccatctcaggattaacaggtgcatccatttatgttttaaaatcacctcttcagtaattaaacaaggaatttgtaaaataaaatttcctatcagatagttaaagtaatacatttaagtgacaaggggagaagaaagtaaaaatggaaattggtatactgtgaaaagtgctatcaatagttaaggtagacatcttagacatcttataaattattataccaagggtagctgtagataatagtagtgtggtaggaaattgttgatccagctaattcattcaatttaattgaatattttttatctttaataactaaaatagatatttttaaattctagattttttaaagtagtgttgcaggttttgttaatgttaggcttttttcagagcataaactggaaaacttaaaaagagatttacattttcttcctctttttttttttttttttttttctgttttgagacggagtctagctctgccgcccaggctggagtgcagtggcgcgatctccactcactgcaagctccacctcctgggttcacgccattctcctgtctcagcctcctgagtagctgggactacaggcgcccgccaccatgcccagctaatttttttgtatttttagtagagacggggtttcaccgtgttagccaggatggtctcgatctcctgacctcgtgatctgcccgccttggcctcccaaagtgctgggattacaggcgtgagccaccgcgcctggcccattttcttcctcttttgaggtaatggatttgtttggagatggcatgttagtagacgactgaatatggaaaggatatcaagttatctattttgttaattttatttttgttttttatcatctagatttttatcatggattagtctgaaatttaaagttctggccagtcggttttctttcatcttgtagtttttacagtatttccactgtgcatatgcaaaatgggtattacataactgtatcatatttggtattgataattttttttttttttgagacggagtcttgctgttgcccaggctggagtggagtgcgtggtgtgatctcggctcactgcaaactccgcctcctgggttcaagcgattctcctggcccagcctcctgagtagctgggattacaggtgtgtgccaccgtgcccagctaatttttgtgtttttagtagagacggggtttcaccatgttggccgggctggtcttgaactcctgacctcaggctatatgcccacttccacctcccaaagtgctgggattacaggcatgagccactgtgcccagcctggtattgataatttatattcagataatttgttatggctctttaatatcccacaaggggctctaaaaagcaaacattcaagagtatgtagtttttagacattaagttaattattttaaacagtgacagcaaaacacaagtgattaaatatagtttatttgttccaatgactaaattttacctcatttattaatctggtcattaaggaatatatttaataatattatgtaattattctttttatgcatgatacacctagaaaaatgccttttgtttctattgatggctttgttgtttggagctacttttgattacttattgcagtttcccaatttagtctttactttatctaactcacaaagtaaaattaactgatcacatggcaactactgtatttaaatagttctggaaaaatgaaagtgctttttgctgcttggtaaatgggtaatgcccttgattccttgactgtaggacatagctgatctaaagtactctgtcagttttaccttcacccatgactgttattagttgtcaaagttgaaaagtactttagctgtgagaaatccttgtatgtttttattataagaggtataatcatcctcaaagcctgtttttattacatgatgtggactgattattttttctatcacagtgttaacagatggattttattgtaaatacaaagaaaacatattgattattgtagtattcttatgtcacctggccttttgcgtgagattatttattatttctagcaaggctttcttcctttcttattgcccagagactgactgatacatcttttgttatttttacacataaattaaacatagcctttttggacaaattcactaaatattaatgtataaaatgtaattgagtaaatttttatcagaattttaaaaataaaagagcttagactcagtagaactcagtagaagcttcactatttactccagcgtgtgtaaattgtacttactctattctcagagtatatttactgtccttaccattgattctttccctttgctaatttttttttttgttaatggtagctgcgactttaggtggggtatattttcttctcctaagagaatagacagtttttccagattcatcatcattgactgtcaagaaaggacccttcagcaaggctgtaccctcaatgcagttgatggcctgtcttcacggatttacagacttggcctgatgcccatgtaaattcaagctttggcttgtggtaacaaccacaagaagacaagcatctgtggtgcggaggcaagcaggctaactaggagttgacaagctaagaaagtgaaactgttctttcttagttaactgtctttctctggagctctgttattttgagtataatatttccatgacacttagtaaatgcaagctaaaatgtaataataataaattg

SEQ ID NO: 194200 - DNA, 803 bp, Homo sapiens
  Payload ID: 18370
  Gene Name: transmembrane protein 41B
  ENST ID: ENST00000527813
  CDS Start-End: 190-780
agcctgtggtgggcgctgcgggtgtttgcaggaggttgcagtactcgctgggctgaggtcgtctcgggtgaggaggtcgcgccggaagtggctctagccgtggcgcttcggcgtagtaaggagcctgcaacagagttttgttgtttagggggcgcggcaccgcaccgctcccttcaccttgcagcagccatggcgaaaggcagagtcgccgaacgatcgcagttgggcgctcaccacacgacccccgtgggggacggggcagcggggacgcggggtctcgcggcgcctggcagcagagaccaccagaaggaaaaatcctgggtagaagctggatcagcaagaatgtcactccttatattggtgtccattttcttatctgcagcttttgttatgtttttggtatataaaaattttcctcagcttagtgaagaagaaagagtgaatatgaaggttcccagagatatggatgatgccaaggctctaggaaaagttttatccaaatacaaggacaccttttatgttcaagtacttgtagcttattttgctacatatattttcttgcaaacatttgctattccaggctctatatttctcagtatactctcagggtttctttatccctttccactagccttatttcttgtttgtttgtgttctggacttggtgcctctttctgttatatgctttcctatttagttgggagaccagttgtatacaaatacctaacagagaaagcagtaaaatggtcacagcaggtgtcgcacctccttcttttgtagccattaaggcaggaacaacactg

SEQ ID NO: 194201 - DNA, 723 bp, Homo sapiens
  Payload ID: 18370
  Gene Name: transmembrane protein 41B
  Uniprot ID: Q5BJD5
  ENST ID: ENST00000533723
  CDS Start-End: 193-576
tttagcctgtggtgggcgctgcgggtgtttgcaggaggttgcagtactcgctgggctgaggtcgtctcgggtgaggaggtcgcgccggaagtggctctagccgtggcgcttcggcgtagtaaggagcctgcaacagagttttgttgtttagggggcgcggcaccgcaccgctcccttcaccttgcagcagccatggcgaaaggcagagtcgccgaacgatcgcagttgggcgctcaccacacgacccccgtgggggacggggcagcggggacgcggggtctcgcggcgcctggcagcagagaccaccagaaggaaaaatcctgggtagaagctggatcagcaagaatgtcactccttatattggtgtccattttcttatctgcagcttttgttatgtttttggtatataaaaattttcctcagcttagtgaagaagaaagagtgaatatgaaggttcccagagatatggatgatgccaaggctctaggaaaagttttatccaaatacaaggacaccttttatgttcaagtacttgtagcttattttgctacatatattttgtatccttttaactgaaaaaatgttttctaattttgttcaagaaaaagtgtaaaaggtctgctcttcatttatacataactattttccttttaaaatttgttattgcagtgtgacaatattaaataattgaaaaattaaaatggaaaaaaattatcactttaa

SEQ ID NO: 194202 - DNA, 1440 bp, Homo sapiens
  Payload ID: 18370
  Gene Name: transmembrane protein 41B
  Uniprot ID: Q5BJD5
  ENST ID: ENST00000611268
  CDS Start-End: 127-1002
tcgggtgaggaggtcgcgccggaagtggctctagccgtggcgcttcggcgtagtaaggagcctgcaacagagttttgttgtttagggggcgcggcaccgcaccgctcccttcaccttgcagcagccatggcgaaaggcagagtcgccgaacgatcgcagttgggcgctcaccacacgacccccgtgggggacggggcagcggggacgcggggtctcgcggcgcctggcagcagagaccaccagaaggaaaaatcctgggtagaagctggatcagcaagaatgtcactccttatattggtgtccattttcttatctgcagcttttgttatgtttttggtatataaaaattttcctcagcttagtgaagaagaaagagtgaatatgaaggttcccagagatatggatgatgccaaggctctaggaaaagttttatccaaatacaaggacaccttttatgttcaagtacttgtagcttattttgctacatatattttcttgcaaacatttgctattccaggctctatatttctcagtatactctcagggtttctttatccctttccactagccttatttcttgtttgtttgtgttctggacttggtgcctctttctgttatatgctttcctatttagttgggagaccagttgtatacaaatacctaacagagaaagcagtaaaatggtcacagcaggttgaacgtcatagagaacatctcattaactacattatatttttgagaataacaccatttctgcctaattggtttattaatatcacatctcctgtgataaacgtgccattgaaagttttttttattggtacttttctaggtgtcgcacctccttcttttgtagccattaaggcaggaacaacactgtatcaacttacaacagcaggagaagctgtttcctggaactcaatatttattctgatgatcttggctgttctttctattctgccagccatcttccaaaaaaaactaaagcagaaatttgagtaaaaataatcatctgatttttagttttgctgtcatcaccatctcaggattaacagctgcgactttaggtggggtatattttcttctcctaagagaatagacagtttttccagattcatcatcattgactgtcaagaaaggacccttcagcaaggctgtaccctcaatgcagttgatggcctgtcttcacggatttacagacttggcctgatgcccatgtaaattcaagctttggcttgtggtaacaaccacaagaagacaagcatctgtggtgcggaggcaagcaggctaactaggagttgacaagctaagaaagtgaaactgttctttcttagttaactgtctttctctggagctctgttattttgagtataatatttccatgacacttagtaaatgcaagctaaaatgtaataataataaattgtattggagaaacct

SEQ ID NO: 194203 - DNA, 1026 bp, Homo sapiens
  Payload ID: 18371
  Gene Name: transmembrane protein 42
  Uniprot ID: Q69YG0
  ENST ID: ENST00000302392
  CDS Start-End: 57-536
cggcgcgcgctctgccctgcgggcagcgggtgccaggcacggtgtcagcaggcaacatggccgagaggccggggcctccgggcggcgccgtgtccgcgaccgcgtaccctgacacccccgcggaattccctccgcacctccaggcgggtgcgatgcggcgccgcttttggggcgtattcaactgtctgtgcgccggcgcgttcggggccctggccgccgcctccgccaagctggccttcggcagcgaggtgagcatgggtttatgcgtcttaggcattattgtgatggcgagcaccaattctctgatgtggaccttctttagccggggcctcagtttctccatgtcttcagccattgcatctgtcacagtgactttttcaaatatcctcagctcggccttcctgggctatgtgctgtatggagagtgccaggaggtcttgtggtggggaggagtgttccttattctctgcggactcaccctaatccacaggaagctcccacccacctggaagccccttccacacaagcagcagtagcaccacttggctagacggaccagctggaaagatcatgatggtggcccagccttgggatgtcatgtgggactgtatcctagggcgatccagttgtgcagccttctgaccatcagccaagggaagcaggcctctgatggagcaggctctggctctgtaaggagaggtgcagctgcagcagtgttctaccggaagtgttttgatcatctgtacagtgctttggattcttcctcccaggcctaccccagtgagccttcgcagatgctggagatcctggggttggtctgctttgtgtatggtacttgaaaccacgctgtaattattgtcctgttgccaaacaaaagccagtcatgtaactctagaagcagtgactggtggggctttctgacagttccatgctgatgtatcaggccatctgtgtcatgcttatgtattatggcaagaagaggaaaactggattaataaatacgttttttgtaagttaaaactacca

SEQ ID NO: 194204 - DNA, 1026 bp, Homo sapiens; identical to SEQ ID NO: 194203
  Payload ID: 18371
  Gene Name: Transmembrane protein 42
  ENST ID: ENST00000626748
  CDS Start-End: 57-536

SEQ ID NO: 194205 - DNA, 3341 bp, Homo sapiens
  Payload ID: 18372
  Gene Name: transmembrane protein 43
  Uniprot ID: Q9BTV4
  ENST ID: ENST00000306077
  CDS Start-End: 255-1457
tttgcagtgcgcaggcgcatcaatgaggtactgcaatgtcccggaccgtatagtttccaggacgtctcgccgcgcgcatgcgcagaaacactgggcacagggggaggtaactgcagtaagtcccgcttggccctggagtccacgcggattttcgaagctggggctggcaagaggccgctggacaccacgctccagtcgtcagcccacttcctagctgaacagcgcgaggcggcggcagcgagccgggtcccaccatggccgcgaattattccagtaccagtacccggagagaacatgtcaaagttaaaaccagctcccagccaggcttcctggaacggctgagcgagacctcgggtgggatgtttgtggggctcatggccttcctgctctccttctacctaattttcaccaatgagggccgcgcattgaagacggcaacctcattggctgaggggctctcgcttgtggtgtctcccgacagcatccacagtgtggctccggagaatgaaggaaggctggtgcacatcattggcgccttacggacatccaagcttttgtctgatccaaactatggggtccatcttccggctgtgaaactgcggaggcacgtggagatgtaccaatgggtagaaactgaggagtccagggagtacaccgaggatgggcaggtgaagaaggagacgaggtattcctacaacactgaatggaggtcagaaatcatcaacagcaaaaacttcgaccgagagattggccacaaaaaccccagtgccatggcagtggagtcattcatggcaacagccccctttgtccaaattggcaggtttttcctctcgtcaggcctcatcgacaaagtcgacaacttcaagtccctgagcctatccaagctggaggaccctcatgtggacatcattcgccgtggagactttttctaccacagcgaaaatcccaagtatccagaggtgggagacttgcgtgtctccttttcctatgctggactgagcggcgatgaccctgacctgggcccagctcacgtggtcactgtgattgcccggcagcggggtgaccagctagtcccattctccaccaagtctggggataccttactgctcctgcaccacggggacttctcagcagaggaggtgtttcatagagaactaaggagcaactccatgaagacctggggcctgcgggcagctggctggatggccatgttcatgggcctcaaccttatgacacggatcctctacaccttggtggactggtttcctgttttccgagacctggtcaacattggcctgaaagcctttgccttctgtgtggccacctcgctgaccctgctgaccgtggcggctggctggctcttctaccgacccctgtgggccctcctcattgccggcctggcccttgtgcccatccttgttgctcggacacgggtgccagccaaaaagttggagtgaaaagaccctggcacccgcccgacacctgcgtgagccctaggatccaggtcctctctcacctctgacccagctccatgccagagcaggagccccggtcaattttggactctgcactccctctcctcttcaggggccagacttggcagcatgtgcaccaggttggtgttcaccagctcatgtcttccccacatctcttcttgccagtaagcagctttggtgggcagcagcagctcatgaatggcaagctgacagcttctcctgctgtttccttcctctcttggactgagtgggtacggccagccactcagcccattggcagctgacaacgcagacacgctctacggaggcctgctgataaagggctcagccttgccgtgtgctgcttctcatcactgcacacaagtgccatgctttgccaccaccaccaagcacatctgtgatcctgaagggcggccgttagtcattactgctgagtcctgggtcaccagcagacacactgggcatggacccctcaaagcaggcacacccaaaacacaagtctgtggctagaacctgatgtggtgtttaaaagagaagaaacactgaagatgtcctgaggagaaaagctggacatatactgggcttcacacttatcttatggcttggcagaatctttgtagtgtgtgggatctctgaaggccctatttaagtttttcttcgttactttgctgcttcatgtgtactttcctaccccaagaggaagttttctgaaataagatttaaaaacaaaacaaaaaaaacacttaatatttcagactgttacaggaaacaccctttagtctgtcagttgaattcagagcactgaaaggtgttaaattggggtatgtggtttgattgataaaaagttacctctcagtattttgtgtcactgagaagctttacaatggatgcttttgaaacaagtatcagcaaaaggatttgttttcactctgggaggagagggtggagaaagcacttgctttcatcctctggcatcggaaactcccctatgcacttgaagatggtttaaaagattaaagaaacgattaagagaaaaggttggaagctttatactaaatgggctccttcatggtgacgccccgtcaaccacaatcaagaactgaggcctgaggctggttgtacaatgcccacgcctgcctggctgctttcacctgggagtgctttcgatgtgggcacctgggcttcctagggctgcttctgagtggttctttcacgtgttgtgtccatagctttagtcttcctaaataagatccacccacacctaagtcacagaatttctaagttccccaactactctcacacccttttaaagataaagtatgttgtaaccaggatgtcttaaatgattctttgtgtaccttttctgtcatattcagaaaccgttttgtgcctgctgggagtaattcctttagcaattaagtatttggtagctgaataaggggtcagaacttctgaaaccagagatctgtaatcatctctattggcctggggtgcctgtgctataaatgagtttcttcacatgaaaaacacagccagcccaagatgacttatctgggtttaggattcaatagtattcactaactgcttattacatgagcaatttcatcaaatctccaaactcttaaaggatgctttcggaaaacacgctgtatacctagatgatgactaaatgcaaaatccttgggctttggtttttttctagtaaggattttaaataactgccgacttcaaaagtgttcttaaaacgaaagataatgttaagaaaaatttgaaagctttggaaaaccaaatttgtaatatcattgtattttttattaaaagttttgtaataaatttctaaattat

SEQ ID NO: 194206 - DNA, 908 bp, Homo sapiens
  Payload ID: 18372
  Gene Name: transmembrane protein 43
  ENST ID: ENST00000432444
  CDS Start-End: 180-380
gcatgcgcagaaacactgggcacagggggaggtaactgcagtaagtcccgcttggccctggagtccacgcggattttcgaagctggggctggcaagaggccgctggacaccacgctccagtcgtcagcccacttcctagctgaacagcgcgaggcggcggcagcgagccgggtcccaccatggccgcgaatccaaaacctggaagctgtcaagatacccatccactgacgaatgattcagcacactgtggtatagtcataaatggaatactactcagccatgaaaaggaacaaattcctgataaacaccacaacatgaatgaattgcaaaagcagtgctctgagtccaagaagctgggcagaaaggagttggtgccctgattccatttttctcaagttgtagaagaaacaaactaatctacgtattccagtaccagtacccggagagaacatgtcaaagttaaaaccagctcccagccaggcttcctggaacggctgagcgagacctcgggtgggatgtttgtggggctcatggccttcctgctctccttctacctaattttcaccaatgagggccgcgcattgaagacggcaacctcattggctgaggggctctcgcttgtggtgtctcccgacagcatccacagtgtggctccggagaatgaaggaaggctggtgcacatcattggcgccttacggacatccaagcttttgtctgatccaaactatggggtccatcttccggctgtgaaactgcggaggcacgtggagatgtaccaatgggtagaaactgaggagtccagggagtacaccgaggatgggcaggtgaagaaggagacgaggtattcctacaacactgaatggaggtcagaaatcatcaacagcaaaaacttcgaccgagagattggc

SEQ ID NO: 194207 - DNA, 1278 bp, Homo sapiens
  Payload ID: 18373
  Gene Name: transmembrane protein 44
  ENST ID: ENST00000330115
  CDS Start-End: 300-641
ctaattgctgttggctcaggaaatgtggacaatacgcaggaagggacgccgtgccttacagcgaccggcagggactcggccgtccgcgagcccagccgcccgccccgctccggccaggatgttggaggcttctctatctgagatgtgcacagaaacccagacaggaccagtcggcactgtgtgctgcgtgctgcctcctgaccagtctgtgtgacaccgtcggggctcttctggccagacagctcacaatccaggttttcactggtgcctacctagcagctattgacttagtgaactttatgttcattctcttcccagtctgtggatccaaattcaagtctaattcagatcgggaagcccgagagaggaagaggaggcggcagctcagggccagtgtgtttgccctggccctgccgctgagcctgggcccgtgctgggctctgtgggttgctgtcccgaaggcttcagccaccatccgggggccacagcggaggctgctagcgagcctgctgcaggaaaatactgagatcctcggctacctgctgggtagcgttgctgcctttggctcctgggcttctcggatcccccctctctccagaattgtgaggccgggggtggggatgggactgtgggtcacatgacagtctcagggcatctgggagcatcctgagagggtcatggggcggaggtgtggcgtcaccgtgggtgcatggacatgggctcagcttttcctgaagagcgttagtgtgtatgacagcaaggagggggtgtgtgtggagagtgggcagccaacccagggcgtcctgaggacggcgggagcctctcggggaaagcccgtgtgttcttccccatttcctatagcaaatgaaaagcaggctctgaggaagaagcccctgaggctgaacccataagagaaggagatttgacaccggacaggcagccaggtgtgaggttctgtgtagatcaagagtgtcttaggccgggcgcgggggctcacgcctggaatcccagcactttgcgaggccgaggcggggcgggtcgcttgaggtcaggagttggagactagcctgaccaacacggtgaaaccctgtctctactaaaatacaaaaattagccaggcatggtggtgcatgcttgtaatcccagctactctggaggctgaggtggagaatcgcttgaacccaggaggcagaggttgcagtgagccgagattgtgccactgcactccagcctgggcgacaagagggaaactccgtctaaaaaaaaaaaaaaaaaaaa

SEQ ID NO: 194208 - DNA, 2245 bp, Homo sapiens
  Payload ID: 18373
  Gene Name: transmembrane protein 44
  Uniprot ID: Q2T9K0
  ENST ID: ENST00000347147
  CDS Start-End: 111-1397
cggaacggaacccagagaagggcacgcggggcggcggcgctcggggcttgcccgcggcgagggaggctgcgcccaggtccccggccccgcgccgcgcgcccagccgcgccatgggggaggcgcccagccccgcgcccgcgctctgggactgggactacctggaccgctgcttcgcccgccaccgcgtctgcatctccttcggcctgtggatctgcgcctcctcctgctggatcgccgcccacgcgctgcttctctatctgagatgtgcacagaaacccagacaggaccagtcggcactgtgtgctgcgtgctgcctcctgaccagtctgtgtgacaccgtcggggctcttctggccagacagctcacaatccaggttttcactggtgcctacctagcagctattgacttagtgaactttatgttcattctcttcccagtctgtggatccaaattcaagtctaattcagatcgggaagcccgagagaggaagaggaggcggcagctcagggccagtgtgtttgccctggccctgccgctgagcctgggcccgtgctgggctctgtgggttgctgtcccgaaggcttcagccaccatccgggggccacagcggaggctgctagcgagcctgctgcaggaaaatactgagatcctcggctacctgctgggtagcgttgctgcctttggctcctgggcttctcggatcccccctctctccagaatttgccgggggaagacatttccctccatccacctgtggacccggctcctgtcggccctggctggcctcctctatgcctcggccattgtggcccacgaccagcaccctgagtacctgctgcgggccacaccctggttcctgacctccctcggccgtgcggcactggacctcgctattattttcctttcgtgtgtgatgaagagcaagatgagacaggccttaggatttgccaaggaagccagagagagccctgacacccaagcccttttgacctgtgcagagaaagaggaagaaaaccaggagaatttggattgggtgcctctcaccacactgtcacactgcaagtcactgaggacaatgacagcaatcagtcgctacatggagctgaccatcgagcctgtgcagcaggcaggctgcagtgccaccaggctgccaggtgacgggcagacgagcgccggagatgcgtccctgcaggaccccccgtcgtaccctcccgttcaggtcatccgggcccgggtgtcttccggcagctcctctgaggtctcctccatcaactccgacctggagtgggaccctgaagatgtgaacctcgaaggcagcaaagaaaatgtggagctactgggatcccaggtgcaccaggactctgtgaggacagcacacctgagtgatgatgattaacaccttctggagccagctcatcagctcagagcccagggtcaggagttcgttcagtaacgcagcgggaatcaatctgcactgacaccgcggcaggaactgaagctgccctggcaagtgaggaaccaggagccgtcactgagtgtggctgggctacatcatagctcatcacggagctacgactttgggtactgcggacagacctggataggcccagcattcgttctgaagatcacagttcacagaagcttttgcttcgtaaagataatccaaaggatctcagacccgctcttccttttcccttcattcccttgagagtcagccatgaacggaatacctgctaggttccaggaatgagctcacctaacagatagcaaatgtgtctggttagatctcagcagagcccattctgcaagacctggctgagccagatgagagggtgggccctgtgctggggggccttgggtcacacacaggaaccgagacctggcttccaccccccagtcacccacttgggttatctgctggaagttatcgataggactgtgtggccaaccaagtgcttgtgagatcactgacactgcaaaaacaaagcaaactgctccgggtaccaggacttcctccaacctggcaagggtgtgcgctgaggcggggcttgcaggtgagggggctgtatgcttcaggaactaactaaatgcatgcagaaggtaagaggcatgatgggaggtgttcaagcacagcaatcccatttgggagttattttgatactgcgatgagtaagggtaagggcgcatggaatggggctaaggtgggagtgaacactggggtgaataaattttaaatcaattcaa

SEQ ID NO: 194209 - DNA, 2197 bp, Homo sapiens
  Payload ID: 18373
  Gene Name: transmembrane protein 44
  Uniprot ID: Q2T9K0
  ENST ID: ENST00000381975
  CDS Start-End: 67-1257
ggcttgcccgcggcgagggaggctgcgcccaggtccccggccccgcgccgcgcgcccagccgcgccatgggggaggcgcccagccccgcgcccgcgctctgggactgggactacctggaccgctgcttcgcccgccaccgcgtctgcatctccttcggcctgtggatctgcgcctcctcctgctggatcgccgcccacgcgctgcttctctatctgagatgtgcacagaaacccagacaggaccagtcggcactgtgtgctgcgtgctgcctcctgaccagtctgtgtgacaccgtcggggctcttctggccagacagctcacaatccaggttttcactggtgcctacctagcagctattgacttagtgaactttatgttcattctcttcccagtctgtggatccaaattcaagtctaattcagatcgggaagcccgagagaggaagaggaggcggcagctcagggccagtgtgtttgccctggccctgccgctgagcctgggcccgtgctgggctctgtgggttgctgtcccgaaggcttcagccaccatccgggggccacagcggaggctgctagcgagcctgctgcaggaaaatactgagatcctcggctacctgctgggtagcgttgctgcctttggctcctgggcttctcggatcccccctctctccagaatttgccgggggaagacatttccctccatccacctgtggacccggctcctgtcggccctggctggcctcctctatgcctcggccattgtggcccacgaccagcaccctgagtacctgctgcgggccacaccctggttcctgacctccctcggccgtgcggcactggacctcgctattattttcctttcgtgtgtgatgaagagcaagatgagacaggccttaggatttgccaaggaagccagagagagccctgacacccaagcccttttgacctgtgcagagaaagaggaagaaaaccaggagaatttggattgggtgcctctcaccacactgtcacactgcaagtcactgaggacaatgacagcaatcagtcgctacatggagctgaccatcgagcctgtgcagcaggctgcagtgccaccaggctgccaggtgacgggcagacgagcgccggagatgcgtccctgcaggaccccccgtcgtaccctcccgttcaggtcatccgggcccgggtgtcttccggcagctcctctgaggtctcctccatcaactccgacctggagtgggaccctgaagatgtgaacctcgaaggcagcaaagaaaatgtggagctactgggatcccaggtgcaccaggactctgtgaggacagcacacctgagtgatgatgattaacaccttctggagccagctcatcagctcagagcccagggtcaggagttcgttcagtaacgcagcgggaatcaatctgcactgacaccgcggcaggaactgaagctgccctggcaagtgaggaaccaggagccgtcactgagtgtggctgggctacatcatagctcatcacggagctacgactttgggtactgcggacagacctggataggcccagcattcgttctgaagatcacagttcacagaagcttttgcttcgtaaagataatccaaaggatctcagacccgctcttccttttcccttcattcccttgagagtcagccatgaacggaatacctgctaggttccaggaatgagctcacctaacagatagcaaatgtgtctggttagatctcagcagagcccattctgcaagacctggctgagccagatgagagggtgggccctgtgctggggggccttgggtcacacacaggaaccgagacctggcttccaccccccagtcacccacttgggttatctgctggaagttatcgataggactgtgtggccaaccaagtgcttgtgagatcactgacactgcaaaaacaaagcaaactgctccgggtaccaggacttcctccaacctggcaagggtgtgcgctgaggcggggcttgcaggtgagggggctgtatgcttcaggaactaactaaatgcatgcagaaggtaagaggcatgatgggaggtgttcaagcacagcaatcccatttgggagttattttgatactgcgatgagtaagggtaagggcgcatggaatggggctaaggtgggagtgaacactggggtgaataaattttaaatcaattcaa

SEQ ID NO: 194210 - DNA, 2490 bp, Homo sapiens
  Payload ID: 18373
  Gene Name: transmembrane protein 44
  Uniprot ID: Q2T9K0
  ENST ID: ENST00000392432
  CDS Start-End: 207-1634
ggaaacttttccccggcgccttcgccgccgccgcccgcgcccgggagcgcgcccttctctgcccgcggtcggtgcgctcggccggaggcgccgcggcggaacggaacccagagaagggcacgcggggcggcggcgctcggggcttgcccgcggcgagggaggctgcgcccaggtccccggccccgcgccgcgcgcccagccgcgccatgggggaggcgcccagccccgcgcccgcgctctgggactgggactacctggaccgctgcttcgcccgccaccgcgtctgcatctccttcggcctgtggatctgcgcctcctcctgctggatcgccgcccacgcgctgcttctctatctgagatgtgcacagaaacccagacaggaccagtcggcactgtgtgctgcgtgctgcctcctgaccagtctgtgtgacaccgtcggggctcttctggccagacagctcacaatccaggttttcactggtgcctacctagcagctattgacttagtgaactttatgttcattctcttcccagtctgtggatccaaattcaagtctaattcagatcgggaagcccgagagaggaagaggaggcggcagctcagggccagtgtgtttgccctggccctgccgctgagcctgggcccgtgctgggctctgtgggttgctgtcccgaaggcttcagccaccatccgggggccacagcggaggctgctagcgagcctgctgcaggaaaatactgagatcctcggctacctgctgggtagcgttgctgcctttggctcctgggcttctcggatcccccctctctccagaattgccccacctccgacactggggattacgactcaacatgagatctggcggggacaaatgtccaaaccatcccagtctccctcacgttctcccagcggacattggcgagccgctgcccagcgtcaggtgctgggcactgagatgtgccgggggaagacatttccctccatccacctgtggacccggctcctgtcggccctggctggcctcctctatgcctcggccattgtggcccacgaccagcaccctgagtacctgctgcgggccacaccctggttcctgacctccctcggccgtgcggcactggacctcgctattattttcctttcgtgtgtgatgaagagcaagatgagacaggccttaggatttgccaaggaagccagagagagccctgacacccaagcccttttgacctgtgcagagaaagaggaagaaaaccaggagaatttggattgggtgcctctcaccacactgtcacactgcaagtcactgaggacaatgacagcaatcagtcgctacatggagctgaccatcgagcctgtgcagcaggcaggctgcagtgccaccaggctgccaggtgacgggcagacgagcgccggagatgcgtccctgcaggaccccccgtcgtaccctcccgttcaggtcatccgggcccgggtgtcttccggcagctcctctgaggtctcctccatcaactccgacctggagtgggaccctgaagatgtgaacctcgaaggcagcaaagaaaatgtggagctactgggatcccaggtgcaccaggactctgtgaggacagcacacctgagtgatgatgattaacaccttctggagccagctcatcagctcagagcccagggtcaggagttcgttcagtaacgcagcgggaatcaatctgcactgacaccgcggcaggaactgaagctgccctggcaagtgaggaaccaggagccgtcactgagtgtggctgggctacatcatagctcatcacggagctacgactttgggtactgcggacagacctggataggcccagcattcgttctgaagatcacagttcacagaagcttttgcttcgtaaagataatccaaaggatctcagacccgctcttccttttcccttcattcccttgagagtcagccatgaacggaatacctgctaggttccaggaatgagctcacctaacagatagcaaatgtgtctggttagatctcagcagagcccattctgcaagacctggctgagccagatgagagggtgggccctgtgctggggggccttgggtcacacacaggaaccgagacctggcttccaccccccagtcacccacttgggttatctgctggaagttatcgataggactgtgtggccaaccaagtgcttgtgagatcactgacactgcaaaaacaaagcaaactgctccgggtaccaggacttcctccaacctggcaagggtgtgcgctgaggcggggcttgcaggtgagggggctgtatgcttcaggaactaactaaatgcatgcagaaggtaagaggcatgatgggaggtgttcaagcacagcaatcccatttgggagttattttgatactgcgatgagtaagggtaagggcgcatggaatggggctaaggtgggagtgaacactggggtgaataaattttaaatcaattcaagtatctca

SEQ ID NO: 194211 - DNA, 682 bp, Homo sapiens
  Payload ID: 18373
  Gene Name: transmembrane protein 44
  ENST ID: ENST00000430601
  CDS Start-End: 135-500
tgcgctcggccggaggcgccgcggcggaacggaacccagagaagggcacgcggggcggcggcgctcggggcttgcccgcggcgagggaggctgcgcccaggtccccggccccgcgccgcgcgcccagccgcgccatgggggaggcgcccagccccgcgcccgcgctctgggactgggactacctggaccgctgcttcgcccgccaccgcgtctgcatctccttcggcctgtggatctgcgcctcctcctgctggatcgccgcccacgcgctgcttctctatctgagatgtgcacagaaacccagacaggaccagtcggcactgtgtgctgcgtgctgcctcctgaccagtctgtgtgacaccgtcggggctcttctggccagacagctcacaatccagtctgtggatccaaattcaagtctaattcagatcgggaagcccgagagaggaagaggaggcggcagctcagggccagtgtgtttgccctggccctgccgctgagcctgggcccgtgctgggctctgtgggttgctgtcccgaaggcttcagccaccatccgggggccacagcggaggctgctagcgagcctgctgcaggaaaatactgagatcctcggctacctgctgggtagcgttgctgcctttggctcctgggcttctcggatcccccctctctccagaatt

SEQ ID NO: 194212 - DNA, 452 bp, Homo sapiens
  Payload ID: 18373
  Gene Name: transmembrane protein 44
  ENST ID: ENST00000429560
  CDS Start-End: 1-360
atgaagagcaagatgagacaggccttaggatttgccaaggaagccagagagagccctgacacccaagcccttttgacctgtgcagagaaagaggaagaaaaccaggagaatttggattgggtgcctctcaccacactgtcacactgcaagtcactgaggacaatgacagcaatcagtcgctacatggagctgaccatcgagcctgtgcagcaggctgcagtgccaccaggctgccaggtgacgggcagacgagcgccggagatgcgtccctgcaggaccccccgtcgtaccctcccgttcaggtcatccgggcccgggtgtcttccggcagctcctctgagtgggaccctgaagatgtgaacctcgaaggcagcaaagaaaatgtggagctactgggatcccaggtgcaccaggactctgtgaggacagcacacctgagtgatgatgattaa

SEQ ID NO: 194213 - DNA, 1445 bp, Homo sapiens
  Payload ID: 18373
  Gene Name: transmembrane protein 44
  ENST ID: ENST00000432352
  CDS Start-End: 1-594
ctgcgggccacaccctggttcctgacctccctcggccgtgcggcactggacctcgctattattttcctttcgtgtgtgatgaagagcaagatgagacaggccttaggatttgccaaggaagccagagagagccctgacacccaagcccttttgacctgtgcagagaaagaggaagaaaaccaggagaatttggattgggtgcctctcaccacactgtcacactgcaagtcactgaggacaatgacagcaatcagtcgctacatggagctgaccatcgagcctgtgcagcaggcaggctgcagtgccaccaggctgccaggtgacgggcagacgagcgccggagatgcgtccctgcaggaccccccgtcgtaccctcccgttcaggtcatccgggcccgggtgtcttccggcagctcctctgaggtctcctccatcaactccgacctggagcagaagtattgggaggccctaaactcggagcagtgggaccctgaagatgtgaacctcgaaggcagcaaagaaaatgtggagctactgggatcccaggtgcaccaggactctgtgaggacagcacacctgagtgatgatgattaacaccttctggagccagctcatcagctcagagcccagggtcaggagttcgttcagtaacgcagcgggaatcaatctgcactgacaccgcggcaggaactgaagctgccctggcaagtgaggaaccaggagccgtcactgagtgtggctgggctacatcatagctcatcacggagctacgactttgggtactgcggacagacctggataggcccagcattcgttctgaagatcacagttcacagaagcttttgcttcgtaaagataatccaaaggatctcagacccgctcttccttttcccttcattcccttgagagtcagccatgaacggaatacctgctaggttccaggaatgagctcacctaacagatagcaaatgtgtctggttagatctcagcagagcccattctgcaagacctggctgagccagatgagagggtgggccctgtgctggggggccttgggtcacacacaggaaccgagacctggcttccaccccccagtcacccacttgggttatctgctggaagttatcgataggactgtgtggccaaccaagtgcttgtgagatcactgacactgcaaaaacaaagcaaactgctccgggtaccaggacttcctccaacctggcaagggtgtgcgctgaggcggggcttgcaggtgagggggctgtatgcttcaggaactaactaaatgcatgcagaaggtaagaggcatgatgggaggtgttcaagcacagcaatcccatttgggagttattttgatactgcgatgagtaagggtaagggcgcatggaatggggctaaggtgggagtgaacactggggtgaataaattttaaatcaattcaagta

SEQ ID NO: 194214 - DNA, 1212 bp, Homo sapiens
  Payload ID: 18373
  Gene Name: transmembrane protein 44
  ENST ID: ENST00000419280
  CDS Start-End: 255-707
acgccgtgccttacagcgaccggcagggactcggccgtccgcgagcccagccgcccgccccgctccggccaggatgttggaggcttctctatctgagatgtgcacagaaacccagacaggaccagtcggcactgtgtgctgcgtgctgcctcctgaccagtctgtgtgacaccgtcggggctcttctggccagacagctcacaatccaggttttcactggtgcctacctagcagctattgacttagtgaactttatgttcattctcttcccagtctgtggatccaaattcaagtctaattcagatcgggaagcccgagagaggaagaggaggcggcagctcagggccagtgtgtttgccctggccctgccgctgagcctgggcccgtgctgggctctgtgggttgctgtcccgaaggcttcagccaccatccgggggccacagcggaggctgctagcgagcctgctgcaggaaaatactgagatcctcggctacctgctgggtagcgttgctgcctttggctcctgggcttctcggatcccccctctctccagaattatggagtctcgctgtgttgcccaggctggagtgcagtggcgtgatcttggctcactgcaaccttcacctcccaatttcaagcaattctcctgcctcagcctcccgagtagctgggactacagctgccagtggagctgcaggagctgctagtggctcctggtgtcccttgatgcatggcagtgtcgtttacatttctgccttgcccttcatgtggccttcttccctttgtattattttcctttcgtgtgtgatgaagagcaagatgagacaggccttaggatttgccaaggaagccagagagagccctgacacccaagcccttttgacctgtgcagagaaagaggaagaaaaccaggagaatttggattgggtgcctctcaccacactgtcacactgcaagtcactgaggacaatgacagcaatcagtcgctacatggagctgaccatcgagcctgtgcagcaggcaggctgcagtgccaccaggctgccaggtgacgggcagacgagcgccggagatgcgtccctgcaggaccccccgtcgtaccctcccgttcaggtcatccgggcccgggtgtcttccggcagctcctctgaggtctcctccatcaactccgacctggagcagaagtattgggaggccctaaactcggagcag

SEQ ID NO: 194215 - DNA, 846 bp, Homo sapiens
  Payload ID: 18373
  Gene Name: transmembrane protein 44
  ENST ID: ENST00000452358
  CDS Start-End: 1-786
aactttatgttcattctcttcccagtctgtggatccaaattcaagtctaattcagatcgggaagcccgagagaggaagaggaggcggcagctcagggccagtgtgtttgccctggccctgccgctgagcctgggcccgtgctgggctctgtgggttgctgtcccgaaggcttcagccaccatccgggggccacagcggaggctgctagcgagcctgctgcaggaaaatactgagatcctcggctacctgctgggtagcgttgctgcctttggctcctgggcttctcggatcccccctctctccagaattagcaagatgagacaggccttaggatttgccaaggaagccagagagagccctgacacccaagcccttttgacctgtgcagagaaagaggaagaaaaccaggagaatttggattgggtgcctctcaccacactgtcacactgcaagtcactgaggacaatgacagcaatcagtcgctacatggagctgaccatcgagcctgtgcagcaggcaggctgcagtgccaccaggctgccaggtgacgggcagacgagcgccggagatgcgtccctgcaggaccccccgtcgtaccctcccgttcaggtcatccgggcccgggtgtcttccggcagctcctctgaggtctcctccatcaactccgacctggagtgggaccctgaagatgtgaacctcgaaggcagcaaagaaaatgtggagctactgggatcccaggtgcaccaggactctgtgaggacagcacacctgagtgatgatgattaacaccttctggagccagctcatcagctcagagcccagggtcaggagttcgttcagtaacgc

SEQ ID NO: 194216 - DNA, 1508 bp, Homo sapiens
  Payload ID: 18373
  Gene Name: transmembrane protein 44
  Uniprot ID: Q2T9K0
  ENST ID: ENST00000473092
  CDS Start-End: 111-1427
cggaacggaacccagagaagggcacgcggggcggcggcgctcggggcttgcccgcggcgagggaggctgcgcccaggtccccggccccgcgccgcgcgcccagccgcgccatgggggaggcgcccagccccgcgcccgcgctctgggactgggactacctggaccgctgcttcgcccgccaccgcgtctgcatctccttcggcctgtggatctgcgcctcctcctgctggatcgccgcccacgcgctgcttctctatctgagatgtgcacagaaacccagacaggaccagtcggcactgtgtgctgcgtgctgcctcctgaccagtctgtgtgacaccgtcggggctcttctggccagacagctcacaatccaggttttcactggtgcctacctagcagctattgacttagtgaactttatgttcattctcttcccagtctgtggatccaaattcaagtctaattcagatcgggaagcccgagagaggaagaggaggcggcagctcagggccagtgtgtttgccctggccctgccgctgagcctgggcccgtgctgggctctgtgggttgctgtcccgaaggcttcagccaccatccgggggccacagcggaggctgctagcgagcctgctgcaggaaaatactgagatcctcggctacctgctgggtagcgttgctgcctttggctcctgggcttctcggatcccccctctctccagaatttgccgggggaagacatttccctccatccacctgtggacccggctcctgtcggccctggctggcctcctctatgcctcggccattgtggcccacgaccagcaccctgagtacctgctgcgggccacaccctggttcctgacctccctcggccgtgcggcactggacctcgctattattttcctttcgtgtgtgatgaagagcaagatgagacaggccttaggatttgccaaggaagccagagagagccctgacacccaagcccttttgacctgtgcagagaaagaggaagaaaaccaggagaatttggattgggtgcctctcaccacactgtcacactgcaagtcactgaggacaatgacagcaatcagtcgctacatggagctgaccatcgagcctgtgcagcaggcaggctgcagtgccaccaggctgccaggtgacgggcagacgagcgccggagatgcgtccctgcaggaccccccgtcgtaccctcccgttcaggtcatccgggcccgggtgtcttccggcagctcctctgaggtctcctccatcaactccgacctggagaagtattgggaggccctaaactcggagcagtgggaccctgaagatgtgaacctcgaaggcagcaaagaaaatgtggagctactgggatcccaggtgcaccaggactctgtgaggacagcacacctgagtgatgatgattaacaccttctggagccagctcatcagctcagagcccagggtcaggagttcgttcagtaacgcagcgggaatcaatctgcactg

SEQ ID NO: 194217 - DNA, 1567 bp, Homo sapiens
  Payload ID: 18374
  Gene Name: transmembrane protein 45A
  Uniprot ID: Q9NWC5
  ENST ID: ENST00000323523
  CDS Start-End: 314-1141
gaagcacatctggacagctgtgcggcctcctcgcgggccgacgtcagccgagcacgtcccccacgtcctctccttctcgccacttattatttattcgttttcccaaagaagcgactagggacccaagtttaaaaattcctccccccacccaatgcgagacgtggccagatcccatccaacacacggtttaattttcatggggctctgggatcaaaagaacagaaacagcaacaacaaaagcccagccgctgtctgattttaagctggcaaagtgggaaaaataaagtgttgagtaaacagaccaagttggatcatggggaatttcagaggtcatgccctccctggaaccttcttttttattattggtctttggtggtgtacaaagagtattctgaagtatatctgcaaaaagcaaaagcgaacctgctatcttggttccaaaacattattctatcgattggaaattttggagggaattacaatagttggcatggctttaactggcatggctggggagcagtttattcctggagggccccatctgatgttatatgactataaacaaggtcactggaatcaactcctgggctggcatcatttcaccatgtatttcttctttgggctgttgggtgtggcagatatcttatgtttcaccatcagttcacttcctgtgtccttaaccaagttaatgttgtcaaatgccttatttgtggaggcctttatcttctacaaccacactcatggccgggaaatgctggacatctttgtgcaccagctgctggttttggtcgtctttctgacaggcctcgttgccttcctagagttccttgttcggaacaatgtacttctggagctattgcggtcaagtctcattctgcttcaggggagctggttctttcagattggatttgtcctgtatccccccagtggaggtcctgcatgggatctgatggatcatgaaaatattttgtttctcaccatatgcttttgttggcattatgcagtaaccattgtcatcgttggaatgaattatgctttcattacctggttggttaaatctagacttaagaggctctgctcctcagaagttggacttctgaaaaatgctgaacgagaacaagaatcagaagaagaaatgtgactttgatgagcttccagtttttctagataaaccttttcttttttacattgttcttggttttgtttctcgatcttttgtttggagaacagctggctaaggatgactctaagtgtactgtttgcatttccaatttggttaaagtatttgaatttaaatattttctttttagctttgaaaatattttgggtgatactttcattttgcacatcatgcacatcatggtattcaggggctagagtgatttttttccagattatctaaagttggatgcccacactatgaaagaaatatttgttttatttgccttatagatatgctcaaggttactgggcttgctactatttgtaactccttgaccatggaattatacttgtttatcttgttgctgcaatgagaaataaatgaatgtatgtattttggtgcaga

SEQ ID NO: 194218 - DNA, 1910 bp, Homo sapiens
  Payload ID: 18374
  Gene Name: transmembrane protein 45A
  ENST ID: ENST00000403410
  CDS Start-End: 621-1496
gcgggccgacgtcagccgagcacgtcccccacgtcctctccttctcgccacttattatttattcgttttcccaaagaagcgactagggacccaagtttaaaaattcctccccccacccaatgcgagacgtggccagatcccatccaacacacggtttaattttcatggggctctgggatcaaaagaacagaaacagcaacaacaaaagcccagccgctgtctgattttaagctggcaaagtgggaaaaataaagtgttgagtaaacagaccaagttggggtgctatgggccaggtttctgaagttgggtggaggtggaggccaccggcagtgagtacaacgcccaggggaagcatgtgagtgggaggaagaaaagagagttttctggagctgttgcaatgtgtatgctggtgaaatctacttgagcattaagcagtatctcccagcattgttagctactgagtggcacatcttcagtacgcatgattcgtgggggactcaggcagaggtaaaagtgtgaaacttttcagcattacctaagaagcaaaggctcaattttggctgcttcattcttatctcttctgccacagttctaacgtgcctgatctactgagaccaaggatgaccaatgactcagaagggaaaatgggatttaaacacccaaagatcatggggaatttcagaggtcatgccctccctggaaccttcttttttattattggtctttggtggtgtacaaagagtattctgaagtatatctgcaaaaagcaaaagcgaacctgctatcttggttccaaaacattattctatcgattggaaattttggagggaattacaatagttggcatggctttaactggcatggctggggagcagtttattcctggagggccccatctgatgttatatgactataaacaaggtcactggaatcaactcctgggctggcatcatttcaccatgtatttcttctttgggctgttgggtgtggcagatatcttatgtttcaccatcagttcacttcctgtgtccttaaccaagttaatgttgtcaaatgccttatttgtggaggcctttatcttctacaaccacactcatggccgggaaatgctggacatctttgtgcaccagctgctggttttggtcgtctttctgacaggcctcgttgccttcctagagttccttgttcggaacaatgtacttctggagctattgcggtcaagtctcattctgcttcaggggagctggttctttcagattggatttgtcctgtatccccccagtggaggtcctgcatgggatctgatggatcatgaaaatattttgtttctcaccatatgcttttgttggcattatgcagtaaccattgtcatcgttggaatgaattatgctttcattacctggttggttaaatctagacttaagaggctctgctcctcagaagttggacttctgaaaaatgctgaacgagaacaagaatcagaagaagaaatgtgactttgatgagcttccagtttttctagataaaccttttcttttttacattgttcttggttttgtttctcgatcttttgtttggagaacagctggctaaggatgactctaagtgtactgtttgcatttccaatttggttaaagtatttgaatttaaatattttctttttagctttgaaaatattttgggtgatactttcattttgcacatcatgcacatcatggtattcaggggctagagtgatttttttccagattatctaaagttggatgcccacactatgaaagaaatatttgttttatttgccttatagatatgctcaaggttactgggcttgctactatttgtaactccttgaccatggaattatacttgtttatcttgttgctgcaatgagaaataaatgaatgtatgta

SEQ ID NO: 194219 - DNA, 874 bp, Homo sapiens
  Payload ID: 18374
  Gene Name: transmembrane protein 45A
  ENST ID: ENST00000449609
  CDS Start-End: 301-874
cgtcagccgagcacgtcccccacgtcctctccttctcgccacttattatttattcgttttcccaaagaagcgactagggacccaagtttaaaaattcctccccccacccaatgcgagacgtggccagatcccatccaacacacggtttaattttcatggggctctgggatcaaaagaacagaaacagcaacaacaaaagcccagccgctgtctgattttaagctggcaaagtgggaaaaataaagtgttgagtaaacagaccaagttggttctaacgtgcctgatctactgagaccaaggatgaccaatgactcagaagggaaaatgggatttaaacacccaaagatcatggggaatttcagaggtcatgccctccctggaaccttcttttttattattggtctttggtggtgtacaaagagtattctgaagtatatctgcaaaaagcaaaagcgaacctgctatcttggttccaaaacattattctatcgattggaaattttggagggaattacaatagttggcatggctttaactggcatggctggggagcagtttattcctggagggccccatctgatgttatatgactataaacaaggtcactggaatcaactcctgggctggcatcatttcaccatgtatttcttctttgggctgttgggtgtggcagatatcttatgtttcaccatcagttcacttcctgtgtccttaaccaagttaatgttgtcaaatgccttatttgtggaggcctttatcttctacaaccacactcatggccgggaaatgctggacatctttgtgcaccagctgctggttttggtcgtctttctgacaggcctcgttgccttcctagagttccttgttcggaaca

SEQ ID NO: 194220 - DNA, 2234 bp, Homo sapiens
  Payload ID: 18375
  Gene Name: transmembrane protein 45B
  Uniprot ID: Q96B21
  ENST ID: ENST00000281441
  CDS Start-End: 89-916
cctggagctgcacctgcttctgggcggacgcacttggcgcgcggcgcgggctgcagacggctgcgaggcgctgggcacaggtgtcctgatggcaaatttcaagggccacgcgcttccagggagtttcttcctgatcattgggctgtgttggtcagtgaagtacccgctgaagtactttagccacacgcggaagaacagcccactacattactatcagcgtctcgagatcgtcgaagccgcaattaggactttgttttccgtcactgggatcctggcagagcagtttgttccggatgggccccacctgcacctctaccatgagaaccactggataaagttaatgaattggcagcacagcaccatgtacctattctttgcagtctcaggaattgttgacatgctcacctatctggtcagccacgttcccttgggggtggacagactggttatggctgtggcagtattcatggaaggtttcctcttctactaccacgtccacaaccggcctccgctggaccagcacatccactcactcctgctgtatgctctgttcggagggtgtgttagtatctccctagaggtgatcttccgggaccacattgtgctggaacttttccgaaccagtctcatcattcttcagggaacctggttctggcagattgggtttgtgctgttcccaccttttggaacacccgaatgggaccagaaggatgatgccaacctcatgttcatcaccatgtgcttctgctggcactacctggctgccctcagcattgtggccgtcaactattctcttgtttactgccttttgactcggatgaagagacacggaaggggagaaatcattggaattcagaagctgaattcagatgacacttaccagaccgccctcttgagtggctcagatgaggaatgagccgagatgcggagggcgcagatgtcccactgcacagctggaatgaatggagttcatcccctccacctgaatgcctgctgtggtctgatcttaagggtctatatatttgcacctcctcattcaacacagggctggaggttctacaacaggaaatcaggcctacagcatcctgtgtatcttgcagttgggatttttaaacatactataaagtctgtgttggtatagtacccttcataaggaaaaatgaagtaatgcctataagtagcaggcctttgtgcctcagtgtcaagagaaatcaagagatgctaaaagctttacaatggaagtggcctcatggatgaatccggggtatgagcccaggagaacgtgctgcttttggtaacttatccctttttctcttaagaaagcaggtactttcttattagaaatatgttagaatgtgtaagcaaacgacagtgcctttagaattacaattctaacttacatattttttgaaagtaaaataattcacaagctttggtattttaaaattattgttaaacatatcataactaatcataccagggtactgcaataccactgtttataagtgacaaaattaggccaaaggtgatttttttttaaatcaggaagctggttactggctctactgagagttggagccctgatgttctgattcttcaaagtcaccctaaaagaagatctgacaggaaagctgtataatgagatagaaaaacgtcaggtatggaaggctttcagttttaatatggctgaaagcaaaggataacgaattcagaattagtaatgtaaaatcttgataccctaatcttgcttctggatctgttctttttttaaaaaaacttccttcaccgcgcctataatcctagcactttgggaggccgaggcaggcagatcacggggtcaggagatcaagaccatcctggctaacatggtgaaaccccgtctctactgaaaatacaaaaaattagccgggtgtggtggcgggcgcctgtagttccagctactcgggaggctgaggcaagagaatggcatgaacccggtaggggagcttgcagtgagcccagatcatgccactgtactccagcctaggtgacagagcaagactctgtctcaaaaacaagcaaacagacttccttcaacaaatatttattaaatatccactttgcaacagcactgaaatggctgtaaggactcctgagatatgtgtccagcaaggagtttacagtcaaacaggagagacatgcctgtagttacatccagtgtgatgggtgctgagaggcaagtacaaaccacgatg

SEQ ID NO: 194221 - DNA, 1639 bp, Homo sapiens
  Payload ID: 18375
  Gene Name: transmembrane protein 45B
  Uniprot ID: Q96B21
  ENST ID: ENST00000524567
  CDS Start-End: 282-1109
tttttttatgtttagtagagacagggtttcaccatgtttgtcaggcttatctcgaactcctgacctcaggtgatctgcctgcctcgccctcccaaagtgctgggattacaggcgtgagccaccgcacctggcctctcatgtttttctataagcagttaagagaagccacacagcatcctgaacactttgctttctatctcttctgccaaatatcctaggtcatcattcttaagttctgccctccatgaagtcctaggaaacgacataattcaggtgtcctgatggcaaatttcaagggccacgcgcttccagggagtttcttcctgatcattgggctgtgttggtcagtgaagtacccgctgaagtactttagccacacgcggaagaacagcccactacattactatcagcgtctcgagatcgtcgaagccgcaattaggactttgttttccgtcactgggatcctggcagagcagtttgttccggatgggccccacctgcacctctaccatgagaaccactggataaagttaatgaattggcagcacagcaccatgtacctattctttgcagtctcaggaattgttgacatgctcacctatctggtcagccacgttcccttgggggtggacagactggttatggctgtggcagtattcatggaaggtttcctcttctactaccacgtccacaaccggcctccgctggaccagcacatccactcactcctgctgtatgctctgttcggagggtgtgttagtatctccctagaggtgatcttccgggaccacattgtgctggaacttttccgaaccagtctcatcattcttcagggaacctggttctggcagattgggtttgtgctgttcccaccttttggaacacccgaatgggaccagaaggatgatgccaacctcatgttcatcaccatgtgcttctgctggcactacctggctgccctcagcattgtggccgtcaactattctcttgtttactgccttttgactcggatgaagagacacggaaggggagaaatcattggaattcagaagctgaattcagatgacacttaccagaccgccctcttgagtggctcagatgaggaatgagccgagatgcggagggcgcagatgtcccactgcacagctggaatgaatggagttcatcccctccacctgaatgcctgctgtggtctgatcttaagggtctatatatttgcacctcctcattcaacacagggctggaggttctacaacaggaaatcaggcctacagcatcctgtgtatcttgcagttgggatttttaaacatactataaagtctgtgttggtatagtacccttcataaggaaaaatgaagtaatgcctataagtagcaggcctttgtgcctcagtgtcaagagaaatcaagagatgctaaaagctttacaatggaagtggcctcatggatgaatccggggtatgagcccaggagaacgtgctgcttttggtaacttatccctttttctcttaagaaagcaggtactttcttattagaaatatgttagaatgtgtaagcaaacgacagtgcctttagaattacaattctaacttacatattttttgaaagtaaaataattcacaagctttggtattttaaaa

SEQ ID NO: 194222 - DNA, 4054 bp, Homo sapiens
  Payload ID: 18376
  Gene Name: transmembrane protein 47
  Uniprot ID: Q9BQJ4
  ENST ID: ENST00000275954
  CDS Start-End: 260-805
ggcagagcgcggcgcggggccggcggcgaaggtccggggtggaatcgacgtcgctgcggctgccgacgacccacacccggccggccgcctccgcagacccaccttggccgcgcggcagggggcgcgcagagccccgagggagcgagtccccgcgcgtggcagctcggcggcttctcccttcgggaggtccggctcccggctctccggacccgcctggcgtcctcgcctgcggcggggcggacgacagcggcgcccaggaatggcttcggcgggcagcggcatggaggaggtgcgcgtgtcggtgctgacccccttgaagctggtcgggctggtgtgcatcttcctggcgctgtgtctggacctgggggcggtgctgagcccggcctgggtcacagctgaccaccagtactacctgtcgttgtgggagtcctgccggaaacccgccagcttggacatctggcactgcgagtccacgctcagcagcgattggcagattgctactctggctttactcctgggcggcgctgccatcattctcattgcattcctggtgggtttgatttctatctgcgtgggatctcgaaggcgtttctatagacctgttgcggtcatgctttttgcagcagttgttttacaggtttgcagcctggtcctttacccaatcaagttcattgaaactgtgagcttgaaaatttaccatgagttcaactggggttatggcctggcctggggtgcaactatattttcgtttgggggtgccatcctttattgcctgaaccctaagaactatgaagactactactagaaccaatagtctcaaagtaaaaacaaccaccaccatccaacaaaaggattacgtctgcatcttttctaacttactattttctaaaacacttgtggagcatcaagcagtttgctcagttgatttaatcttttttgccttttggctgtcaacatcataaccagcttttacatccattttagaaatctgcacaaattaagagagctgattagacataggcaaatgctgcaaacttccaatatgttcatatcgtttttcttgacaaatgaagggtctatatgacagcaaccattgtgagaaactagttggaatgagatttgcctcaatctcctattgcctgcaggggagcagttggcataagcaacatttagaagttcctttgcgctgacaaggattccactgttagagcccttaccgcctgcttatcctacccaatgactacattggctgttggttatttgcttgagtgagcccttgaaaaatgaactgcccttcagcatctaatgggagttgtgaatgtaactggttaatgatacacattccaccttcaggaacactctttttaatgggaggttatgctttggcaatcagcgtctccctgggaagagagtcaagacttggagacatgtgcttctcattatgtggttagaaattggtgcctcagccctatctagactggggaaaaattgaggatctctgtttttcctggggcaaacagaaagaaatctgcatgagttgcttttgtaccctttaaatcatttgccaaacattgcagcaaacaagtgtgcgtatgtaacaagcttcactgtttttatagaaggtgaaccattagtataaatggtaataagttgttccctaaccctccacatacatttgcctatcacacgtaaaattaatatttactctagtgaagtggtttgagcactaaccttgtacacattgttaagaggcttagattggtattcatacttatttaccatacaaaagtatggtaccttaaagcttttgctctatgttctttactgtttcactggaaagtgtcaatagagttgcctaagaataaaaattgaaatggtgttaatctgaaaattaatgattctctgtaagcactgtagttgaaaagagagtagcaattaggatgatcattttgtgtaaaattcattaaaatagaaggctgctattttttgcaagtattttaaatgtcttcatttttttaagaaaggaatagcgatagatttatataaatatctaaatgtctcagtagaggagtagaattcatctggttatcacctggtcctctgaagttaactgatgggctaaccgatttgtgcacacacttaggatggatttatgttaagggaattacttactgactgttcaatggaaggaagtattaataatagggaataagtttgcaactaatctcatgctgcaaacttgtgttaattctgtttaatatacaaatttggatagcttaattataaacatatttttatatcaaatatacagttctaatataaaagttataaataattatttttgttaacaaagacactaaaacagtatgttctggttttggccctcttgcagaaagaagcattagaaaaattactttaaaagtagctatatgttactgtattgcaaaatctgttaagagcaggaccacatcgatagtatttaataatttgttttacctcccaaaacacagttcttctttcagcttgtcttaagaatggttgccaaaaacaacagccaaaaaaaaaaaacctattttattatccaaatgctagaaaacacacatgaattttctataaaatcacgaatatgaagtaccaggtttagtcttactttagcaatgatagacaaaagcgaataaatacatcacagacagaaacctttataaaaatatatgattctataaagaatcattagaaattatgagtggaaattctccagaaagatagtattatagagtcttttgaagcaattttttgagaaatagtaaaatctggggcagagtgtcttgcagttaattgcatattgtcagagcagcatgagaaatatgatatttggatagggatttcagcaactaaacattctctgttctgagatctctttattcctgaataatgaaagaatagtactttggtgctgacaccaatgaggcacttctcttggtcctagtagaggatgcagtgtactgttaaaccaatatcatcacatctcgagtcttatcaagttttcattctctgtcaatatgacaagctcaaagtgacagaatatgttataggttgaagcacacatatttgcagtttactgaaaagtagatttcttatgtgacttttttcccttctcagcaaagagccctacactagatttctaccatcactaatatttggaagtatttcattactaacaatctcagtacaacatgaaaattgttgcttctcatctaaaatacaattttgtctatcagaataaacacaagtgaaattttcacctacattaacattatgtctttgcagctttaggtttgttagatgtgttcttaagcataatttttagccacaaacccattgttagatagatatctatggatatagatctacatctatagatatagatatacacacatatatatactcacacacatatagcataaaatactcagcagggctagttattccgatttcttgcacaattatttagctttttgtaagttcaacatgtaaattttaaagacataaatatagagagacttatgtgtttgaatataaatgatatatatggattagcatgtacctgtatattattaaacatgcaatgaactgactggtaagtgacgtctaattgtatggctagcaatgtaatttattcagactgtatttttgtacagagcagtgcactctaacctatgcctctgtgtcctctttaatgcctaaagctgtgcctagaaatttcatctgtcttaaaagtaaaatatacttcatgctgtttatgctattagtttctgtactgctattctatatttattatttttaaatatatgacatgtttactacttaaacatgaattcatggtatcctggttattttttttaagtcatctgggggaaaacctgtttatcactccagtgattttgagtttgcagtttcacaatcagttcttcatttcatgatttttgtagttgacatgaagtcatctatgtggaaaaaaataaaaataaaagtgatttcacggatgtggtttgaa

SEQ ID NO: 194223 - DNA, 1918 bp, Homo sapiens
  Payload ID: 18377
  Gene Name: transmembrane protein 5
  Uniprot ID: Q9Y2B1
  ENST ID: ENST00000261234
  CDS Start-End: 159-1490
gcgtgtccggggcggggctgtaccgggcgctgggcggaggagccttggctggggactgcctggaaacgggctgggcctgcctcggacgccgccggtgtcgcggattctctttccgcccgctccatggcggtggatgcctgactggaagcccgagtgggatgcggctgacgcggaagcggctctgctcgtttcttatcgccctgtactgcctattctccctctacgctgcctaccacgtcttcttcgggcgccgccgccaggcgccggccgggtccccgcggggcctcaggaagggggcggcccccgcgcgggagagacgcggccgagaacagtccactttggaaagtgaagaatggaatccttgggaaggagatgaaaaaaatgagcaacaacacagatttaaaactagccttcaaatattagataaatccacgaaaggaaaaacagatctcagtgtacaaatctggggcaaagctgccattggcttgtatctctgggagcatatttttgaaggcttacttgatcccagcgatgtgactgctcaatggagagaaggaaagtcaatcgtaggaagaacacagtacagcttcatcactggtccagctgtaataccagggtacttctccgttgatgtgaataatgtggtactcattttaaatggaagagaaaaagcaaagatcttttatgccacccagtggttactttatgcacaaaatttagtgcaaattcaaaaactccagcatcttgctgttgttttgctcggaaatgaacattgtgataatgagtggataaacccattcctcaaaagaaatggaggcttcgtggagctgcttttcataatatatgacagcccctggattaatgacgtggatgtttttcagtggcctttaggagtagcaacatacaggaattttcctgtggtggaggcaagttggtcaatgctgcatgatgagaggccatatttatgtaatttcttaggaacgatttatgaaaattcatccagacaggcactaatgaacattttgaaaaaagatgggaacgataagctttgttgggtttcagcaagagaacactggcagcctcaggaaacaaatgaaagtcttaagaattaccaagatgccttgcttcagagtgatctcacattgtgcccggtcggagtaaacacagaatgctatcgaatctatgaggcttgctcctatggctccattcctgtggtggaagacgtgatgacagctggcaactgtgggaatacatctgtgcaccacggtgctcctctgcagttactcaagtccatgggtgctccctttatctttatcaagaactggaaggaactccctgctgttttagaaaaagagaaaactataattttacaagaaaaaattgaaagaagaaaaatgttacttcagtggtatcagcacttcaagacagagcttaaaatgaaatttactaatattttagaaagctcatttttaatgaataataaaagttaattatctttttgagctaacatgtgatttttaaaatcattttgactactgggtgtataaatgtgtttgtgtgtgtatgtatttatagatgttctttaaggtacccttgaaaactctacattatgtatgccacataatgacatttcagtcagtggtagactacatatatgatagtggtcccataagattataatggagctgaaaaatttctatcgcctagtgatgtcatagcctagtgatgacatatgtattgcaatacatcactcacgtgtttgtggtgatactggtgtaaacaaatctattgcactgccagtcaagtaaaagtacagcaattatgtcctgtacataatatttaataatgacaataaatgactatgttactggtttatgtatttactatactatactttttacaatttgtattagttctt

SEQ ID NO: 194224 - DNA, 1966 bp, Homo sapiens
  Payload ID: 18377
  Gene Name: transmembrane protein 5
  ENST ID: ENST00000537373
  CDS Start-End: 949-1500
cgaggtaggactgggtcggcggcttccttccggctctgcgctcctggctggggctgctgggcggctggggccgggtccccgcacccggctctcaagtccgggattacccgcagggcctgagaagcgctttgccccctacagcctctcgagccagcccttggctcggaattggagaatggtcctcattcttacccagatctcacacgccgtccccgctcccgatcccagggggtgacaggcgcgcacgcctttcaaacacgtgttaaaatccaagacgtcgtctcaaatgccagagatttgcgggaatgctcctggaaggcctcaaaatcgccgcaagaacagtccactttggaaagtgaagaatggaatccttgggaaggagatgaaaaaaatgagcaacaacacagatttaaaactagccttcaaatattagataaatccacgaaaggaaaaacagatctcagtgtacaaatctggggcaaagctgccattggcttgtatctctgggagcatatttttgaaggcttacttgatcccagcgatgtgactgctcaatggagagaaggaaagtcaatcgtaggaagaacacagtacagcttcatcactggtccagctgtaataccagggtacttctccgttgatgtgaataatgtggtactcattttaaatggaagagaaaaagcaaagatcttttatgccacccagtggttactttatgcacaaaatttagtgcaaattcaaaaactccagcatcttgctgttgttttgctcggaaatgaacattgtgataatgagtggataaacccattcctcaaaagaaatggaggcttcgtggagctgcttttcataatatatgacagcccctggattaatgacgtggatgtttttcagtggcctttaggagtagcaacatacaggaattttcctgtggtggaggcaagttggtcaatgctgcatgatgagaggccatatttatgtaatttcttaggaacgatttatgaaaattcatccagacaggcactaatgaacattttgaaaaaagatgggaacgataagctttgttgggtttcagcaagagaacactggcagcctcaggaaacaaatgaaagtcttaagaattaccaagatgccttgcttcagagtgatctcacattgtgcccggtcggagtaaacacagaatgctatcgaatctatgaggcttgctcctatggctccattcctgtggtggaagacgtgatgacagctggcaactgtgggaatacatctgtgcaccacggtgctcctctgcagttactcaagtccatgggtgctccctttatctttatcaagaactggaaggaactccctgctgttttagaaaaagagaaaactataattttacaagaaaaaattgaaagaagaaaaatgttacttcagtggtatcagcacttcaagacagagcttaaaatgaaatttactaatattttagaaagctcatttttaatgaataataaaagttaattatctttttgagctaacatgtgatttttaaaatcattttgactactgggtgtataaatgtgtttgtgtgtgtatgtatttatagatgttctttaaggtacccttgaaaactctacattatgtatgccacataatgacatttcagtcagtggtagactacatatatgatagtggtcccataagattataatggagctgaaaaatttctatcgcctagtgatgtcatagcctagtgatgacatatgtattgcaatacatcactcacgtgtttgtggtgatactggtgtaaacaaatctattgcactgccagtcaagtaaaagtacagcaattatgtcctgtacataatatttaataatgacaataaatgactatgttactggtttatgtatttactatactatactttttacaatttgtattagttcttgcattgctatgaataaatgcctgagattgagtaattta

SEQ ID NO: 194225 - DNA, 1599 bp, Homo sapiens
  Payload ID: 18377
  Gene Name: transmembrane protein 5
  ENST ID: ENST00000543342
  CDS Start-End: 96-458
aaacgggctgggcctgcctcggacgccgccggtgtcgcggattctctttccgcccgctccatggcggtggatgcctgactggaagcccgagtgggatgcggctgacgcggaagcggctctgctcgtttcttatcgccctgtactgcctattctccctctacgctgcctaccacgtcttcttcgggcgccgccgccaggcgccggccgggtccccgcggggcctcaggaagggggcggcccccgcgcgggagagacgcggccgagaacagtccactttggaaagtgaagaatggaatccttgggaaggagatgaaaaaaatgagcaacaacacagatttaaaactagccttcaaatattagataaatccacgaaaggaaaaacagatctcagtgtacaaatctggggcaaagctgccattgtccaagctggcagcgtttctgctcataaaacattctgaagaaccttgtgggccctctgtgtatgtcacaggattcactccattagatgggaagctcctctgcagatcttttctgagtaatcccatctccatttctggcttctgctgagatggctgaggagacctgcttgtatctctgggagcatatttttgaaggcttacttgatcccagcgatgtgactgctcaatggagagaaggaaagtcaatcgtaggaagaacacagtacagcttcatcactggtccagctgtaataccagggtacttctccgttgatgtgaataatgtggtactcattttaaatggaagagaaaaagcaaagatcttttatgccacccagtggttactttatgcacaaaatttagtgcaaattcaaaaactccagcatcttgctgttgttttgctcggaaatgaacattgtgataatgagtggataaacccattcctcaaaagaaatggaggcttcgtggagctgcttttcataatatatgacagcccctggattaatgacgtggatgtttttcagtggcctttaggagtagcaacatacaggaattttcctgtggtggaggcaagttggtcaatgctgcatgatgagaggccatatttatgtaatttcttaggaacgatttatgaaaattcatccagacaggcactaatgaacattttgaaaaaagatgggaacgataagctttgttgggtttcagcaagagaacactggcagcctcaggaaacaaatgaaagtcttaagaattaccaagatgccttgcttcagagtgatctcacattgtgcccggtcggagtaaacacagaatgctatcgaatctatgaggcttgctcctatggctccattcctgtggtggaagacgtgatgacagctggcaactgtgggaatacatctgtgcaccacggtgctcctctgcagttactcaagtccatgggtgctccctttatctttatcaagaactggaaggaactccctgctgttttagaaaaagagaaaactataattttacaagaaaaaattgaaagaagaaaaatgttacttcagtggtatcagcacttcaagacagagcttaaaatgaaatttactaatattttagaaagctcatttttaatgaataataaaagttaattatcttt

SEQ ID NO: 194226 - DNA, 2683 bp, Homo sapiens
  Payload ID: 18378
  Gene Name: transmembrane protein 50A
  Uniprot ID: O95807
  ENST ID: ENST00000374358
  CDS Start-End: 554-1027
agaaaataaacaagactaaaaagtcctgagtagcgctgtgtggccgcaaacctgaacccaccttttgcaccacgcgggacccggcactcttcctgccacccacccctgagagggctgcgcggccgaccccagtactagaaaacactcgtcacctcactcaagacgggtacgaaggccaacggacgccttcctttagaacgctcagcacacagagcaacttctcacgcctactctcaaatggcgtactccaaactagcactcccgacgtccagctgtgaacccagagcggcggaaagcccctgaacccagcgcccgggcatgcgcagacgcgttgttgtggtgggcgtggctccctccggacccggcgccccgccctccgccccgtgtccgcatgcgcgactgagccgggtggatggtactgctgcatccgggtgtctggaggctgtggccgttttgttttcttggctaaaatcgggggagtgaggcgggccggcgcggcgcgacaccgggctccggaaccactgcacgacggggctggactgacctgaaaaaaatgtctggatttctagagggcttgagatgctcagaatgcattgactggggggaaaagcgcaatactattgcttccattgctgctggtgtactattttttacaggctggtggattatcatagatgcagctgttatttatcccaccatgaaagatttcaaccactcataccatgcctgtggtgttatagcaaccatagccttcctaatgattaatgcagtatcgaatggacaagtccgaggtgatagttacagtgaaggttgtctgggtcaaacaggtgctcgcatttggcttttcgttggtttcatgttggcctttggatctctgattgcatctatgtggattctttttggaggttatgttgctaaagaaaaagacatagtataccctggaattgctgtatttttccagaatgccttcatcttttttggagggctggtttttaagtttggccgcactgaagacttatggcagtgaacacatctgatttcccacagcacaacagccctgcatgggtttgtttgtttttttactgctcactcccaaccttttgtaatgccattttctaaacttatttctgagtgtagtctcagcttaaagttgtgtaatactaaaatcacgagaacacctaaacaacaaccaaaaatctattgtggtatgcacttgattaacttataaaatgttagaggaaactttcacatgaataatttttgtcaaattttatcatggtataatttgtaaaaataaaaagaaattacaaaagaaattatggatttgtcaatgtaagtatttgtcatatctgaggtccaaaaccacaatgaaagtgctctgaagatttaatgtgtttattcaaatgtggtctcttctgtgtcaaatgttaaatgaaatataaacattttttagtttttaaaatattccgtggtcaaaattcttcctcactataattggtatttacttttaccaaaaattctgtgaacatgtaatgtaactggcttttgagggtctcccaaggggtgagtggacgtgttggaagagagaagcaccatggtccagccaccaggctccctgtgtcccttccatgggaaggtcttccgctgtgcctctcattccaagggcaggaagatgtgactcagccatgacacgtggttctggtgggatgcacagtcactccacatccaccattgaaggaaaggaaaaaagggcagagacttgacactccagtcttagacaggggacaatttctttgtagttgttctgataataaactgggttccatgttgcatttcatctgtgtactgaaccactagcctaatagaccagcacggtcaactagaatgacaaacattagctactgggaactcttgttgtctcttcctcttcagaactcttgtccccccaggctccccacctctgcaagatgggatacactcttcaggaccacagtttgaaatgtctttcataaaatgtgctacaattagccttcggaatatttgctgggtgatttaaatgtgtgggtctcatttccatgctagccatggtcatctgacagtctctacactgtgaatattgcctggtgatcaagactctcctcaaagaaatgacttgctgtcatcccacatgaactcctgatgttttttctacaaaagtccataaaatgtgaaaactggagaagatcttagaggttgaagcccaccttctcttttcacataggagggaacagaccatggaaatttaaacgacttcctcacggtcacagaactagttttttaatcctcaggcagtgcatccccccaccctacaactgagcacaacctctttccccacagtgcaattcagaatatgctcagggaatgccagccaccttgtaaaactgctgggagaaaagcatgattcccacaaggactaagtatcagtgatttgtaattttcctgttttgtattatctgctttgctgatgtagacaagagttaactgagtagcatgctttattaagcatgagaaagaatcttaagaattgtcaataaaattaacccaaaactttaataatgtgtctgtaaccaagaaaatattgatagcatcatcctaatgaaactaaacatttattttaaacttattaaattgactcttaaactaa

SEQ ID NO: 194227 - DNA, 619 bp, Homo sapiens
  Payload ID: 18379
  Gene Name: transmembrane protein 50B
  ENST ID: ENST00000432504
  CDS Start-End: 376-619
ggaaagggaaggggaacaacattctttcgagaattataaaccttgagctccgttaaataagtagcagcagagcattgtcactggagcagtggtagtcgcgggtaggaccgtttcggtttttagccaataggctggttaaaggtacttaaaacagtaagttggaaggtgctgaaattctaagcatggtagcccaagcattagtgttccagagaaccaggcagatgctccattgccttctgtgacctgatcttggaagtggcatggagaagttacatagcatcacttcctctactctactggtctactagtctttattgttgacccaaattcaaaggatacagcatttaatgaaaaatttatgcttaagaagtaaaaatggcaggcttcctagataattttcgttggccagaatgtgaatgtattgactggagtgagagaagaaatgctgtggcatctgttgtcgcaggtatattgttttttacaggctggtggataatgattgatgcagctgtggtgtatcctaagccagaacagttgaaccatgcctttcacacatgtggtgtattttccacattggctttcttcatgataaatgctgtatccaatgctcaggtgagag

SEQ ID NO: 194228 - DNA, 3062 bp, Homo sapiens
  Payload ID: 18379
  Gene Name: transmembrane protein 50B
  Uniprot ID: P56557
  ENST ID: ENST00000420455
  CDS Start-End: 148-624
gctcccggggctgaggtggagccgcgggacgccggcagggttgtggcgcagcagtctccttcctgcgcgcgcgcctgaagtcggcgtgggcgtttgaggaagctgggatacagcatttaatgaaaaatttatgcttaagaagtaaaaatggcaggcttcctagataattttcgttggccagaatgtgaatgtattgactggagtgagagaagaaatgctgtggcatctgttgtcgcaggtatattgttttttacaggctggtggataatgattgatgcagctgtggtgtatcctaagccagaacagttgaaccatgcctttcacacatgtggtgtattttccacattggctttcttcatgataaatgctgtatccaatgctcaggtgagaggtgatagctatgaaagcggctgtttaggaagaacaggtgctcgagtttggcttttcattggtttcatgttgatgtttgggtcacttattgcttccatgtggattctttttggtgcatatgttacccaaaatactgatgtttatccgggactagctgtgttttttcaaaatgcacttatattttttagcactctgatctacaaatttggaagaaccgaagagctatggacctgagatcacttcttaagtcacattttccttttgttatattctgtttgtagataggttttttatctctcagtacacattgccaaatggagtagattgtacattaaatgttttgtttctttacatttttatgttctgagttttgaaatagttttatgaaatttctttatttttcattgcatagactgttaatatgtatataatacaagactatatgaattggataatgagtatcagttttttattcctgagatttagaacttgatctactccctgagccagggttacatcatcttgtcattttagaagtaaccactcttgtctctctggctgggcacggtggctcatgcctgtaatcccagcactttgggaggccgaggcgggccgattgcttgaggtcaagtgtttgagaccagcctggccaacatggcgaaaccccatctactaaaaatacaaaaattagccaggcatggtggtgggtgcctgtaatcccaactacctaggaggctgaggcaggagaatcgcttgaacccggggggcagaggttgtagtgagctgagtttgcgccactgcactctagcctgggggagaaagtgaaactccctctcaaaaaaaagaaggaccactctcagtatctgatttctgaagatgtacaaaaaaatatagcttcatatatctagaatgagcactgagccataaaaggttttcagcaagttgtaacttattttggcctaaaaatgaggtttttttggtaaagaaaaaatatttgttcttatgtattgaagaagtgtacttttatataatgattttttaaatgcccaaaggactagtttgaaagcttcttttaaaaagaattcctctaatatgactttatgtgagaagggataatacatgatcaaataaactcagttttttatggttactgtaaaaagactgtgtaaggcagctcagcaccatgcttctcgtaaaagcagcttcaaatatccactggggttatcttttgacaacttgccattatctgatgttacacaattcaatagcaagcaagtttgagacaatcgcagtttaaaagcatgaaccatttaacaaaaagtggaataattaaagataaagcacttcttcccaaagggaattatcacctagtgaaaaattatgcatttcatctactcagttaccgactgcaagtctctcctcgctctagctctcaagctttgggtgaatattcctgtgaaatatatcttcaacttgaaagttcatactccaatcaaaaactccttttactgagtttgcagtactgtatttgcactgtttgtattcctctgggcccttattgctacttttgctttcctttgttacacagattttgtgttgcactttttctccagaggggtgttgtagagccttggttgtatgaataataccagtggtagtgtccacggctctaatgtaagcccatttggcatcactcctctcctctctcttgagaggatttcttgtgcacagagtatgaagcagttgtggagcgctgtgcctttgtcaagataccatcttgtttgatgacttctttctttgctgttttttcttcaaaatgttagtaagctctgtcatgcttctagcaaattgtaagactaattatttgtttccacctcataacctgttgcaataaatattacttctcatacagtttaatattgttgtttgttggagaaaatgaaccataaaaattgatttgctgttcagttttcaattattcaagtatacccaattaaagatgcagttatgtttataaaataagaagaaatagacttgtaaaatgcttatgtgagggttattgaaggtttccctgaagactgactggaaatggtggctgtttttttctatttctgactctgccatgaatttttttttttttttttaaagacaatatctcactctgttgcctaggctggagtgcagtggtgcaaccacagctcactgcaccttcaaatgctggagctcaggcaatcctcttacctccgctttccaagcagctgggaccacagatgtatcctccactcctcgctggccaccatcctgctgcccaacagaagaagctcttctgtctccgatttcctgaacggtctaaggaccaggaagaaacaggctcctgccagcaccgacagcaacgaaaatgttcccacggagatcaggatgacttgctgaagctcagtggaggctaaaaagaggacacgaaagtgaacagaatgatcttcctacgcacaacacaaacatcagttaatgttccatccatgctgcttaaagagcattcctgtcctagtaaaatgggcaagtccctctaccccccaccctcacctggtatgcttacattaatagctaaagtcaatcctgtaatgaaataaagcaagtggtagctgtctggtagcctccactactgcaaatctcag

SEQ ID NO: 194229 - DNA, 634 bp, Homo sapiens
  Payload ID: 18379
  Gene Name: transmembrane protein 50B
  ENST ID: ENST00000441128
  CDS Start-End: 42-176
gatacagcatttaatgaaaaatttatgcttaagaagtaaaaatggcaggcttcctagataattttcgttggccagaatgtgaatgtattgactggagtgagagaagaaatgctgtggcatctgttgtcgcaggtatattggtgctcgagtttggcttttcattggtttcatgttgatgtttgggtcacttattgcttccatgtggattctttttggtgcatatgttacccaaaatactgatgtttatccgggactagctgtgttttttcaaaatgcacttatattttttagcactctgatctacaaatttggaagaaccgaagagctatggacctgagatcacttcttaagtcacattttccttttgttatattctgtttgtagataggttttttatctctcagtacacattgccaaatggagtagattgtacattaaatgttttgtttctttacatttttatgttctgagttttgaaatagttttatgaaatttctttatttttcattgcatagactgttaatatgtatataatacaagactatatgaattggataatgagtatcagttttttattcctgagatttagaacttgatctactccctgagccagggttacatcatcttgtcattt

SEQ ID NO: 194230 - DNA, 982 bp, Homo sapiens
  Payload ID: 18379
  Gene Name: transmembrane protein 50B
  ENST ID: ENST00000442441
  CDS Start-End: 141-596
gggctgaggtggagccgcgggacgccggcagggttgtggcgcagcagtctccttcctgcgcgcgcgcctgaagtcggcgtgggcgtttgaggaagctgggatacagcatttaatgaaaaatttatgcttaagaagtaaaaatggcaggcttcctagataattttcgttggccagaatgtgaatgtattgactggagtgagagaagaaatgctgtggcatctgttgtcgcaggtatattgttttttacaggctggtggataatgattgatgcagctgtggtgtatcctaagccagaacagttgaaccatgcctttcacacatgtggtgtattttccacattggctttcttcatgataaatgctgtatccaatgctcaggtgagaggtgatagctatgaaagcggctgtttaggaagaacaggtgctcgagtttggcttttcattggtttcatgttgatgtttgggtcacttattgcttccatgtggattctttttggtgcatatgttacccaaatgttggccataggaggcaaaggagcaagttactgcttcctcagcagttttgatgtagctagaaccagcaattactttgactaaaagaaaactttatactgatgtttatccgggactagctgtgttttttcaaaatgcacttatattttttagcactctgatctacaaatttggaagaaccgaagagctatggacctgagatcacttcttaagtcacattttccttttgttatattctgtttgtagataggttttttatctctcagtacacattgccaaatggagtagattgtacattaaatgttttgtttctttacatttttatgttctgagttttgaaatagttttatgaaatttctttatttttcattgcatagactgttaatatgtatataatacaagactatatgaattggataatgagtatcagttttttattcctgagatttagaacttgatctactccctga

SEQ ID NO: 194231 - DNA, 2375 bp, Homo sapiens
  Payload ID: 18379
  Gene Name: transmembrane protein 50B
  Uniprot ID: P56557
  ENST ID: ENST00000542230
  CDS Start-End: 216-692
ctgcggtgcacacggcgcctcgccccgcctcaccggcgctctatcctcgcgtctgctcccagctccgggctcccggggctgaggtggagccgcgggacgccggcagggttgtggcgcagcagtctccttcctgcgcgcgcgcctgaagtcggcgtgggcgtttgaggaagctgggatacagcatttaatgaaaaatttatgcttaagaagtaaaaatggcaggcttcctagataattttcgttggccagaatgtgaatgtattgactggagtgagagaagaaatgctgtggcatctgttgtcgcaggtatattgttttttacaggctggtggataatgattgatgcagctgtggtgtatcctaagccagaacagttgaaccatgcctttcacacatgtggtgtattttccacattggctttcttcatgataaatgctgtatccaatgctcaggtgagaggtgatagctatgaaagcggctgtttaggaagaacaggtgctcgagtttggcttttcattggtttcatgttgatgtttgggtcacttattgcttccatgtggattctttttggtgcatatgttacccaaaatactgatgtttatccgggactagctgtgttttttcaaaatgcacttatattttttagcactctgatctacaaatttggaagaaccgaagagctatggacctgagatcacttcttaagtcacattttccttttgttatattctgtttgtagataggttttttatctctcagtacacattgccaaatggagtagattgtacattaaatgttttgtttctttacatttttatgttctgagttttgaaatagttttatgaaatttctttatttttcattgcatagactgttaatatgtatataatacaagactatatgaattggataatgagtatcagttttttattcctgagatttagaacttgatctactccctgagccagggttacatcatcttgtcattttagaagtaaccactcttgtctctctggctgggcacggtggctcatgcctgtaatcccagcactttgggaggccgaggcgggccgattgcttgaggtcaagtgtttgagaccagcctggccaacatggcgaaaccccatctactaaaaatacaaaaattagccaggcatggtggtgggtgcctgtaatcccaactacctaggaggctgaggcaggagaatcgcttgaacccggggggcagaggttgtagtgagctgagtttgcgccactgcactctagcctgggggagaaagtgaaactccctctcaaaaaaaagaaggaccactctcagtatctgatttctgaagatgtacaaaaaaatatagcttcatatatctagaatgagcactgagccataaaaggttttcagcaagttgtaacttattttggcctaaaaatgaggtttttttggtaaagaaaaaatatttgttcttatgtattgaagaagtgtacttttatataatgattttttaaatgcccaaaggactagtttgaaagcttcttttaaaaagaattcctctaatatgactttatgtgagaagggataatacatgatcaaataaactcagttttttatggttactgtaaaaagactgtgtaaggcagctcagcaccatgcttctcgtaaaagcagcttcaaatatccactggggttatcttttgacaacttgccattatctgatgttacacaattcaatagcaagcaagtttgagacaatcgcagtttaaaagcatgaaccatttaacaaaaagtggaataattaaagataaagcacttcttcccaaagggaattatcacctagtgaaaaattatgcatttcatctactcagttaccgactgcaagtctctcctcgctctagctctcaagctttgggtgaatattcctgtgaaatatatcttcaacttgaaagttcatactccaatcaaaaactccttttactgagtttgcagtactgtatttgcactgtttgtattcctctgggcccttattgctacttttgctttcctttgttacacagattttgtgttgcactttttctccagaggggtgttgtagagccttggttgtatgaataataccagtggtagtgtccacggctctaatgtaagcccatttggcatcactcctctcctctctcttgagaggatttcttgtgcacagagtatgaagcagttgtggagcgctgtgcctttgtcaagataccatcttgtttgatgacttctttctttgctgttttttcttcaaaatgttagtaagctctgtcatgcttctagcaaattgtaagactaattatttgtttccacctcataacctgttgcaataaatattacttctcatacagtttaa

SEQ ID NO: 194232 - DNA, 3062 bp, Homo sapiens; identical to SEQ ID NO: 194228
  Payload ID: 18379
  Gene Name: transmembrane protein 50B
  Uniprot ID: P56557
  ENST ID: ENST00000571778
  CDS Start-End: 148-624

SEQ ID NO: 194233 - DNA, 619 bp, Homo sapiens
  Payload ID: 18379
  Gene Name: transmembrane protein 50B
  ENST ID: ENST00000574612
  CDS Start-End: 376-619
ggaaagggaaggggaacaacattctttcgagaattataaaccttgagctccgttaaataagtagcagcagagcattgtcactggagcagtggtagtcgcgggtaggaccgtttcggtttttagccaataggctggttaaaggtacttaaaacagtaagttggaaggtgctgaaattctaagcatggtagcccaagcattagtgttccagagaaccaggcagatgctccattgccttctgtgacctgatcttggaagtggcatggagaagttacatagcatcacttcctctactctactggtcaactagtctttattgttgacccaaattcaaaggatacagcatttaatgaaaaatttatgcttaagaagtaaaaatggcaggcttcctagataattttcgttggccagaatgtgaatgtattgactggagtgagagaagaaatgctgtggcatctgttgtcgcaggtatattgttttttacaggctggtggataatgattgatgcagctgtggtgtatcctaagccagaacagttgaaccatgcctttcacacatgtggtgtattttccacattggctttcttcatgataaatgctgtatccaatgctcaggtgagag

SEQ ID NO: 194234 - DNA, 2375 bp, Homo sapiens; identical to SEQ ID NO: 194231
  Payload ID: 18379
  Gene Name: transmembrane protein 50B
  Uniprot ID: P56557
  ENST ID: ENST00000573374
  CDS Start-End: 216-692

SEQ ID NO: 194235 - DNA, 982 bp, Homo sapiens; identical to SEQ ID NO: 194230
  Payload ID: 18379
  Gene Name: transmembrane protein 50B
  ENST ID: ENST00000573687
  CDS Start-End: 141-596

SEQ ID NO: 194236 - DNA, 634 bp, Homo sapiens; identical to SEQ ID NO: 194229
  Payload ID: 18379
  Gene Name: transmembrane protein 50B
  ENST ID: ENST00000572455
  CDS Start-End: 42-176

SEQ ID NO: 194237 - DNA, 1931 bp, Homo sapiens
  Payload ID: 18380
  Gene Name: transmembrane protein 51
  Uniprot ID: Q9NW97
  ENST ID: ENST00000376008
  CDS Start-End: 433-1194
agtgcgccctctccaccactgcgttccctcggctaagaatcccccgaaccccagccccgcgatcgcggcgcccaccgaggaggccgcccgggtggggcgcgggggtcgcgaagcccgcagtcccggaccgcccagccgagacggagccggacccgccgcctcccgggtggatctttaactcaagactagcatgaagagttgccttctggcctgccctgagtctcctcaaataacaacaggcccttccaccgcagccatccgcacgggaggcctcgcgattgctcggaaccatcccgcaggagttcagctgatattttctagtgtggggcgagagattttgtggagcgcatttaaggggtttttgttgtgactgctgccttgtatacatttattttctttcttggaactgggcctcgccctcctcccactgacatgatggcccagtccaaggccaatggctcgcactatgcgctgaccgccatcggcctggggatgctggtccttggggtgatcatggccatgtggaacctggtacccggcttcagcgcggccgagaagccaacagctcagggcagcaacaagaccgaggtgggtggcggcatcctcaagagcaagaccttctctgtggcctacgtgctggtcggggccggggtgatgctgctgctgctttctatctgcctgagtatcagggataagaggaagcagcggcagggcgaggacctggcccatgtccagcacccgacaggcgctgggcctcacgcccaggaggaagacagccaggaggaagaagaggaggatgaggaggctgcctcaaggtactatgttcccagctacgaggaagtgatgaacacaaactactcagaagcaaggggagaggagcagaacccgaggttgagcatctctctcccgtcctatgagtcactgacggggctcgacgagaccacccccacatccaccagggctgacgtggaggccagccctgggaacccccctgacaggcagaactctaagttggccaaacgactgaaaccgctgaaagttcgaaggattaaatctgaaaagcttcacctcaaagactttaggatcaacctcccagacaaaaacgtccctcctccctcgatagagcctttgactcctccaccgcagtatgatgaagtccaggagaaggcccccgacacccggccgcccgactgaatggccccacttgagccacgctccctcctgtctctcacacctttcacccccaagactctaacaaagccacatgagccacagttgagaagcggaggggccagctgtgcatggagccatttggatggcggcgggcggggggggattctctgtatcaggagtgactttgttgccccacacagcctcctgctgcaggtgctttggaaagagatgctgccttggagctggtgaatctgtggaccacattcaagggtgtggcacaggcatcttcccatccttttcactccgaatcgctggcgacacattctcctttccagctaggaaagggttcctcgcggctggtttagattgtggttgtttgttttgcttctactaagactgttttgtttcaaaaaggaaacaagttttgtgtttgctgtctacgctggagtcctgaactgtgggtagaaaacacgacctggctttgtagaaaggacacagggctgttttatgaactaagcggtgaggctcaggtggcggctctcgcagagcccctgatgctgttgttctttgagggcttaaggcctgatgaacgtaggcacgtgatgcataatagtcttcaatggtacacttaactagtctcttctgtgtaacagcaaaaaaaaaaaaaaaaagaagaagaaagaaaactgtaggaaatgttctttttgaaatgccatgcaatggagctttttgtaataaaatattttatatgtagtaca

SEQ ID NO: 194238 - DNA, 1843 bp, Homo sapiens
  Payload ID: 18380
  Gene Name: transmembrane protein 51
  Uniprot ID: Q9NW97
  ENST ID: ENST00000376014
  CDS Start-End: 486-1247
aaagggctggacgctcacccaagaaggggaccccggcctgacctctctcggaattcaaaaaaatctaaggctcagagagggaatgggagctggctcttccctctgtgtttagcatccacgttttttggcggtctggctgaaaccagcccaccctagttcgggcgccagagcaacgcagttccgagggcagatctccaaggggcggaggcagagccgcgggtggatctttaactcaagactagcatgaagagttgccttctggcctgccctgagtctcctcaaataacaacaggcccttccaccgcagccatccgcacgggaggcctcgcgattgctcggaaccatcccgcaggagttcagctgatattttctagtgtggggcgagagattttgtggagcgcatttaaggggtttttgttgtgactgctgccttgtatacatttattttctttcttggaactgggcctcgccctcctcccactgacatgatggcccagtccaaggccaatggctcgcactatgcgctgaccgccatcggcctggggatgctggtccttggggtgatcatggccatgtggaacctggtacccggcttcagcgcggccgagaagccaacagctcagggcagcaacaagaccgaggtgggtggcggcatcctcaagagcaagaccttctctgtggcctacgtgctggtcggggccggggtgatgctgctgctgctttctatctgcctgagtatcagggataagaggaagcagcggcagggcgaggacctggcccatgtccagcacccgacaggcgctgggcctcacgcccaggaggaagacagccaggaggaagaagaggaggatgaggaggctgcctcaaggtactatgttcccagctacgaggaagtgatgaacacaaactactcagaagcaaggggagaggagcagaacccgaggttgagcatctctctcccgtcctatgagtcactgacggggctcgacgagaccacccccacatccaccagggctgacgtggaggccagccctgggaacccccctgacaggcagaactctaagttggccaaacgactgaaaccgctgaaagttcgaaggattaaatctgaaaagcttcacctcaaagactttaggatcaacctcccagacaaaaacgtccctcctccctcgatagagcctttgactcctccaccgcagtatgatgaagtccaggagaaggcccccgacacccggccgcccgactgaatggccccacttgagccacgctccctcctgtctctcacacctttcacccccaagactctaacaaagccacatgagccacagttgagaagcggaggggccagctgtgcatggagccatttggatggcggcgggcggggggggattctctgtatcaggagtgactttgttgccccacacagcctcctgctgcaggtgctttggaaagagatgctgccttggagctggtgaatctgtggaccacattcaagggtgtggcacaggcatcttcccatccttttcactccgaatcgctggcgacacattctcctttccagctaggaaagggttcctcgcggctggtttagattgtggttgtttgttttgcttctactaagactgttttgtttcaaaaaggaaacaagttttgtgtttgctgtctacgctggagtcctgaactgtgggtagaaaacacgacctggctttgtagaaaggacacagggctgttttatgaactaagcggtgaggctcaggtggcggctctcgcagagcccctgatgctgttgttctttgagggcttaaggcctgatgaacgtaggcacgtgatgcataatagtctt

SEQ ID NO: 194239 - DNA, 1842 bp, Homo sapiens
  Payload ID: 18380
  Gene Name: transmembrane protein 51
  Uniprot ID: Q9NW97
  ENST ID: ENST00000400796
  CDS Start-End: 416-1177
acgccggcgctcccaggccgcgcttcctgcgtccccaacccggtccctgagagggcagtgcgccctctccaccactgcgttccctcggctaagaatcccccgaaccccagccccgcgatcgcggcgcccaccgaggaggccgcccgggtggggcgcgggggtcgcgaagcccgcagtcccggaccgcccagccgagacggagccggacccgccgcctcccgggcccttccaccgcagccatccgcacgggaggcctcgcgattgctcggaaccatcccgcaggagttcagctgatattttctagtgtggggcgagagattttgtggagcgcatttaaggggtttttgttgtgactgctgccttgtatacatttattttctttcttggaactgggcctcgccctcctcccactgacatgatggcccagtccaaggccaatggctcgcactatgcgctgaccgccatcggcctggggatgctggtccttggggtgatcatggccatgtggaacctggtacccggcttcagcgcggccgagaagccaacagctcagggcagcaacaagaccgaggtgggtggcggcatcctcaagagcaagaccttctctgtggcctacgtgctggtcggggccggggtgatgctgctgctgctttctatctgcctgagtatcagggataagaggaagcagcggcagggcgaggacctggcccatgtccagcacccgacaggcgctgggcctcacgcccaggaggaagacagccaggaggaagaagaggaggatgaggaggctgcctcaaggtactatgttcccagctacgaggaagtgatgaacacaaactactcagaagcaaggggagaggagcagaacccgaggttgagcatctctctcccgtcctatgagtcactgacggggctcgacgagaccacccccacatccaccagggctgacgtggaggccagccctgggaacccccctgacaggcagaactctaagttggccaaacgactgaaaccgctgaaagttcgaaggattaaatctgaaaagcttcacctcaaagactttaggatcaacctcccagacaaaaacgtccctcctccctcgatagagcctttgactcctccaccgcagtatgatgaagtccaggagaaggcccccgacacccggccgcccgactgaatggccccacttgagccacgctccctcctgtctctcacacctttcacccccaagactctaacaaagccacatgagccacagttgagaagcggaggggccagctgtgcatggagccatttggatggcggcgggcggggggggattctctgtatcaggagtgactttgttgccccacacagcctcctgctgcaggtgctttggaaagagatgctgccttggagctggtgaatctgtggaccacattcaagggtgtggcacaggcatcttcccatccttttcactccgaatcgctggcgacacattctcctttccagctaggaaagggttcctcgcggctggtttagattgtggttgtttgttttgcttctactaagactgttttgtttcaaaaaggaaacaagttttgtgtttgctgtctacgctggagtcctgaactgtgggtagaaaacacgacctggctttgtagaaaggacacagggctgttttatgaactaagcggtgaggctcaggtggcggctctcgcagagcccctgatgctgttgttctttgagggcttaaggcctgatgaacgtaggcacgtgatgcataatagtcttcaatggtacacttaactagtctcttctgtgtaacagcaaaaaaaaaaaaaaaaagaagaagaaagaaaa

SEQ ID NO: 194240 - DNA, 1942 bp, Homo sapiens
  Payload ID: 18380
  Gene Name: transmembrane protein 51
  Uniprot ID: Q9NW97
  ENST ID: ENST00000428417
  CDS Start-End: 447-1208
cagctgcctatcggcttctcagtgtttgaacttcaaagggctggacgctcacccaagaaggggaccccggcctgacctctctcggaattcaaaaaaatctaaggctcagagagggaatgggagctggctcttccctctgtgtttagcatccacgttttttggcggtctggctgaaaccagcccaccctagttcgggcgccagagcaacgcagttccgagggcagatctccaaggggcggaggcagagccgcgggcccttccaccgcagccatccgcacgggaggcctcgcgattgctcggaaccatcccgcaggagttcagctgatattttctagtgtggggcgagagattttgtggagcgcatttaaggggtttttgttgtgactgctgccttgtatacatttattttctttcttggaactgggcctcgccctcctcccactgacatgatggcccagtccaaggccaatggctcgcactatgcgctgaccgccatcggcctggggatgctggtccttggggtgatcatggccatgtggaacctggtacccggcttcagcgcggccgagaagccaacagctcagggcagcaacaagaccgaggtgggtggcggcatcctcaagagcaagaccttctctgtggcctacgtgctggtcggggccggggtgatgctgctgctgctttctatctgcctgagtatcagggataagaggaagcagcggcagggcgaggacctggcccatgtccagcacccgacaggcgctgggcctcacgcccaggaggaagacagccaggaggaagaagaggaggatgaggaggctgcctcaaggtactatgttcccagctacgaggaagtgatgaacacaaactactcagaagcaaggggagaggagcagaacccgaggttgagcatctctctcccgtcctatgagtcactgacggggctcgacgagaccacccccacatccaccagggctgacgtggaggccagccctgggaacccccctgacaggcagaactctaagttggccaaacgactgaaaccgctgaaagttcgaaggattaaatctgaaaagcttcacctcaaagactttaggatcaacctcccagacaaaaacgtccctcctccctcgatagagcctttgactcctccaccgcagtatgatgaagtccaggagaaggcccccgacacccggccgcccgactgaatggccccacttgagccacgctccctcctgtctctcacacctttcacccccaagactctaacaaagccacatgagccacagttgagaagcggaggggccagctgtgcatggagccatttggatggcggcgggcggggggggattctctgtatcaggagtgactttgttgccccacacagcctcctgctgcaggtgctttggaaagagatgctgccttggagctggtgaatctgtggaccacattcaagggtgtggcacaggcatcttcccatccttttcactccgaatcgctggcgacacattctcctttccagctaggaaagggttcctcgcggctggtttagattgtggttgtttgttttgcttctactaagactgttttgtttcaaaaaggaaacaagttttgtgtttgctgtctacgctggagtcctgaactgtgggtagaaaacacgacctggctttgtagaaaggacacagggctgttttatgaactaagcggtgaggctcaggtggcggctctcgcagagcccctgatgctgttgttctttgagggcttaaggcctgatgaacgtaggcacgtgatgcataatagtcttcaatggtacacttaactagtctcttctgtgtaacagcaaaaaaaaaaaaaaaaagaagaagaaagaaaactgtaggaaatgttctttttgaaatgccatgcaatggagctttttgtaataaaatattttatatgtagt

SEQ ID NO: 194241 - DNA, 1861 bp, Homo sapiens
  Payload ID: 18380
  Gene Name: transmembrane protein 51
  ENST ID: ENST00000434578
  CDS Start-End: 454-861
caacccggtccctgagagggcagtgcgccctctccaccactgcgttccctcggctaagaatcccccgaaccccagccccgcgatcgcggcgcccaccgaggaggccgcccgggtggggcgcgggggtcgcgaagcccgcagtcccggaccgcccagccgagacggagccggacccgccgcctcccgggtggatctttaactcaagactagcatgaagagttgccttctggcctgccctgagtctcctcaaataacaacaggcccttccaccgcagccatccgcacgggaggcctcgcgattgctcggaaccatcccgcaggagttcagctgatattttctagtgtggggcgagagattttgtggagcgcatttaaggggtttttgttgtgactgctgccttgtatacatttattttctttcttggaactgggcctcgccctcctcccactgacatgatggcccagtccaaggccaatggctcgcactatgcgctgaccgccatcggcctggggatgctggtccttggggtgatcatggccatgtggaacctggtacccggcttcagcgcggccgagaagccaacagctcagggcagcaacaagaccgaggtgggtggcggcatcctcaagagcaagaccttctctgtggcctacgtgctggtcggggccggggtgatgctgctgctgctttctatctgcctgagtatcagggataagaggaagcagcggcagggcgaggacctggcccatgtccagcacccgacaggcgctgggcctcacgcccaggaggaagacaggaggaagaagaggaggatgaggaggctgcctcaaggtactatgttcccagctacgaggaagtgatgaacacaaactactcagaagcaaggggagaggagcagaacccgaggttgagcatctctctcccgtcctatgagtcactgacggggctcgacgagaccacccccacatccaccagggctgacgtggaggccagccctgggaacccccctgacaggcagaactctaagttggccaaacgactgaaaccgctgaaagttcgaaggattaaatctgaaaagcttcacctcaaagactttaggatcaacctcccagacaaaaacgtccctcctccctcgatagagcctttgactcctccaccgcagtatgatgaagtccaggagaaggcccccgacacccggccgcccgactgaatggccccacttgagccacgctccctcctgtctctcacacctttcacccccaagactctaacaaagccacatgagccacagttgagaagcggaggggccagctgtgcatggagccatttggatggcggcgggcggggggggattctctgtatcaggagtgactttgttgccccacacagcctcctgctgcaggtgctttggaaagagatgctgccttggagctggtgaatctgtggaccacattcaagggtgtggcacaggcatcttcccatccttttcactccgaatcgctggcgacacattctcctttccagctaggaaagggttcctcgcggctggtttagattgtggttgtttgttttgcttctactaagactgttttgtttcaaaaaggaaacaagttttgtgtttgctgtctacgctggagtcctgaactgtgggtagaaaacacgacctggctttgtagaaaggacacagggctgttttatgaactaagcggtgaggctcaggtggcggctctcgcagagcccctgatgctgttgttctttgagggcttaaggcctgatgaacgtaggcacgtgatgcataatagtcttcaatggtacacttaactagtctcttctgtgtaacagcaaaaaaaaaaaaaaaaa

SEQ ID NO: 194242 - DNA, 766 bp, Homo sapiens
  Payload ID: 18380
  Gene Name: transmembrane protein 51
  ENST ID: ENST00000451326
  CDS Start-End: 402-766
cgctcacccaagaaggggaccccggcctgacctctctcggaattcaaaaaaatctaaggctcagagagggaatgggagctggctcttccctctgtgtttagcatccacgttttttggcggtctggctgaaaccagcccaccctagttcgggcgccagagcaacgcagttccgagggcagatctccaaggggcggaggcagagccgcgggcccttccaccgcagccatccgcacgggaggcctcgcgattgctcggaaccatcccgcaggagttcagctgatattttctagtgtggggcgagagattttgtggagcgcatttaaggggtttttgttgtgactgctgccttgtatacatttattttctttcttggaactgggcctcgccctcctcccactgacatgatggcccagtccaaggccaatggctcgcactatgcgctgaccgccatcggcctggggatgctggtccttggggtgatcatggccatgtggaacctggtacccggcttcagcgcggccgagaagccaacagctcagggcagcaacaagaccgaggtgggtggcggcatcctcaagagcaagaccttctctgtggcctacgtgctggtcggggccggggtgatgctgctgctgctttctatctgcctgagtatcagggataagaggaagcagcggcagggcgaggacctggcccatgtccagcacccgacaggcgctgggcctcacgcccaggaggaagacagccaggaggaagaagaggagga

SEQ ID NO: 194243 - DNA, 929 bp, Homo sapiens
  Payload ID: 18381
  Gene Name: transmembrane protein 52
  Uniprot ID: Q8NDY8
  ENST ID: ENST00000310991
  CDS Start-End: 9-638
ctcagagcatggcccgggggccgctggccgcccgcggactgcggctgctgctgccgctcctgccgctcctgccgctcctgccgctgccgcaggtggcgctgggcttcgcggacggcagctgcgacccctcggaccagtgcccgccccaggcccgctggagcagcctgtggcacgtggggctcatcctgctggcggtcctcctgcttctgctgtgtggtgtcacagctggttgtgtccggttctgctgcctccggaagcaggcacaggcccagccacatctgccaccagcacggcagccctgcgacgtggcagtcatccctatggacagtgacagccctgtacacagcactgtgacctcctacagctccgtgcagtacccactgggcatgcggttgcccctgccctttggggagctggacctggactccatggctcctcctgcctacagcctgtacaccccggagcctccaccctcctacgatgaagctgtcaagatggccaagcccagagaggaaggaccagcactctcccagaaacccagccctctccttggggcctcgggcctagagaccactccagtgccccaggagtcgggccccaatactcaactaccaccttgtagccctggtgccccttgaaggaggtaggagaacggaccagagcttggagaactaatgcttggagccaagggccccagcccaccccaccgtcccacacattgctgtggccccaacctcggtgccatgttacaccggcccctggcgtcacccactaggcaggctgctgctttcagcctcagcccctggcccagccccagcaggccctcagcctggaagaggccccttgggcctaagcctcgggtgggagctcagggccacctgtgacgtctgcatcttcttggagagagaataaagtttgtatttaagtgg

SEQ ID NO: 194244 - DNA, 483 bp, Homo sapiens
  Payload ID: 18381
  Gene Name: transmembrane protein 52
  ENST ID: ENST00000378598
  CDS Start-End: 1-375
gggggccgctggccgcccgcggactgcggctgctgctgccgctcctgccgctcctgccgctcctgccgctgccgcaggtgggtcgggcggcgttctctctcggttcggccaccgcggggcgggtccctgctcggaccacgcccctcccgggctcacccttgtccccacaggtggcgctgggcttcgcggacggcagctgcgacccctcggaccagtgcccgccccaggcccgctggagcagcctgtggcacgtgggcctgtacaccccggagcctccaccctcctacgatgaagctgtcaagatggccaagcccagagaggaaggaccagcactctcccagaaacccagccctctccttggggcctcgggcctagagaccactccagtgccccaggagtcgggccccaatactcaactaccaccttgtagccctggtgccccttgaaggaggtaggagaacggaccagagcttggagaactaa

SEQ ID NO: 194245 - DNA, 1118 bp, Homo sapiens
  Payload ID: 18381
  Gene Name: transmembrane protein 52
  Uniprot ID: Q8NDY8
  ENST ID: ENST00000378602
  CDS Start-End: 242-826
tccgctgtcgcccagtcccggccgctggcgggaactgacctggagcaagcaggaccttccctcccacctctcccgcctggcctccgcgggagtcccctacgatcccgctcagcagtggggcactcgctgaggacagcgagtcctgggagtgagcccaaggccacccctggccagcccaggagagatagccagggcaggcccagcagcccgaggccaggctctggccacggcggtctccgacatggagagacattgtctgctttttatcctgttaacctgtcttcggtggttgtgccacgacattccccagggtgcaggtgcccggtggccgagggtcagtccagtggtagagccttgctctcctaggctcatcctgctggcggtcctcctgcttctgctgtgtggtgtcacagctggttgtgtccggttctgctgcctccggaagcaggcacaggcccagccacatctgccaccagcacggcagccctgcgacgtggcagtcatccctatggacagtgacagccctgtacacagcactgtgacctcctacagctccgtgcagtacccactgggcatgcggttgcccctgccctttggggagctggacctggactccatggctcctcctgcctacagcctgtacaccccggagcctccaccctcctacgatgaagctgtcaagatggccaagcccagagaggaaggaccagcactctcccagaaacccagccctctccttggggcctcgggcctagagaccactccagtgccccaggagtcgggccccaatactcaactaccaccttgtagccctggtgccccttgaaggaggtaggagaacggaccagagcttggagaactaatgcttggagccaagggccccagcccaccccaccgtcccacacattgctgtggccccaacctcggtgccatgttacaccggcccctggcgtcacccactaggcaggctgctgctttcagcctcagcccctggcccagccccagcaggccctcagcctggaagaggccccttgggcctaagcctcgggtgggagctcagggccacctgtgacgtctgcatcttcttggagagagaataaagtttgtatttaagtggt

SEQ ID NO: 194246 - DNA, 313 bp, Homo sapiens
  Payload ID: 18381
  Gene Name: transmembrane protein 52
  ENST ID: ENST00000416272
  CDS Start-End: 5-313
gagcatggcccgggggccgctggccgcccgcggactgcggctgctgctgccgctcctgccgctcctgccgctcctgccgctgccgcaggtgggtcgggcggcgttctctctcggttcggccaccgcggggcgggtccctgctcggaccacgcccctcccgggctcacccttgtccccacaggtggcgctgggcttcgcggacggcagctgcgacccctcggaccagtgcccgccccaggcccgctggagcagcctgtggcacgtggggctcatcctgctggcggtcctcctgcttctgctgtgtggtgtcaca

SEQ ID NO: 194247 - DNA, 690 bp, Homo sapiens
  Payload ID: 18381
  Gene Name: transmembrane protein 52
  ENST ID: ENST00000470931
  CDS Start-End: 6-137
agagcatggcccgggggccgctggccgcccgcggactgcggctgctgctgccgctcctgccgctcctgccgctcctgccgctgccgcaggtggcgctgggcttcgcggacggcagctgcgacccctcggaccagtaagtcgggggggagggagccggggcctggccccgccctatggggaggcacgggtggcgaggtcggccgtcccatgccccgcctgctccaggtgccgccgtccccacaggtgcccgccccaggcccgctggagcagcctgtggcacgtggggctcatcctgctggcggtcctcctgcttctgctgtgtggtgtcacagctggttgtgtccggttctgctgcctccggaagcaggcacaggcccagccacatctgccaccagcacggcagccctgcgacgtggcagtcatccctatggacagtgacagccctgtacacagcactgtgacctcctacagctccgtgcagtacccactgggcatgcggttgcccctgccctttggggagctggacctggactccatggctcctcctgcctacagcctgtacaccccggagcctccaccctcctacgatgaagctgtcaagatggccaagcccagagaggaaggaccagcactctcccagaaacccagccctctccttggggcctcgggcctagagaccactccagtgcc

SEQ ID NO: 194248 - DNA, 2731 bp, Homo sapiens
  Payload ID: 18382
  Gene Name: transmembrane protein 52B
  Uniprot ID: Q4KMG9
  ENST ID: ENST00000298530
  CDS Start-End: 579-1070
cacggagagagaagaaaggagattagcagggtgactttcaccctgcaacagtcacgctggagtactctggtgaaggatcaagaatattaccagttttctgatgaagaaaggaatatatttggtcaccagcaatctgcctttgaccatcctcaaagccaagtttttcatcgctgtctagaaaaatacttcattcagaggacacatatgtcctctttgaatgtctcctttttgggagcagtaggagaaagaaacttcaagatgtagaaagaattaatagtgtaacggaaagaaagaaggcaaaaggaagtaaatgtggaggccatagaaatagtaataagaataaagaagaaaaacaggaaagaagagggaaaagccatagaaaataacagccagagcgagtaggaggagacagagagaacgagagagagaaaagctgataaattcctgagaaaagtttctcttcttaagaattctaggtcaagaagtaaaatatggcacagagcattgaaaggaggcaacggatgcccagtgcaagattctgaagaagcaggaattcagcccgatgggagtccgagttcatgtcgtggcggcctcagccctgctgtatttcatcctgttgcctgaccacagactgggtacatctctggtatatatggttgctagtggtaattggcgcgctgcttctcctgtgtggcctgacgtccctgtgcttccgctgctgctgtctgagccgccagcaaaatggggaagatgggggcccaccaccctgtgaagtgaccgtcattgctttcgatcacgacagcactctccagagcactatcacatctctgcagtcggtgtttggccctgcagctcggaggatcctggctgtggctcactcccacagctccctgggccagctgccctcctctttggacaccctcccagggtatgaagaagctcttcacatgagtcgcttcacagtagccatgtgcgggcagaaagcacctgatctacccccagtacctgaagaaaagcagctgcctccaacagagaaggagtcgactcgaatagttgactcttggaactgatgagagctgtcattttataaataggagtggagtgatgtccagagtctgtgggaaaatggaacacatacttttctaaccctcagaagttttaagatggcatctaacaccatcattctatgggaaagatggttcttactcttcgttcacaggcctttatatcttccgatacagaatgctctaattgggaactctaattttgtatccaatggccaaaatctgcaagtaatctctagccacactgattactactaaaccaggaaagcatcaaggtgtcttgaattcctttaactattgagtgcatatagaattcctgtacccacatgatactgcaagttgtgtctctctctgtcagcgaatccactgcggttaactggaaaagaaagacaacagtgtcagcacagccatcgacattaatgcactgaatgcatgcatctttcctcctgagacagcaatcgattttacaccgaatgacaatgatcatcttagacagcacaacatacccactcggatatctaaaagctagggatggcattgctgatatgggcaaagagaacacagtatagtatttaagtgccaaatatcagtctttctttctctctggtcctacccctcagcagtatgaaaaactccatactgtgcagtcacagttggattaattcttcagttcctccgcactgcaaacacatatatgtgcgcacatgcatgtatacctgcaccctgttttaactctaaaggaatagtgttgctttacttctttcctgttttgcctggaccacttaaagccacaacacctctatagtgacacacgctagtctctagtggtggccctcactgccacctagaggagccatggtggaaaacacactctctcctttgagcctatctgcacatctctcgagttcttggagcaaaaactaaatgctgaactaagcctggttgagatgcttcccatggaccatgccgcagcacagtgctaatctatccacaaaacataccacctcccaaagtattattattggaaaatcgaggaagtgacgcacatttagggaaaaactactcaccttagaaaagtcactgaaatccttttttttttttttgagatggagttttgctcttgtagcccaggctgggatgcaatggcatggtctcagctcactgtaacctccacctcccggattcaagcaattcttctgcctcagcttcccgactagctgggattacagctgcctgccaccgtgcccagctaatttttgtatttttagtggagagggggtttcaccatgttggccagtctggtctagaactcctgacgtcaggtgatccgcccaccttggcctcccaaagtgctggaattagaggcctgaccccctgctcctggcctgaaatctttaaagccgttttttccctaaaaaatgggaaataataacacctcagaaggtttttgtgaagatcaaagaagctaaatatatgtggcatgatttgtaaagtgttatgcatatgtatgttattcttcctactgtcttctaaccttcccttgcctgctatgacttatctgagagccatgttcccatttatctttttgccaactatgttactgttgtcacacctgaaatggctttgtttttatcaataaatacttgttgattgcggtaaacagcaac

SEQ ID NO: 194249 - DNA, 2601 bp, Homo sapiens
  Payload ID: 18382
  Gene Name: transmembrane protein 52B
  Uniprot ID: Q4KMG9
  ENST ID: ENST00000381923
  CDS Start-End: 405-956
agtgccatggcgccatctcaggtcactgcaacctccgcctcctgggttcgagtgattctcctgcctcagcctcctgagcagctgggattgcagccgcgcaccaccacagcaggttaaattttgtatttttagtacagatgaggtttcaccgtgctggtctcgaactcctgacctcatgatccgcccacctcagcctcccaaagtgctgggattacaggcgtgagccaccgcgcctggcctcatcactcttaaataatgaaaaactaaatttttagaggaaaaagaaaatcacaggaccctgtgaaggaagaattctaggtcaagaagtaaaatatggcacagagcattgaaaggaggcaacggatgcccagtgcaagattctgaagaagcaggaattcagcccgatgggagtccgagttcatgtcgtggcggcctcagccctgctgtatttcatcctgctttctgggacgagatgtgaggaaaactgtggtaatcctgaacattgcctgaccacagactgggtacatctctggtatatatggttgctagtggtaattggcgcgctgcttctcctgtgtggcctgacgtccctgtgcttccgctgctgctgtctgagccgccagcaaaatggggaagatgggggcccaccaccctgtgaagtgaccgtcattgctttcgatcacgacagcactctccagagcactatcacatctctgcagtcggtgtttggccctgcagctcggaggatcctggctgtggctcactcccacagctccctgggccagctgccctcctctttggacaccctcccagggtatgaagaagctcttcacatgagtcgcttcacagtagccatgtgcgggcagaaagcacctgatctacccccagtacctgaagaaaagcagctgcctccaacagagaaggagtcgactcgaatagttgactcttggaactgatgagagctgtcattttataaataggagtggagtgatgtccagagtctgtgggaaaatggaacacatacttttctaaccctcagaagttttaagatggcatctaacaccatcattctatgggaaagatggttcttactcttcgttcacaggcctttatatcttccgatacagaatgctctaattgggaactctaattttgtatccaatggccaaaatctgcaagtaatctctagccacactgattactactaaaccaggaaagcatcaaggtgtcttgaattcctttaactattgagtgcatatagaattcctgtacccacatgatactgcaagttgtgtctctctctgtcagcgaatccactgcggttaactggaaaagaaagacaacagtgtcagcacagccatcgacattaatgcactgaatgcatgcatctttcctcctgagacagcaatcgattttacaccgaatgacaatgatcatcttagacagcacaacatacccactcggatatctaaaagctagggatggcattgctgatatgggcaaagagaacacagtatagtatttaagtgccaaatatcagtctttctttctctctggtcctacccctcagcagtatgaaaaactccatactgtgcagtcacagttggattaattcttcagttcctccgcactgcaaacacatatatgtgcgcacatgcatgtatacctgcaccctgttttaactctaaaggaatagtgttgctttacttctttcctgttttgcctggaccacttaaagccacaacacctctatagtgacacacgctagtctctagtggtggccctcactgccacctagaggagccatggtggaaaacacactctctcctttgagcctatctgcacatctctcgagttcttggagcaaaaactaaatgctgaactaagcctggttgagatgcttcccatggaccatgccgcagcacagtgctaatctatccacaaaacataccacctcccaaagtattattattggaaaatcgaggaagtgacgcacatttagggaaaaactactcaccttagaaaagtcactgaaatccttttttttttttttgagatggagttttgctcttgtagcccaggctgggatgcaatggcatggtctcagctcactgtaacctccacctcccggattcaagcaattcttctgcctcagcttcccgactagctgggattacagctgcctgccaccgtgcccagctaatttttgtatttttagtggagagggggtttcaccatgttggccagtctggtctagaactcctgacgtcaggtgatccgcccaccttggcctcccaaagtgctggaattagaggcctgaccccctgctcctggcctgaaatctttaaagccgttttttccctaaaaaatgggaaataataacacctcagaaggtttttgtgaagatcaaagaagctaaatatatgtggcatgatttgtaaagtgttatgcatatgtatgttattcttcctactgtcttctaaccttcccttgcctgctatgacttatctgagagccatgttcccatttatctttttgccaactatgttactgttgtcacacctgaaatggctttgtttttatcaataaatacttgttgat

SEQ ID NO: 194250 - DNA, 542 bp, Homo sapiens
  Payload ID: 18382
  Gene Name: transmembrane protein 52B
  ENST ID: ENST00000543484
  CDS Start-End: 273-542
aagaaggcaaaaggaagtaaatgtggaggccatagaaatagtaataagaataaagaagaaaaacaggaaagaagagggaaaagccatagaaaataacagccagagcgagtaggaggagacagagagaacgagagagagaaaagctgataaattcctgagaaaagtttctcttcttaagaattctaggtcaagaagtaaaatatggcacagagcattgaaaggaggcaacggatgcccagtgcaagattctgaagaagcaggaattcagcccgatgggagtccgagttcatgtcgtggcggcctcagccctgctgtatttcatcctgctttctgggacgagatgtgaggaaaactgtggtaatcctgaacattgcctgaccacagactgggtacatctctggtatatatggttgctagtggtaattggcgcgctgcttctcctgtgtggcctgacgtccctgtgcttccgctgctgctgtctgagccgccagcaaaatggggaagatgggggcccaccaccctgtgaagtgaccgtcattgct

SEQ ID NO: 194251 - DNA, 890 bp, Homo sapiens
  Payload ID: 18383
  Gene Name: transmembrane protein 53
  ENST ID: ENST00000372235
  CDS Start-End: 53-796
cgcaagcgggagttccggctggagacccgtgctctgggccggcgccttcaccatggcctcggcagagctggactacaccatcgagatcccggatcagccctgctggagccagaagaacagccccagcccaggtgggaaggaggcagaaactcggcagcctgtggtgattctcttgggctggggtggctgcaaggacaagaaccttgccaagtacagtgccatctaccacaaaaggaagctgctcgagctgctctttgattatgagattgagaaggagcccctgctcttccatgtcttcagcaacggtggcgtcatgctgtaccgctacgtgctggagctcctgcagacccgtcgcttctgccgcctgcgtgtggtgggcaccatctttgacagcgctcctggtgacagcaacctggtaggggctctgcgggccctggcagccatcctggagcgccgggccgccatgctgcgcctgttgctgctggtggcctttgccctggtggtcgtcctgttccacgtcctgcttgctcccatcacagccctcttccacacccacttctatgacaggctacaggacgcgggctctcgctggcccgagctctacctctactcgagggctgacgaagtagtcctggccagagacatagaacgcatggtggaggcacgcctggcacgccgggtcctggcgcgttctgtggatttcgtgtcatctgcacacgtcagccacctccgtgactaccctacttactacacaagcctctgtgtcgacttcatgcgcaactgcgtccgctgctgaggccattgctccatctcacctctgctccagaaataaatgcctgacacctccccacaacctgcaatctgtcgggcactcttctcgttcaactccc

SEQ ID NO: 194252 - DNA, 2310 bp, Homo sapiens
  Payload ID: 18383
  Gene Name: transmembrane protein 53
  Uniprot ID: Q6P2H8
  ENST ID: ENST00000372237
  CDS Start-End: 165-998
ggtggttgctaaggcgggaggtcacagagcgcggcgcagggattgggccgtgttgggggaggtgtgtggtgattgggcggcgcccaggaggcgcccgggtgaggcacgggtgcgcaagcgggagttccggctggagacccgtgctctgggccggcgccttcaccatggcctcggcagagctggactacaccatcgagatcccggatcagccctgctggagccagaagaacagccccagcccaggtgggaaggaggcagaaactcggcagcctgtggtgattctcttgggctggggtggctgcaaggacaagaaccttgccaagtacagtgccatctaccacaaaaggggctgcatcgtaatccgatacacagccccgtggcacatggtcttcttctccgagtcactgggtatcccttcacttcgtgttttggcccagaagctgctcgagctgctctttgattatgagattgagaaggagcccctgctcttccatgtcttcagcaacggtggcgtcatgctgtaccgctacgtgctggagctcctgcagacccgtcgcttctgccgcctgcgtgtggtgggcaccatctttgacagcgctcctggtgacagcaacctggtaggggctctgcgggccctggcagccatcctggagcgccgggccgccatgctgcgcctgttgctgctggtggcctttgccctggtggtcgtcctgttccacgtcctgcttgctcccatcacagccctcttccacacccacttctatgacaggctacaggacgcgggctctcgctggcccgagctctacctctactcgagggctgacgaagtagtcctggccagagacatagaacgcatggtggaggcacgcctggcacgccgggtcctggcgcgttctgtggatttcgtgtcatctgcacacgtcagccacctccgtgactaccctacttactacacaagcctctgtgtcgacttcatgcgcaactgcgtccgctgctgaggccattgctccatctcacctctgctccagaaataaatgcctgacacctccccacaacctgcaatctgtcgggcactcttctcgttcaactccctgtagccctttgggactttgcggtcccctaagtagaaaattcctatgggcctgtctcctgggggcctctgtctgctggtggtctgcttaccacagaatcctaaggggcaggagtgcctgggcatgtgtctgtgggagccttgcagtcagttgtgtttggacaagtgcaacagtcaggctgctgattcctgtggcatgcaggctgtagaggttgacaaatggaggggggtgttgagggtgagccctagttgattttttaaaatttaaactctggtaagaacatttaatatgagacctactctctttttttctttacttatttatttatctatttatttcaagacagggtctcactctgtcacctaggctggggtgcaatggtgcaatcatggctcactgcagcctcaacctcccaggctcaagtgatcctcccacctcagcctcccaaagtgctaggattacaggcatgagtcaccgcgcctggccaagatcacctaacaaaattgtaagtgtgtacgatacttaaaatttaagagattatgtgcacggcagacctctagaactgaatagtcttgcatcttgcataattcagaacttcatcatcttgcataactgaaactttgtgcctgttaccagagttgagttttgattccttgaatggaaggtgacctttgtggggagatgccagagggaaggtatatcggtcaggggtagcgtcaggctgcggataggggctatgatctttgctccagcagggcgaagccctacagtgtaaagtaccattcacatggctcccacttggcagttcactcagagaggctcctctgaccccattgcctgggagtctgaggtagaagccagatgaggagctgaggttaggggcctgcctggctctaccacactttgctaggaagccgctgggtctgggaaagttgcaagctgaaagttgccagagacagtggggggcaggaaggcagcagcattgtaacaggagctgggatgagctaactcccaagccctaaagaccagaaccagggtaaggggatttgggctgaaatagcaaactccttcatcttctggaagggagacccacttagatactctctaggcagaagaggtgaattcagcctgatagttcagtatcattgatcattctagaagtcactactgcacaatgttggcatatagtaggtattcaataaatatttgattgaatgag

SEQ ID NO: 194253 - DNA, 1846 bp, Homo sapiens
  Payload ID: 18383
  Gene Name: transmembrane protein 53
  ENST ID: ENST00000372242
  CDS Start-End: 69-674
gggtgaggcacgggtgcgcaagcgggagttccggctggagacccgtgctctgggccggcgccttcaccatggcctcggcagagctggactacaccatcgagatcccggatcagccctgctggagccagaagaacagccccagcccaggtgggaaggaggcagaaactcggcagcctgtggtgattctcttgggctggggtggctgcaaggacaagaaccttgccaagtacagtgccatctaccacaaaaggggctgcatcgtaatccgatacacagccccgtggcacatggtcttcttctccgagtcactgggtatcccttcacttcgtgttttggcccagaagctgctcgagctgctctttgattatgagattgagaaggagcccctgctcttccatgtcttcagcaacggtggcgtcatgctgtaccgctacgtgctggagctcctgcagacccgtcgcttctgccgcctgcgtgtggtgggcaccatctttgacagcgctcctggtgacagcaacctggtcttctgcatggcctcctgcttgctgctttcaccattgctggtggatggcatctctgctgggacagaggggcaactcacactccggccagactgggcagcacaggtgctaacgcggcttggctgtcaccttcaatgcatcacccgaagctgagagccccccttcgtcactcctagcttgcagcctcacaattccatttccccacccaaatacatccattttaatatgcacatcacaggcaggcagcacggtcacaaaggagccccaccagcagcagtccccacgtggtggaacggatggatgaccagccaccagcctcggcctcttggcttccagcagatggatacccagcagaggcctggcaccagagtgccaatgtctacgtgtcagctgcttgtacctcggaagccaccttccaggagagtggtggcccgtatccgcttctgtccacaccactcatactcctcaaagcggttgttgttctcatgctcgatgtccacagcatcatcctcagccatgcaggagccttccctctgtgaagagcagagcaggatcatgctgggcccaggccatccccacctgctccccacagtctgcaacgaaggcacagctctagccccagctgtggtgtgccaagtgggccctcagctctagggctcctttgaagcaaaccaatttagaggtcaaagacctgggcctcttcccaatagttttccgctggagcccaaggagggaatgagtgagagtgaaagcaaaaggagagagcagtggtcagaagggaagaagctgctgagaccacatggagaccccaagagcccacagattcaggggcagtcagcagctagtgtcgggggaagggagcggggaaggaaggtgggtggtgatggcccctctaccttagaaaggcaatgctccacatgcctactcatctcctgctccgatcctgccagggggcggttgcacaggggacatacctgcccttcatcttgcttcctccgtttcattttcccaatccgagctgcacggggaaaccgaaaacaaagcacagaacaagcagacggtcactgcagcccccagggtcccagtggagctgacacatcctgacctcttgccagccattggcctttttattcagtgcctgatctggccctcatcttgaaatacctcctgctcctttggggactgggctttgccaagagcacctggggaggagactggtgctaactaagccagtgagtaagtccactctttggctgcagctggtgcaaggtctacccatacctttctatttgcagtgtttaataaaaatccagtgagcaaagaca

SEQ ID NO: 194254 - DNA, 1579 bp, Homo sapiens
  Payload ID: 18383
  Gene Name: transmembrane protein 53
  ENST ID: ENST00000372243
  CDS Start-End: 72-407
cccgggtgaggcacgggtgcgcaagcgggagttccggctggagacccgtgctctgggccggcgccttcaccatggcctcggcagagctggactacaccatcgagatcccggatcagccctgctggagccagaagaacagccccagcccaggtgggaaggaggcagaaactcggcagcctgtggtgattctcttgggctggggtggctgcaaggacaagaaccttgccaagtacagtgccatctaccacaaaagggtcttctgcatggcctcctgcttgctgctttcaccattgctggtggatggcatctctgctgggacagaggggcaactcacactccggccagactgggcagcacaggtgctaacgcggcttggctgtcaccttcaatgcatcacccgaagctgagagccccccttcgtcactcctagcttgcagcctcacaattccatttccccacccaaatacatccattttaatatgcacatcacaggcaggcagcacggtcacaaaggagccccaccagcagcagtccccacgtggtggaacggatggatgaccagccaccagcctcggcctcttggcttccagcagatggatacccagcagaggcctggcaccagagtgccaatgtctacgtgtcagctgcttgtacctcggaagccaccttccaggagagtggtggcccgtatccgcttctgtccacaccactcatactcctcaaagcggttgttgttctcatgctcgatgtccacagcatcatcctcagccatgcaggagccttccctctgtgaagagcagagcaggatcatgctgggcccaggccatccccacctgctccccacagtctgcaacgaaggcacagctctagccccagctgtggtgtgccaagtgggccctcagctctagggctcctttgaagcaaaccaatttagaggtcaaagacctgggcctcttcccaatagttttccgctggagcccaaggagggaatgagtgagagtgaaagcaaaaggagagagcagtggtcagaagggaagaagctgctgagaccacatggagaccccaagagcccacagattcaggggcagtcagcagctagtgtcgggggaagggagcggggaaggaaggtgggtggtgatggcccctctaccttagaaaggcaatgctccacatgcctactcatctcctgctccgatcctgccagggggcggttgcacaggggacatacctgcccttcatcttgcttcctccgtttcattttcccaatccgagctgcacggggaaaccgaaaacaaagcacagaacaagcagacggtcactgcagcccccagggtcccagtggagctgacacatcctgacctcttgccagccattggcctttttattcagtgcctgatctggccctcatcttgaaatacctcctgctcctttggggactgggctttgccaagagcacctggggaggagactggtgctaactaagccagtgagtaagtccactctttggctgcagctggtgcaaggtctacccatacctttctatttgcagtgtttaataaaaatccagtgagcaaagaca

SEQ ID NO: 194255 - DNA, 1472 bp, Homo sapiens
  Payload ID: 18383
  Gene Name: transmembrane protein 53
  ENST ID: ENST00000372244
  CDS Start-End: 87-323
ggcgcccaggaggcgcccgggtgaggcacgggtgcgcaagcgggagttccggctggagacccgtgctctgggccggcgccttcaccatggcctcggcagagctggactacaccatcgagatcccggatcagccctgctggagccagagtcttctgcatggcctcctgcttgctgctttcaccattgctggtggatggcatctctgctgggacagaggggcaactcacactccggccagactgggcagcacaggtgctaacgcggcttggctgtcaccttcaatgcatcacccgaagctgagagccccccttcgtcactcctagcttgcagcctcacaattccatttccccacccaaatacatccattttaatatgcacatcacaggcaggcagcacggtcacaaaggagccccaccagcagcagtccccacgtggtggaacggatggatgaccagccaccagcctcggcctcttggcttccagcagatggatacccagcagaggcctggcaccagagtgccaatgtctacgtgtcagctgcttgtacctcggaagccaccttccaggagagtggtggcccgtatccgcttctgtccacaccactcatactcctcaaagcggttgttgttctcatgctcgatgtccacagcatcatcctcagccatgcaggagccttccctctgtgaagagcagagcaggatcatgctgggcccaggccatccccacctgctccccacagtctgcaacgaaggcacagctctagccccagctgtggtgtgccaagtgggccctcagctctagggctcctttgaagcaaaccaatttagaggtcaaagacctgggcctcttcccaatagttttccgctggagcccaaggagggaatgagtgagagtgaaagcaaaaggagagagcagtggtcagaagggaagaagctgctgagaccacatggagaccccaagagcccacagattcaggggcagtcagcagctagtgtcgggggaagggagcggggaaggaaggtgggtggtgatggcccctctaccttagaaaggcaatgctccacatgcctactcatctcctgctccgatcctgccagggggcggttgcacaggggacatacctgcccttcatcttgcttcctccgtttcattttcccaatccgagctgcacggggaaaccgaaaacaaagcacagaacaagcagacggtcactgcagcccccagggtcccagtggagctgacacatcctgacctcttgccagccattggcctttttattcagtgcctgatctggccctcatcttgaaatacctcctgctcctttggggactgggctttgccaagagcacctggggaggagactggtgctaactaagccagtgagtaagtccactctttggctgcagctggtgcaaggtctacccatacctttctatttgcagtgtttaataaaaatccagtgagcaaagaca

SEQ ID NO: 194256 - DNA, 415 bp, Homo sapiens
  Payload ID: 18383
  Gene Name: transmembrane protein 53
  ENST ID: ENST00000420706
  CDS Start-End: 12-415
gcgccttcaccatggcctcggcagagctggactacaccatcgagatcccggatcagccctgctggagccagaagaacagccccagcccaggtgggaaggaggcagaaactcggcagcctgtggtgattctcttgggctggggtggctgcaaggacaagaaccttgccaagtacagtgccatctaccacaaaaggctgctcgagctgctctttgattatgagattgagaaggagcccctgctcttccatgtcttcagcaacggtggcgtcatgctgtaccgctacgtgctggagctcctgcagacccgtcgcttctgccgcctgcgtgtggtgggcaccatctttgacagcgctcctggtgacagcaacctggtaggggctctgcgggccctggcagccatcctggagcgccgggc

SEQ ID NO: 194257 - DNA, 871 bp, Homo sapiens
  Payload ID: 18384
  Gene Name: transmembrane protein 54
  Uniprot ID: Q969K7
  ENST ID: ENST00000329151
  CDS Start-End: 152-661
gcccagccccgggctccgggcgggaagtgggcgagcgcgacggtgcggggcgcgcgggcgacgggccagcgggatgggagcagggtcccccggcggcccgcagcctcgggagccgcgctgaagccgggggcgggaccagcgcggagccgacatgtgtctgcgcctcggaggcctgagtgtgggcgacttccggaaggtgctgatgaagacaggcctggtgctggtggtgctgggccatgtgagcttcatcacagctgccctgttccatggcacagtgctgcgctacgtgggcacccctcaagatgcggtggctctgcagtactgcgtggtcaacatcctctctgtcacttccgccatcgtgggcaaggcactgctggctgcctgcacttttgggagctctgaactactggccctcgcacctgactgtcccttcgaccccacacgcatttatagctccagcctgtgcctctggggcatcgccctagtgctctgcgtggcggagaacgtgtttgctgtacgctgtgctcagctcacccaccagctgctggagctgaggccctggtgggggaaaagcagccaccacatgatgcgggagaacccagagctggtggagggccgtgacctgctgagctgcaccagctctgagcctctgaccctctgagagatgatgtcctgcccaggcccgatggccactaggaccctgcaagcaactctgctctgtgaccaggccaggattcctggagctggcctgagagggctcaatggaccctcggggacccaagtggggctttcaaccctctcccccaccacccagcccactgcactgaaatgagactttattctgaaattattaaaaagaacagagatgctc

SEQ ID NO: 194258 - DNA, 999 bp, Homo sapiens
  Payload ID: 18384
  Gene Name: transmembrane protein 54
  Uniprot ID: Q969K7
  ENST ID: ENST00000373463
  CDS Start-End: 121-789
cgagcgcgacggtgcggggcgcgcgggcgacgggccagcgggatgggagcagggtcccccggcggcccgcagcctcgggagccgcgctgaagccgggggcgggaccagcgcggagccgacatgtgtctgcgcctcggaggcctgagtgtgggcgacttccggaaggtgctgatgaagacaggcctggtgctggtggtgctgggccatgtgagcttcatcacagctgccctgttccatggcacagtgctgcgctacgtgggcacccctcaagatgcggtggctctgcagtactgcgtggtcaacatcctctctgtcacttccgccatcgtggtcatcacttcaggcatcgcagccatcgtgttgtcacgctacctccctagcacccccctgcgctggacagtgtttagctcgagcgtggcctgtgctctcctttctctgacctgtgccctcggcctcttggcctccatcgccatgacctttgccacccagggcaaggcactgctggctgcctgcacttttgggagctctgaactactggccctcgcacctgactgtcccttcgaccccacacgcatttatagctccagcctgtgcctctggggcatcgccctagtgctctgcgtggcggagaacgtgtttgctgtacgctgtgctcagctcacccaccagctgctggagctgaggccctggtgggggaaaagcagccaccacatgatgcgggagaacccagagctggtggagggccgtgacctgctgagctgcaccagctctgagcctctgaccctctgagagatgatgtcctgcccaggcccgatggccactaggaccctgcaagcaactctgctctgtgaccaggccaggattcctggagctggcctgagagggctcaatggaccctcggggacccaagtggggctttcaaccctctcccccaccacccagcccactgcactgaaatgagactttattctgaaattattaaaaagaacagagatgctc

SEQ ID NO: 194259 - DNA, 2970 bp, Homo sapiens
  Payload ID: 18385
  Gene Name: transmembrane protein 55A
  Uniprot ID: Q8N4L2
  ENST ID: ENST00000285419
  CDS Start-End: 316-1089
cccttttctctggctggctgggctcccgctcctccactgctgctcctcccactctgcgggttctttctttctccctcccctcccctcccccagccatgcctcccagcgcgcttcccttcccccgcctcctggtcctgcaccctcccctcccctccccccgcttcctgccttgtgacacatcccgggccctcccggaggcggcagcagcagcagctgcagcggcagcagcggcagcagaggcagcagcagtagccaccactccgccgaggccgcaaccccggctcggcctccccaggccccgccgctgccgcagtcatggctgctgatggggtggacgaacgctcgcctctgctgtcagcatcccactccggaaatgtcactcccaccgccccaccgtacttgcaagaaagcagccccagagcggagctcccacctccatatacagccattgccagtccagacgccagtggtattccagtaataaactgccgtgtgtgccaatcactaatcaatttggatggcaagcttcaccagcatgtggttaagtgcacagtttgcaatgaagctacgccaatcaaaaaccccccaacaggcaagaaatatgttagatgcccttgtaattgtcttctcatttgtaaggacacatctcggcgaataggatgcccaagacccaactgtagacggataattaaccttggcccagtaatgcttatttctgaagaacaaccagctcagcctgcattgccaatccaaccagaaggtacaagggtcgtgtgtgggcactgtggaaacacattcctgtggatggaactgaggttcaacactctggcaaaatgcccacactgcaaaaaaatctcctcagtgggtagtgcacttccacgaagacgctgctgtgcatatattaccattggaatgatatgtattttcattggagttgggttaactgttggcaccccagattttgcaaggcgatttcgagcaacctatgtttcttgggcaattgcttatctcctaggattgatctgccttatccgagcttgttattggggagccataagagtcagttatccagaacacagttttgcataagcttgtttatgattcagtaatgcaggtgagagtgtctagcagttcttggtaagctactctggacatctttaaattatttatcctaatggattccattctggtttatgtataatcgtttcaagactttgggagtcttttatgaacaaatgctcattgcactatattatatgcaaattgttttgctgctaggttttcaaaatttgaataataaagccttttcatgttcttttacatctcttatagatatttttggatttgttaccaaacattacatttactctcacccttttattatttttaaataagttatttcattacttgctgatacatgagtattcctaagtgtttataaatatttctataatagtttcacatttatatttacattttaattaaacagtatcaaaattgcttgcttaaaacctaagcaatatgcattttgcttgaactgcttactgtaactttaacctaagattatagtgaccttattcaggaaaaaaaaaaaaatttagtgtaacttcaaagacttgacattcttgtcagaggaaaaaaaatttctagatactgtttgcttgttttttgttgtttgtagaaagataaaatattttggtagtaatttaaaatacaagaacgaatatttatttgtccacagttggagatgttggataaatgtcttttctcaaagatcacaggacttttgtctttcatttttgcctttttatttaccatttataaaagatctggtctggattatggaatttaatgtttatcagctctatgtattcctttatagaggcttgaggaagtatttcacataacatgttttataatacttaaccatttatccaaagatatatttacattgggttgtgcccctttcccttagatcatggtaaatttttcttattgaggtaattatgtactacttatatttgaaggaagcttatgacattttacagtagctaaaatgttgagattagaggtacttttactattcttctcaaaggtaactgatcagataattacccaaattattcaagaaaatagatcagaaataaagaacaacataattttctaagaattcattgaaatttatggaatcagctctcgcactgcccatctttgcagttttgaaaaagaaattgcttaatcacaaatgttctacagtctttaaatgtagtagaattagacagtgagatcatctgagtaaattgattggtgattccagagataagactaatattttaaattatttatgatactgattagtataaaaacgtactcatcacagaatttgaagcaaaatacatgtacacttcaaagagtaaatgacaaatgtataaatgctgtagctcaggattatatgtacctttaaaaatacactaataaagattattgttcaaaaattaccttgttttattccattaaaaataatgtcacttccagagttgccttgaaatcttgctgtaaagttttcatgtttaggaatgtacctgtttctttatataatattcatttatgttttttgtactattttcaaatggttttatttttaaaatatagtttttaaatccatttgtaatacacttgatgttaggtataaaataatcttacttcttttcctaatggttaactagttgtaacagcattgtatactgaataatccattctttccctcattgattggaaagctcacattaaattatatgctatgtcatattccttctggaataataactttatgagagcaagaaccctggtagtcttgttcacagctttatccccacttagaacagttcttagtgtacatgtgctcaatttacgtgaatgaatatgcatgaatgaataaatggttgaatgaattgctattttaaattctta

SEQ ID NO: 194260 - DNA, 838 bp, Homo sapiens
  Payload ID: 18385
  Gene Name: transmembrane protein 55A
  ENST ID: ENST00000520014
  CDS Start-End: 87-838
ggcagcagaggcagcagcagtagccaccactccgccgaggccgcaaccccggctcggcctccccaggccccgccgctgccgcagtcatggctgctgatggggtggacgaacgctcgcctctgctgtcagcatcccactccggaaatgtcactcccaccgccccaccgtacttgcaagaaagcagccccagagtgactaatatcttttcagcggagctcccacctccatatacagccattgccagtccagacgccagtggtattccagtaataaactgccgtgtgtgccaatcactaatcaatttggatggcaagcttcaccagcatgtggttaagtgcacagtttgcaatgaagctacgccaatcaaaaaccccccaacaggcaagaaatatgttagatgcccttgtaattgtcttctcatttgtaaggacacatctcggcgaataggatgcccaagacccaactgtagacggataattaaccttggcccagtaatgcttatttctgaagaacaaccagctcagcctgcattgccaatccaaccagaaggtacaagggtcgtgtgtgggcactgtggaaacacattcctgtggatggaactgaggttcaacactctggcaaaatgcccacactgcaaaaaaatctcctcagtgggtagtgcacttccacgaagacgctgctgtgcatatattaccattggaatgatatgtattttcattggagttgggttaactgttggcaccccagattttgcaaggcgatttcgagcaacctatgtttcttgggcaattgcttatctcctaggattgatctgccttatccgagcttgttattgggg

SEQ ID NO: 194261 - DNA, 841 bp, Homo sapiens
  Payload ID: 18385
  Gene Name: transmembrane protein 55A
  ENST ID: ENST00000518869
  CDS Start-End: 124-294
cggaggcggcagcagcagcagctgcagcggcagcagcggcagcagaggcagcagcagtagccaccactccgccgaggccgcaaccccggctcggcctccccaggccccgccgctgccgcagtcatggctgctgatggggtggacgaacgctcgcctctgctgtcagcatcccactccggaaatgtcactcccaccgccccaccgtacttgcaagaaagcagccccagaggtttactaactgtggaatctccagaattacaagtcccatataagaggagatggagctacaagtaaatgtttccttgagcggagctcccacctccatatacagccattgccagtccagacgccagtggtattccagtaataaactgccgtgtgtgccaatcactaatcaatttggatggcaagcttcaccagcatgtggttaagtgcacagtttgcaatgaagctacgccaatcaaaaaccccccaacaggcaagaaatatgttagatgcccttgtaattgtcttctcatttgtaaggacacatctcggcgaataggatgcccaagacccaactgtagacggataattaaccttggcccagtaatgcttatttctgaagaacaaccagctcagcctgcattgccaatccaaccagaaggtacaagggtcgtgtgtgggcactgtggaaacacattcctgtggatggaactgaggttcaacactctggcaaaatgcccacactgcaaaaaaatctcctcagtgggtagtgcacttccacgaagacgctgctgtgcatatattaccattggaatgatatgtattttcattggagttgggttaactgttggcaccc

SEQ ID NO: 194262 - DNA, 867 bp, Homo sapiens
  Payload ID: 18385
  Gene Name: transmembrane protein 55A
  ENST ID: ENST00000518359
  CDS Start-End: 63-563
caccactccgccgaggccgcaaccccggctcggcctccccaggccccgccgctgccgcagtcatggctgctgatggggtggacgaacgctcgcctctgctgtcagcatcccactccggaaatgtcactcccaccgccccaccgtacttgcaagaaagcagccccagagcggagctcccacctccatatacagccattgccagtccagacgccagtggtattccagtaataaactgccgtgtgtgccaatcactaatcaatttggatggcaagcttcaccagcatgtggttaagtgcacagtttgcaatgaagctacgccaatcaaaaaccccccaacaggcaagaaatatgttagatgcccttgtaattgtcttctcatttgtaaggacacatctcggcgaataggatgcccaagacccaactgtagacggataattaaccttggcccagtaatgcttatttctgaagaacaaccagctcagcctgcattgccaatccaaccagaaggtacaagggtcgtgtgtgggcactgtggaaacacattcctgctcctcagtgggtagtgcacttccacgaagacgctgctgtgcatatattaccattggaatgatatgtattttcattggagttgggttaactgttggcaccccagattttgcaaggcgatttcgagcaacctatgtttcttgggcaattgcttatctcctaggattgatctgccttatccgagcttgttattggggagccataagagtcagttatccagaacacagttttgcataagcttgtttatgattcagtaatgcaggtgagagtgtctagcagttcttggtaagctactctggacatctttaaattatttatcct

SEQ ID NO: 194263 - DNA, 649 bp, Homo sapiens
  Payload ID: 18385
  Gene Name: transmembrane protein 55A
  ENST ID: ENST00000520709
  CDS Start-End: 103-276
ctgcagcggcagcagcggcagcagaggcagcagcagtagccaccactccgccgaggccgcaaccccggctcggcctccccaggccccgccgctgccgcagtcatggctgctgatggggtggacgaacgctcgcctctgctgtcagcatcccactccggaaatgtcactcccaccgccccaccgtacttgcaagaaagcagccccagagtggatggaactgaggttcaacactctggcaaaatgcccacactgcaaaaaaatctcctcagtgggtagtgcacttccacgaagacgctgctgtgcatatattaccattggaatgatatgtattttcattggagttgggttaactgttggcaccccagattttgcaaggcgatttcgagcaacctatgtttcttgggcaattgcttatctcctaggattgatctgccttatccgagcttgttattggggagccataagagtcagttatccagaacacagttttgcataagcttgtttatgattcagtaatgcaggtgagagtgtctagcagttcttggtaagctactctggacatctttaaattatttatcctaatggattccattctggtttatgtataatcgtttcaagactttgggagtcttttatgaacaaatgctca

SEQ ID NO: 194264 - DNA, 171 bp, Homo sapiens
  Payload ID: 18385
  Gene Name: transmembrane protein 55A
  ENST ID: ENST00000630164
  CDS Start-End: 1-171
atggctgctgatggggtggacgaacgctcgcctctgctgtcagcatcccactccggaaatgtcactcccaccgccccaccgtacttgcaagaaagcagccccagaggtttactaactgtggaatctccagaattacaagtcccatataagaggagatggagctacaagtaa

SEQ ID NO: 194265 - DNA, 1961 bp, Homo sapiens
  Payload ID: 18386
  Gene Name: transmembrane protein 55B
  Uniprot ID: Q86T03
  ENST ID: ENST00000250489
  CDS Start-End: 288-1121
tgtgcgtcgctccccaatggaaaaggagagctgccttcacaggaccaggaattggtttatctacgcgaataatagcatgacccgggcggggatagcctatcacgtgctgctagacggaacggggcggggcaggccactggttgcggagtgagctgggcgcgcggcgcgcaggcgccctggggacccggtagcggcggtggcggtggcggcggtggcggtggctgcggcgacggcagaggcgaagggagccggatcgccgacctgagcgggaggcggcggtggcggccatggcggcagatggagagcgttccccgctgctgtctgagcccatcgacggtggcgcgggcggcaacggtttagtggggcccggcgggagtggggctgggcccgggggaggcctgaccccctccgcaccaccgtacggagccgcatttcccccgtttcccgaggggcatccagccgtgttgcctggggaggacccacccccctattcacccttaactagcccggacagtgggagtgcccctatgatcacctgccgagtctgccaatctctcatcaacgtggaaggcaagatgcatcagcatgtagtcaaatgtggtgtctgcaatgaagccaccccaatcaagaatgcacccccagggaaaaaatatgttcgatgcccctgtaactgtctccttatctgcaaagtgacatcccaacggattgcatgccctcggccctactgcaaaagaatcatcaacctggggcctgtgcatcccggacctctgagtccagaaccccaacccatgggtgtcagggttatctgtggacattgcaagaatacttttctgtggacagagttcacagaccgcactttggcacgttgtcctcactgcaggaaagtgtcatctattgggcgcagatacccacgtaagagatgtatctgctgcttcttgcttggcttgcttttggcagtcactgccactggccttgcctttggcacatggaagcatgcacggcgatatggaggcatctatgcagcctgggcatttgtcatcctgttggctgtgctgtgtttgggccgggctctttattgggcctgtatgaaggtcagccaccctgtccagaacttctcctgagcctgatgacccacagactgtgcctggcccctccctggtggggacagtgacactacgaagggagctggggtagttaaaggctcccggggcttctagaaggaagccaagcagctgccttccttttccctggggagaggtaggaaggaaccaggccctcacttaggtttggaggggcagataagagcactgctgaccatctgctttcctccaagggttgctgtgtctagggtgaagtaggcaaaacgttgcccttaaaactgggccctgaagacggttccagccttgtccttcctgtgtgctccctgagagccattcctgtcccttacacattccagggcagggtgggggtgggtagccctgggggttcccctccctcttgtgcaccattaggactttgctgctgctattgcacttcaccagaggttggctctggcctcagtaccctcagtctcctctccccacattgtgtcctgtgggggtggggtcagccgctgctctgtacagaaccacaggaactgatgtgtatataactatttaatgtgggatatgttcccctattcctgtatttcccttaattcctcctcccgaccttttttacccccccagttgcagtatttaactgggctgggtagggttgctcagtctttgggggaggttagggacttatcctgtgcttgtaaataaataaggtcatgactctacgctttttcagttgttaacttgtgtgcatgaaaatatgaggaagagaatgtgtagccccacgaaggggtaagacacgaagacagcaaggctgaaactatggctctttattttcatgtggataattcaaacaaagtcatt

SEQ ID NO: 194266 - DNA, 1696 bp, Homo sapiens
  Payload ID: 18386
  Gene Name: transmembrane protein 55B
  Uniprot ID: Q86T03
  ENST ID: ENST00000398020
  CDS Start-End: 141-995
gtgagctgggcgcgcggcgcgcaggcgccctggggacccggtagcggcggtggcggtggcggcggtggcggtggctgcggcgacggcagaggcgaagggagccggatcgccgacctgagcgggaggcggcggtggcggccatggcggcagatggagagcgttccccgctgctgtctgagcccatcgacggtggcgcgggcggcaacggtttagtggggcccggcgggagtggggctgggcccgggggaggcctgaccccctccgcaccaccgtacggagccggtaaacatgccccgccccaggcatttcccccgtttcccgaggggcatccagccgtgttgcctggggaggacccacccccctattcacccttaactagcccggacagtgggagtgcccctatgatcacctgccgagtctgccaatctctcatcaacgtggaaggcaagatgcatcagcatgtagtcaaatgtggtgtctgcaatgaagccaccccaatcaagaatgcacccccagggaaaaaatatgttcgatgcccctgtaactgtctccttatctgcaaagtgacatcccaacggattgcatgccctcggccctactgcaaaagaatcatcaacctggggcctgtgcatcccggacctctgagtccagaaccccaacccatgggtgtcagggttatctgtggacattgcaagaatacttttctgtggacagagttcacagaccgcactttggcacgttgtcctcactgcaggaaagtgtcatctattgggcgcagatacccacgtaagagatgtatctgctgcttcttgcttggcttgcttttggcagtcactgccactggccttgcctttggcacatggaagcatgcacggcgatatggaggcatctatgcagcctgggcatttgtcatcctgttggctgtgctgtgtttgggccgggctctttattgggcctgtatgaaggtcagccaccctgtccagaacttctcctgagcctgatgacccacagactgtgcctggcccctccctggtggggacagtgacactacgaagggagctggggtagttaaaggctcccggggcttctagaaggaagccaagcagctgccttccttttccctggggagaggtaggaaggaaccaggccctcacttaggtttggaggggcagataagagcactgctgaccatctgctttcctccaagggttgctgtgtctagggtgaagtaggcaaaacgttgcccttaaaactgggccctgaagacggttccagccttgtccttcctgtgtgctccctgagagccattcctgtcccttacacattccagggcagggtgggggtgggtagccctgggggttcccctccctcttgtgcaccattaggactttgctgctgctattgcacttcaccagaggttggctctggcctcagtaccctcagtctcctctccccacattgtgtcctgtgggggtggggtcagccgctgctctgtacagaaccacaggaactgatgtgtatataactatttaatgtgggatatgttcccctattcctgtatttcccttaattcctcctcccgaccttttttacccccccagttgcagtatttaactgggctgggtagggttgctcagtctttgggggaggttagggacttatcctgtgcttgtaaataaataaggtcatgactcta

SEQ ID NO: 194267 - DNA, 811 bp, Homo sapiens
  Payload ID: 18386
  Gene Name: transmembrane protein 55B
  ENST ID: ENST00000553460
  CDS Start-End: 1-337
gagtccagaaccccaacccatgggtgtcagggttatctgtggacattgcaagaatacttttctgtggacagagttcacagaccgcactttggcacgttgtcctcactgcaggaaagtgtcatctattgggcgcagatacccacgtaagagatgtatctgctgcttcttgcttggcttgcttttggcagtcactgccactggccttgcctttggcacatggaagcatgcacggcgatatggaggcatctatgcagcctgggcatttgtcatcctgttggctgtgctgtgtttgggccgggctctttattgggcctgtatgaagggttgctgtgtctagggtgaagtaggcaaaacgttgcccttaaaactgggccctgaagacggttccagccttgtccttcctgtgtgctccctgagagccattcctgtcccttacacattccagggcagggtgggggtgggtagccctgggggttcccctccctcttgtgcaccattaggactttgctgctgctattgcacttcaccagaggttggctctggcctcagtaccctcagtctcctctccccacattgtgtcctgtgggggtggggtcagccgctgctctgtacagaaccacaggaactgatgtgtatataactatttaatgtgggatatgttcccctattcctgtatttcccttaattcctcctcccgaccttttttacccccccagttgcagtatttaactgggctgggtagggttgctcagtctttgggggaggttagggacttatcctgtgcttgtaaataaataaggtcatgactcta

SEQ ID NO: 194268 - DNA, 277 bp, Homo sapiens
  Payload ID: 18386
  Gene Name: transmembrane protein 55B
  ENST ID: ENST00000556093
  CDS Start-End: 147-277
cagtgggggtgtaagtgatcccagcccttctatttgcttcctctccagcatttcccccgtttcccgaggggcatccagccgtgttgcctggggaggacccacccccctattcacccttaactagcccggacagtgggagtgcccctatgatcacctgccgagtctgccaatctctcatcaacgtggaaggcaagatgcatcagcatgtagtcaaatgtggtgtctgcaatgaagccaccccaatcaagaatgcacccccagggaaaaaatatgttcg

SEQ ID NO: 194269 - DNA, 6822 bp, Homo sapiens
  Payload ID: 18387
  Gene Name: transmembrane protein 56
  Uniprot ID: Q96MV1
  ENST ID: ENST00000370203
  CDS Start-End: 292-1083
gcggccgcggcccctttaaggagcagctctgcggtaacccgagcccgcagtccgggcgggcgcgacggccgccgcggtagctggagcctccgcgactgcacctccaagcggcccggaacccgcggcttccctggctcccgtgagcatctcaccgggcggcactggccagcgccagccctcgggccggcccggatgagcagactcctgtagacacccgccgccctctcccggctcggcgcagccgccgcccgcgcgcgactcgccccgggacccggcacaggttgaagaaatatggagatcaacacaaaactgctcatcagtgttacctgtatcagctttttcacctttcagcttcttttctactttgtaagttactggttttcagcaaaagtttctccaggtttcaatagtctcagcttcaaaaagaagattgaatggaactcaagggtagtatccacatgccattctttggtggttggtatttttggcctgtacattttcttattcgatgaggctactaaagctgatccactttggggtggtccatcacttgcaaacgtgaatattgctattgcctcaggctacctcatttctgatttgtccattataattttgtattggaaagtgattggtgacaaattttttataatgcatcattgtgcgtccctgtatgcatactaccttgtactgaaaaatggagtgctggcatacattgggaattttcgcctgcttgcagagctttccagcccgtttgtgaatcagcggtggttctttgaagctctgaagtatcccaagttttctaaagctatcgttatcaatggaatactcatgacagtagtattcttcatcgtgcggattgcctcaatgcttcctcattatggcttcatgtattccgtgtatggaacagaaccctacataaggcttggagttttaatccagttatcctgggtcattagttgtgttgttttggatgtgatgaatgtcatgtggatgatcaaaatttcaaaaggttgcatcaaagtcatctctcacatcagacaagagaaagccaaaaatagtcttcagaatggaaaacttgattaaaagagtgctaccgataagcaaacttcattactacccagcatatctgctgataggatgaattcttggcatgttcttgtgtacctttcttaattataattgttattcaggatttcagtgtcattttttttaaaccttagaaaagagaaggccgggcacggtggctcatgcctgtaatcccagcactttgggaggccaaggtgggtcgatcactgaggtcaggagttcgagactagcttggccaacatggtgaaacctcatctctactaaaaatacaaaaaaaagtagctgggcgtggtggttggcgcctgtaatcccagctactcgggaggctgaggcaggagaatcgcttgaacccgagagacggaggttgcagtgagctgatattgtgccactgcactccagcctgggcgacagagcaagactctgtctcaaaaaaaaaaaaaagagagaaactaaaattaaaatttagttttcatcccaagatgtcttttctgcctttcttttgccttatttacaagcatggataaaaatcttaaaggtttaaataaaaatgatcaatataatggtgaatcttttgagaaatctcttaactgcattggtattttttctctgtgaaagatgactatgataatctggtacaaatggttttatgtcaccaattttgctgcaagaatgggaactgcttttaaatctgtaaatagctcttaacatttgttgtatgcactcttttcttactatggctgtcaacacttgtgtagggtttaatttctaaattgttggcatgttctttttctcaggctattcagaagtaacaacatttttcatttcagacatgcaatcacctattaatgatgaaatattttaccactttgggaatatttaattagtttagtcatggagaatacttcccacattttaagattttttcaaatatcactgtcatttctattttagcattttatcaaattattgcttttttattttataataaggcttaagacagattatagacctccttaagagatgagtttcttcttctaaaaatgcatgttgatagaggactatttaggctaatcggaggaatcattaagaaagaaagttttaacactgtttatccctatctgctttccttgcactttttctgtgaaaaatattttctgtttgcaaaatcttccctgagttctgaacccagcaccatcagtaccaaagtcttatgcaatatgtatttattatgctcctgaaataggcctcttcttgatgagacccaaactattacaaaaatatcagtattcatattttactcacaattcatacccgtgcttacttagttggcattttagtgctttgaatttctatcttaaagcacagaaaaaaaaaggtaatttaatccaagtattctatcatcaaaattattgtctgattatatgaagataaatgactggcgactctggttgtgtgtgtatgtgttttgcttttactttaattcttgcaatccaaatatagaattatatatttatctattattgcctttattctttaagcacttgagtttaatgattattcttacctgagaaaggaagaaatttaattctaccagtgatgaatacttgaaattaattgaactcataccaaaagatgtaatccagtttctcagtttgaaggagaacgtttgactcactttcattgttcatgctagctgaatataatcaagacttttgatttgatttgcttttattattcaatgcagatagagcctgataagttttagaacatttaaagaagattgaaatctcagtcagtaactaaatgataaaatgagattgattggcttatactaggtacatttatttttgaaagaattaatgtaaaataatagttatttttaaagcagctaatattacactgataatttgttgctaaatttagtgctgtccacatcataggtgcttaaatatgtactggttaactagaggggggtaggaaagcaagcggttttatcttgttcttacctttttgcaggaaaagtggctttaaaaaaatttatataataaaactattttggaaattcattcttttagaaagagaccttgagataaatattttttgactctggatatttctatagttctgaacacagattttaaacccactatcaaaatgaaaacaatataaagctatattagtgagtctccatgtagcagtttgtttttatagttactgtttcatgcttaaaacttcattcttactttcattaatgttacccttcactggtatagccactcactaaataagtatatttaaaacatcaaaattttgaactaaagtttgtgattctcttattcagcaatccttatcttatgctggctgcatgagttaattcaacatccagattaaatatcctgaagtaggttctatatatttcctcatacaacagacatggaatggaaatgccactagaaactgccctgctacttttaagtctgacctttgcaggaggtacactttgctgttctatgattgtattcacctacctaaaatacaaatgaagacagaacatatcatttactgcacgatgaatttttcatttattaaatgaaaaacgtttgctagacattttaaatattaagtattttgactacacggattaatttaaatgattctatcaggcattctgatatttaacaactctattaaaatatttatagaaaaataaaagcaaattgatataaatttttgagcaattctatttttgtagaaaaaagataacctgtaattataaagatgttttttgaatgtgtagtatcctagaaaataaaagttcttgtgaaacttaaaaaatgaatgaaaaccaactaatagcatgcaagatcatagatcctgcattaaatttttatttgtgaaaatttgaaaattatgagctataacttataaagtttgccttcttatgtctaaaatcttttaaaggattatttgcatttatgtaaaactggaaatgaagttatatatgagtgcaaagaaattgacttctgctcaaatatgtgttgataccctacagtaaattgaattaaatttttatcccaactgtttgattttattatttcatggactagccttacgttaagtgaaatactatttatgttgttaccacccctaagagtgactctgatatattatggatgacccaggacggtcttaaaggtctagttttaaaaactgcctagtttgtaagtatttgaatccagttcttttctaaattttaataatttgactcaaaatttttgctacagggtcaacttttaaattgtatatttcctctgaggcacactgggcatttggagaatggttcttcactggtgtagagagccaggtttactgttggttgcaccatctgttatcaggcatgcagaaacatttttcttctggagaaacagaggggaaggtgttgttacagtgtacatgtttcctctgtgtcgtttttaagggaaataaacatgttccaaaagatgctgttaaaataaatatttgaacacgttttctgtttctaggttgctcttaattccaaacatttaaataaatgtgcatttgaatagctttaggtggtttagtctattagctgaaatggaaaagttcatgtattgacatcatcaataatacttcataaaggtttatgtatttttatgtgtttggattccataagaagttgaacttagataattttatcaagagtagcacagtgtttctcaggtgcgagccagcatacagcgagacccttcatgtgtctctggatgcacatatatcttcccaaccttaaacacagctcattgaaatacattaaagctactgaaagtgagttctgatgcaaaacacatgtgaggtgtgtaggaacaatgaaaagctagaggatctggagttagaggaggcattgagagtgcttttcccttaaacgccgtgatagtcctcccttgatctagaagtattctctttgaatccttccatctcttcctcctggtacaccagatgacttcatcagcatctccctcttttatgctaacacctttcgctgtcaacttttgagacctccccatgtatctataagcttcccagtctcttatggcaaatttaaaagtttacaaataggttctctcattgaaaaaaagcattgtagtaaagtttaaagtggagctcagacaaatcatgacttattaagagactacaggaagccattcagcatttaataataactgtttacaacatgaggcaaagctaataatgttatggttttattaagagatctgtcatctctgtttttcttaaactggtttaacagtcagagctttgtaatgtgtttcagctgaagatttattataggcttgtaaattatctaaatgttctttttagaccccatgacaggagcacagaggaactgagataactctgtgttatgagagggtggatgctggcttgtgccaaaattattttagagtcctgctctttagggaaaactttgctatggtaatgtttctttgaaaacaaatttaccagcaactgcgttacttggtgttttccaaagtacaacatccaaggcttgaaccttacccgtttctaggccagactaggccagcctctagttttgataataattcatacctttattggaatatattttggatagcagtgaagaattgaaagcagctcctaaagattggtttgtttgctttgaaaatgtttacacttattcactctaagcagtggaccattttgatatcaggccctatacataagaccaaaaccagaaatatttctaaatctcaaagatttataagtacagtacctctggctgaaaactcgttaaacatctttggatattttttctttatatctttatgtaattatttctgtaattaagtgtacattagggttatttgctacttaacaagcctaaaggtatagctgtatatagaatgtgctctgtgtttttctgtttcctgcttggtttgtttctggtatgactatgtctactttttatttaaggaattttgtgtagataatactctcactaacttgtaaataggataagttatgagattttttggtattagaatttgtaataataatgacttttagattttatttgaaaaagctacttggaaagcagtaaatagaactatagtgatatatatagatacatagatatatacttttttctgagaatgtataatatataattgtcaaagatttttggaagtctttcaaaatatacttaataccattttgagaacataccttctaatttatttccataaggctgaagaacttttatttacaaaatgtaagactagataatgtatgaatcagtgttactaggacttatcagtacttaaaatagcaacttggcattctttattttgtttcctggttgttttatttggagggataataaatgtctaagttatttccattaaaattttgaaatgtttgtatactttatgtgtgccattttaaagtatatgcaagttctaagcaataatctgcatgttatacaaggttgacatattttgtcctgaaatttttagttaacatttcaagaatgataaaatgaacaccctgtaaattacccttctccccctcccctccatgaaaaccttgggattttcttgtgctagaacactaccacaatgtggtgcaaagctttgtattttgtggaaaaaaacaataaaatcacaattatttagtgcaaaa

SEQ ID NO: 194270 - DNA, 992 bp, Homo sapiens
  Payload ID: 18387
  Gene Name: transmembrane protein 56
  ENST ID: ENST00000456991
  CDS Start-End: 531-992
ctccaagcggcccggaacccgcggcttccctggctcccgtgagcatctcaccgggcggcactggccagcgccagccctcgggccggcccggatgagcagactcctgtagacacccgccgccctctcccggctcggcgcagccgccgcccgcgcgcgactcgccccgggacccggcacaggtgacgccgtttggagggggggttggggaggaaggcgggcttgcctcgccccgcggctcccccgcgccagccgccaagcgcagcccgcggagaggggtgccgcggcttcccgcccctggcctagcgcggccgagagctcctgcgcctggaggctgggtgggcgtccggcgcgcgggaggcggcccggggctcccgggcgggctccggcaggtgcagaactcacatagatgaaatgatgggacagatgcagaagaggggactttccaccagttctacttacttcaaagcaaaatgattggctttaaggaaaaggaaacgtgcaaggagtgaacttggatatgttgaagaaatatggagatcaacacaaaactgctcatcagtgttacctgtatcagctttttcacctttcagcttcttttctactttgtaagttactggttttcagcaaaagtttctccaggtttcaatagtctcagcttcaaaaagaagattgaatggaactcaagggtagtatccacatgccattctttggtggttggtatttttggcctgtacattttcttattcgatgaggctactaaagctgatccactttggggtggtccatcacttgcaaacgtgaatattgctattgcctcaggctacctcatttctgatttgtccattataattttgtattggaaagtgattggtgacaaattttttataatgcatcattgtgcgtccctgtatgcatactaccttgtactgaaaaatggagtgctggcatacattgggaattttcgcctgcttgcagagctttccagcccgttt

SEQ ID NO: 194271 - DNA, 609 bp, Homo sapiens
  Payload ID: 18387
  Gene Name: transmembrane protein 56
  ENST ID: ENST00000455656
  CDS Start-End: 181-609
ccgggcgccccgcattcctctcgcgtttctcgggctgcacgattccggctgccctgtctgcctggcggtgcctctcgggtctgagcttaaagcgggtgggtgcaaacctttgggcatccagggagagctttcttgttagagcccacacacaatcgggcgcatcaagtgggttgaagaaatatggagatcaacacaaaactgctcatcagtgttacctgtatcagctttttcacctttcagcttcttttctactttgtaagttactggttttcagcaaaagtttctccaggtttcaatagtctcagcttcaaaaagaagattgaatggaactcaagggtagtatccacatgccattctttggtggttggtatttttggcctgtacattttcttattcgatgaggctactaaagctgatccactttggggtggtccatcacttgcaaacgtgaatattgctattgcctcaggctacctcatttctgatttgtccattataattttgtattggaaagtgattggtgacaaattttttataatgcatcattgtgcgtccctgtatgcatactaccttgtactgaaaaatggagtgctggcatacattgggaat

SEQ ID NO: 194272 - DNA, 3917 bp, Homo sapiens
  Payload ID: 18388
  Gene Name: transmembrane protein 57
  Uniprot ID: Q8N5G2
  ENST ID: ENST00000374343
  CDS Start-End: 180-2174
ggaggaggctccgagccccccctccccgtgctaccccctccccccgggtgctggctccatgtctgtgtgaccggcctcaggggtagagtccaggcccgacgcggggcgggccagcggcggcggcagctgaggtgagagacggcggcggcggcgcgggcacccggccccccagcgggaggatgaagcggcggaacgccgactgcagtaagctccgccgccccctaaagcggaaccggatcaccgagggcatttacggcagtacatttttatacctgaaattcctggtggtgtgggcacttgtcctcctagcagattttgtcctggagttcagatttgaatacctgtggccattctggcttttcatcagaagcgtctatgattccttcagataccagggactggccttctcagtattttttgtttgtgtagcattcacgtcaaatataatatgcctgctgttcatccccatacagtggcttttttttgctgctagcacatatgtatgggttcagtacgtatggcacacagaaaggggagtgtgtttgcctacagtgtctctctggatcctctttgtttatattgaagcagccattagatttaaagatctcaaaaactttcatgtagacctttgtcgtccatttgctgctcactgtattgggtaccctgtggtaactttggggtttggcttcaaaagttacgtaagctacaaaatgcggttaaggaagcaaaaagaagtacaaaaagagaacgagttttacatgcaacttcttcaacaagctctccctccagagcaacagatgctacagaagcaagaaaaagaggccgaggaagcagccaaaggattacctgatatggattcttcgatccttatacaccacaatggaggtatcccagccaacaaaaaactctccacaactttgccagagatagaataccgagaaaaagggaaagaaaaggacaaggatgccaaaaaacacaaccttggaataaataacaacaatattctacaacctgtagactctaaaatacaagagattgagtatatggaaaaccatatcaatagtaaaagattaaataatgatcttgtgggaagtacagaaaatctcttgaaagaggactcatgcactgcttcctcaaaaaattacaaaaatgccagtggagttgtgaactcttcacctcgaagtcatagcgccacaaatgggagcattccttcctcatctagtaaaaatgagaagaagcagaaatgcactagcaagagcccaagtacacacaaggacttaatggaaaactgtattcctaataaccagctaagcaaaccagacgcactggtcaggctggaacaagacattaaaaagttaaaggctgacctgcaagccagcagacaagtggaacaagagctccgcagtcagatcagctccctttcgagcaccgagcgagggatccgctcagaaatgggccagcttcggcaggagaacgagctgctgcagaacaagttacataatgctgtgcaaatgaagcaaaaagacaagcagaatatcagccagttggagaaaaagctaaaagctgagcaggaagcccgaagttttgtagagaaacagttaatggaagagaaaaagaggaagaagttagaagaagccactgctgcccgggctgttgcgtttgctgctgcatctaggggagaatgcaccgaaaccttacggaatcggatcagagaactagaagcagagggcaagaagctcacgatggacatgaaggtgaaagaagaccaaatcagagaactagaactaaaagtccaggagcttcggaaatataaggaaaatgagaaggacactgaggtgttaatgtcagccctctcagccatgcaagacaaaacacagcacctggagaacagcttaagtgcagagacgagaatcaagctggacctgttctccgcactgggcgatgcaaagcggcagctcgagattgcccaaggacaaatccttcagaaagatcaggaaatcaaggacctaaaacagaagatagccgaagtcatggccgtcatgcccagcataacatacagtgccgccaccagccccctgagccctgtttccccccactactcttccaaatttgtggagaccagcccctctggacttgaccccaatgcctctgtttaccagcccctgaagaaatgaaggccagctgtgtgttgtgcccaaaaatttggttaccggaaggcattgcaaaggagcgtctctggcagtcaagataaaaaaacagtttctattgtattttgtggaactgtatctgttgtcatttttaaaaaggggggaaaagataacatccaagtctgattagaactgcccatcagtttttcttgtaaatttttagaagacctcacagaactttacagtttatttttctcggccaacacattaaaaccattcttggatttcaagtagccaactttgccttttatgtattcttacatagtttcctcttgaagaaaaaaaaagcagagtttttgtttttcaaccctttatgtttgttttgttttattcttaaataagcaagcaaaacctgcacattggattcacgtgagatgataatgaaaacttttagtttaagagtgaagggttaagtaacctaacagagctttgatgttatagctgcattaaagaaggtgattgtcaatattacagaaaacaaaaatggattgcccctccaaggaccaaacagattcaaggagcatcatttaagctaagaagagacctaagtgatgaaactagctgtaagaatgtaacaggggttgtgtttgaaatatttatattcccatcggtgtgtttagtcctagaaaattgctagcagcagtcttcttcacagtgccttgggaaaagacatttcaagaggaaacttgataattttaaactcttttccccctttaccgtcatctatcctctatctgtatcaagctcactgcggatcctgctgtaaaactggtgggtagctgggctgtccgttaccaccacagctacatcttctgtttctttgaatagaaagcaccacagtgttttgcacttgcctccagtaaagtgccctgggaagggagctgggcagtgtttgtggacgagagactgtaacgatggctaataaaagctgcgggtctaggtttttttttttttgttttgttttttcatttcatttaactgtgctttctccacttttcatcattttgtgtttgatgatttaaaagaagcttgactattcctcagctcttgtgccaaggagggttttttttttttaagactcttaaactcaaaactctgcacaaagatttcagtttcaaatgtgtattatacatgggtagaaaagtgtttgcacaggcaacttttggaagtgtttaagaatcagggtgggggtggcgggagggaccgggtgggggcaatgcaaaattgtatttggaaactaggaaaaattaagaaaccaaataaattggttttgcttccttgccatggattctggaaggacatagttcttctaaaatttcctgttaattggcatgtacgtctcatttaaagcaaattaagtaggacaagcaagtcagtaaaatagaagtattaaaaagaatcatcctttaaatcacagatcttattttgagattaaaaaaaatacttctagctttagccaggtgtgcatgttgctgccattttgcatttttgaatcatcttgtgtaattgtcaccatgaaagtgttactcagaattgtcatagattttctcttctttgtgcaaaaacatggaaaattgtcactgactttgttttgaggtttcccccattttgctgccttttgggacacttcgttaaatactggtcttggctgcattcttttttttttttcctgtggggttcaaaagaataaacattttcttacagataaaa

SEQ ID NO: 194273 - DNA, 3294 bp, Homo sapiens
  Payload ID: 18388
  Gene Name: transmembrane protein 57
  Uniprot ID: Q8N5G2
  ENST ID: ENST00000399766
  CDS Start-End: 242-1555
aggcggctggctggtgctgggcgggcgggccccggaattgtcatttctttgtttccgaaggcggaggaggctccgagccccccctccccgtgctaccccctccccccgggtgctggctccatgtctgtgtgaccggcctcaggggtagagtccaggcccgacgcggggcgggccagcggcggcggcagctgaggtgagagacggcggcggcggcgcgggcacccggccccccagcgggaggatgaagcggcggaacgccgactgcagtaagctccgccgccccctaaagcggaaccggatcaccgagggcatttacggcagtacatttttatacctgaaattcctggtggtgtgggcacttgtcctcctagcagattttgtcctggagttcagatttgaatacctgtggccattctggcttttcatcagaagcgtctatgattccttcagataccagggactggccttctcagtattttttgtttgtgtagcattcacgtcaaatataatatgcctgctgttcatccccatacagtggcttttttttgctgctagcacatatgtatgggttcagtacgtatggcacacagaaaggggagtgtgtttgcctacagtgtctctctggatcctctttgtttatattgaagcagccattagatttaaagatctcaaaaactttcatgtagacctttgtcgtccatttgctgctcactggctggaacaagacattaaaaagttaaaggctgacctgcaagccagcagacaagtggaacaagagctccgcagtcagatcagctccctttcgagcaccgagcgagggatccgctcagaaatgggccagcttcggcaggagaacgagctgctgcagaacaagttacataatgctgtgcaaatgaagcaaaaagacaagcagaatatcagccagttggagaaaaagctaaaagctgagcaggaagcccgaagttttgtagagaaacagttaatggaagagaaaaagaggaagaagttagaagaagccactgctgcccgggctgttgcgtttgctgctgcatctaggggagaatgcaccgaaaccttacggaatcggatcagagaactagaagcagagggcaagaagctcacgatggacatgaaggtgaaagaagaccaaatcagagaactagaactaaaagtccaggagcttcggaaatataaggaaaatgagaaggacactgaggtgttaatgtcagccctctcagccatgcaagacaaaacacagcacctggagaacagcttaagtgcagagacgagaatcaagctggacctgttctccgcactgggcgatgcaaagcggcagctcgagattgcccaaggacaaatccttcagaaagatcaggaaatcaaggacctaaaacagaagatagccgaagtcatggccgtcatgcccagcataacatacagtgccgccaccagccccctgagccctgtttccccccactactcttccaaatttgtggagaccagcccctctggacttgaccccaatgcctctgtttaccagcccctgaagaaatgaaggccagctgtgtgttgtgcccaaaaatttggttaccggaaggcattgcaaaggagcgtctctggcagtcaagataaaaaaacagtttctattgtattttgtggaactgtatctgttgtcatttttaaaaaggggggaaaagataacatccaagtctgattagaactgcccatcagtttttcttgtaaatttttagaagacctcacagaactttacagtttatttttctcggccaacacattaaaaccattcttggatttcaagtagccaactttgccttttatgtattcttacatagtttcctcttgaagaaaaaaaaagcagagtttttgtttttcaaccctttatgtttgttttgttttattcttaaataagcaagcaaaacctgcacattggattcacgtgagatgataatgaaaacttttagtttaagagtgaagggttaagtaacctaacagagctttgatgttatagctgcattaaagaaggtgattgtcaatattacagaaaacaaaaatggattgcccctccaaggaccaaacagattcaaggagcatcatttaagctaagaagagacctaagtgatgaaactagctgtaagaatgtaacaggggttgtgtttgaaatatttatattcccatcggtgtgtttagtcctagaaaattgctagcagcagtcttcttcacagtgccttgggaaaagacatttcaagaggaaacttgataattttaaactcttttccccctttaccgtcatctatcctctatctgtatcaagctcactgcggatcctgctgtaaaactggtgggtagctgggctgtccgttaccaccacagctacatcttctgtttctttgaatagaaagcaccacagtgttttgcacttgcctccagtaaagtgccctgggaagggagctgggcagtgtttgtggacgagagactgtaacgatggctaataaaagctgcgggtctaggtttttttttttttgttttgttttttcatttcatttaactgtgctttctccacttttcatcattttgtgtttgatgatttaaaagaagcttgactattcctcagctcttgtgccaaggagggttttttttttttaagactcttaaactcaaaactctgcacaaagatttcagtttcaaatgtgtattatacatgggtagaaaagtgtttgcacaggcaacttttggaagtgtttaagaatcagggtgggggtggcgggagggaccgggtgggggcaatgcaaaattgtatttggaaactaggaaaaattaagaaaccaaataaattggttttgcttccttgccatggattctggaaggacatagttcttctaaaatttcctgttaattggcatgtacgtctcatttaaagcaaattaagtaggacaagcaagtcagtaaaatagaagtattaaaaagaatcatcctttaaatcacagatcttattttgagattaaaaaaaatacttctagctttagccaggtgtgcatgttgctgccattttgcatttttgaatcatcttgtgtaattgtcaccatgaaagtgttactcagaattgtcatagattttctcttctttgtgcaaaaacatggaaaattgtcactgactttgttttgaggtttcccccattttgctgccttttgggacacttcgttaaatactggtcttggctgcattcttttttttttttcctgtggggttcaaaagaataaacattttcttacagat

SEQ ID NO: 194274 - DNA, 6691 bp, Homo sapiens
  Payload ID: 18389
  Gene Name: transmembrane protein 59
  Uniprot ID: Q9BXS4
  ENST ID: ENST00000234831
  CDS Start-End: 251-1222
aggccccgcttcgcgctaacgcttgcgatggttgaattcccctcctcacgccagcctaggagaagaagttcgtagtcccagaggtgaggcaggaggcggcagtttctggcgggtgagggcggagctgaagtgacagcggaggcggaagcaacggtcggtggggcggagaagggggctggccccaggaggaggaggaaacccttccgagaaaacagcaacaagctgagctgctgtgacagaggggaacaagatggcggcgccgaaggggagcctctgggtgaggacccaactggggctcccgccgctgctgctgctgaccatggccttggccggaggttcggggaccgcttcggctgaagcatttgactcggtcttgggtgatacggcgtcttgccaccgggcctgtcagttgacctaccccttgcacacctaccctaaggaagaggagttgtacgcatgtcagagaggttgcaggctgttttcaatttgtcagtttgtggatgatggaattgacttaaatcgaactaaattggaatgtgaatctgcatgtacagaagcatattcccaatctgatgagcaatatgcttgccatcttggttgccagaatcagctgccattcgctgaactgagacaagaacaacttatgtccctgatgccaaaaatgcacctactctttcctctaactctggtgaggtcattctggagtgacatgatggactccgcacagagcttcataacctcttcatggactttttatcttcaagccgatgacggaaaaatagttatattccagtctaagccagaaatccagtacgcaccacatttggagcaggagcctacaaatttgagagaatcatctctaagcaaaatgtcctatctgcaaatgagaaattcacaagcgcacaggaattttcttgaagatggagaaagtgatggctttttaagatgcctctctcttaactctgggtggattttaactacaactcttgtcctctcggtgatggtattgctttggatttgttgtgcaactgttgctacagctgtggagcagtatgttccctctgagaagctgagtatctatggtgacttggagtttatgaatgaacaaaagctaaacagatatccagcttcttctcttgtggttgttagatctaaaactgaagatcatgaagaagcagggcctctacctacaaaagtgaatcttgctcattctgaaatttaagcatttttcttttaaaagacaagtgtaatagacatctaaaattccactcctcatagagcttttaaaatggtttcattggatataggccttaagaaatcactataaaatgcaaataaagttactcaaatctgtgaagactgtatttgctataactttattggtattgtttttgtagtaatttaagaggtggatgtttgggattgtattattattttactaatatctgtagctattttgttttttgctttggttattgtttttttcccttttcttagctatgagctgatcattgctccttctcacctcctgccatgatactgtcagttaccttagttaacaagctgaatatttagtagaaatgatgcttctgctcaggaatggcccacaaatctgtaatttgaaatttagcaggaaatgacctttaatgacactacattttcaggaactgaaatcattaaaattttatttgaataattatgtgctgaaatttgagtatctgatttttctagaccttccctcctattcctgcccaacctagataagaattatgaaatgttctgtgtttattgctattgctttataatgtgatggtcagggaccattttgatgcaaaactgatctctcagcagtacatttgatgttattttgcacaggctataggtttttgtttgatgagtgtttccaaagaactatttttctctgttagatagcatatcaagtataaggtaaacatattttcagagaaaacttcattttaacactaaaaattagactcttgtgatacagaattaagtataaattttacttggcaaaaactcgttttatttttacctgcaataatacagagcttaatattagaatgatatcaggtcataataataatacaccagaatcttttgagatggaattttgctcttgttgctgaggctggagtgcaatggtatgatcttggctcactacaacctccacctctgaggttcaagcgattctcctgcctcagcctcccgagtagctgggattacaggcatgcgccaccacacctggataattttgtatttttagtagagacggggtttcaccaggttggccaggctggtctcgaactcctgacctcaggtgatccacccacttaggccttccaaagtgctgggattacaggcgtgagtgactgtgcccagcctacaccagaattctaatatgattcactgttattatgccataaaatattaaaaactttgtaaaacaatactttcctcagtcacaggggcattgctgacaactgcatcagtgctgtttgactaaagaataagttagtcactcctcctatggcctagtctttagccttcctgagtccaaatgaaaagcagttaacagctaatcaaggaagactttggtcacaaagtgtaggtttttatttttagtttgtctagatttggatgatagaaagttgtgaacacatccagatggggaagaaaggaggaattagccgtcattgtcaagcagtcattgtttctttcttctttttgttagaaaacatgggataaaacgtggggactcagccaggcacagtggctcacgcctgtaatcccagcactttgggaggccaaagcaggaggatcacttgaggtcaggagttcgagaccaacctgggcaacatagcaagaccctctctgtacaaaaaaatacaaacaaacatggggactatataaaacatgggtagtggataggagttaccattaaaaaaaaataaaaagccctgttgtttcgtctcccatcattagtgcatacttagtttccttagtcaggcacaggtttaattgtaatgcatccaatgaagcaaacagagaaacacaaaatgctgctgtctcacaggaatcaaagagcccactgttagaaaagaccctcccttataaaaacaaaacaaagaattatctagatcacttggggccaggagttcaacaccatcctgggcaatataatgagaatcccatctttttttttttttttaaagcaactgtacagttgtcctatattctccaccttcccttggtttcatttctcttcgcttcctgaatgagaagtgcctgagataccttcatttctcttgaaagtattgatccaagtttagacaaatatctcccctcttgttgagagaattccttatatgtgaaaataccaagacattcttgatatttagcaggcactcaaatatttgtctcctcttttttagcataattaagccagactgatgtttgcatttgagtatcatcagcatgagtaaccattttaatctctcttcccttaactacttgttctacactagagtctagggtcagggtacgtacagtgataaagattgagataatgggaaatatagtcttctgtttgggaagctggattgtagtgttgattttctgactccttgtggtaattaaattctgaagcacagaatctacttttgagaagaaatattttacttttgaaaaaaaatccccaaaatatatacagcataaaaatgtttccgatcttgaaaatcccaaccaaagcaacaaaactgagcttccaagccccttctcctaaagtaacagttttgcccttcttggatgtgcctaactttacttagctccttgtttccataaaacagtcataatcttatttcctaccacacagaaagcatcttgagaatctggtcttggtcctaggcaaattctcaagaccgttgggtctctggttcaaacctcccagacttctaaggtctttcttggctcaggtccctcatctaagagacatgctaattcaggcaattacaaaagcagtactaatcaccataatgaatgatctgggcctaggttccaagttttctcacaaaacttcatgggcacctttcatttgtgatatgttttgtagtaaatcagaaattactagatgatctggtcaatcttatctcagaaatccctgtggtgcatcatgaggcaatctgagctgctgatcagcagaaaaccctgcactgtctgagcttatcttccagccaaaggcaaacaatttaccctttgttattagtctgtctggatttgtcttagataaatgagccatttttgttacaagttttttaaagatatacagtagttccattataatttttgtggactcaaatatcaagtccacatgtagggaatcattgacagagatttccagttactgtcaccaccacaccaaggcagtaattttgctcagttctgcctttatagatccacaatttaaccattcaacaaccacctgagatcctgagtggcaggccctatgctaaatgctaggaccacagtaagacccagtgcctgaccccaattgctgagactctgaaggagactattattaatgtgataagtgctatgaccaagcacagagcacataggaggagctgtatgcattatgggagcacacaggaggacttctgggagaaagtgatagccaagcttaaacctggagaaaaagggaacgccaaacacaatatagagagcagtgtaccagacagtggggacactgtgctcaaagacctagaggccagagggtgaggcactgcagattgttgagtaggccgagatagagcatacaaaagcataacaaaagatggggctaggcagaccaggtaataaacctgcactttaaacctgcacttgatcctgagcacagtagagagccactgaaagattttaagcaagagagtgccatacagtgttggaatgattcactcggacagcaatgtggaagatagaccagaaagggcaagtccagaggccaacaataatcttagcctcagagttctttttttaatacccaagaatactatttcattttacttatatttttaaacttttctctataacgctctctctgctcccccacattgttgtctggatggtaaacctaggactggtctctgagtcctggtcacagcctggcaacagaatgtttgagcaaactgggaaggctgccccatggatccctggtttcttatcaccatcctcttaattctacgtttgccaaccagtctctaggaagccagcgtgctcttgcgcccctcccaccaggtttccagttgctaagcgtgtcatgtttgcatttgggtatcatctgcatgagtgaccattttaatctctctttccttgactacttgttctacactagagtctagggtgggggtgagtacagtggtaaagacagggatagcgggaaatttagtcttctgtttaggaagctggatggtagtgtggattttctaactccttgtggtaattaaattctggagcacagtttttagaccttttctgaaatctgttactgttgaagtcagcttcatatatttcactttttttttttttgagacagagtctcacactgttactcaggctggagtgcactggtacaatcttgactcactgcaacctccacagctcccaggttcaagcgattctcgtgcctcagcctcccaagtagctggtactacaggcgcgtgccaccatgcttggctaatttttgtatttctagtaaagatggggttttgccatgttgcccaggctggtctcgaactcctggcctcaggtaatctgcccgcctcagcctcccaaagtgtttggattgcaggcatgagccactgcacccaccctatttcactattaagtactctcttcctgtgatattaatgacttatttgtttcaaacttttttgtgccattgagctttttagtgatccagtgaagcctgtggaccccctctcatagtaatgttttcaaagcataaaactaaatataaaggatcgcaaaggaaactgatcatgttaaaataaagttgatattttcaaagttttatgatccagtaacatacatattctgttaacacaaaataagactgcatggtggttctaaaattactataattcaaattcatatcttgaaatatctaacaactgtaatatatctaaatgtctcatttctattggtgacaaagtcacaggtactctgatcctactgtggactgtttcctatattcgtaattgaaggaaatgttatatttcagttagaagttggtgaaaagaaagatttaaaatttttcccatccaagttcaccagacccctggtttagaggttgtcttaattttacttttgtcattttaagagtaaattattttgttttcttgttcaattctcaattatttgggcttattttactgcctcttgcatgcttttttatgcttgaatggtttttgcagtgttagaacagtaataattgaagacttgggtggaaaaaaatcagcacctgattgaaaatgaaaggtttcaacaaaagctcttgataatgttacctccaggtgtaccatcatgccaccattattggtgctacaaatctgttaatttatttatgcttaagtatgtaaactttaataaaacttggatcatctgcattaaaaaataa

SEQ ID NO: 194275 - DNA, 600 bp, Homo sapiens
  Payload ID: 18389
  Gene Name: transmembrane protein 59
  ENST ID: ENST00000371337
  CDS Start-End: 5-442
caagatggcggcgccgaaggggagcctctgggtgaggacccaactggggctcccgccgctgctgctgctgaccatggccttggccggaggttcggggaccgcttcggctgaagcatttgactcggtcttgggtgatacggcgtcttgccaccgggcctgtcagttgacctaccccttgcacacctaccctaaggaagaggagttgtacgcatgtcagagaggttgcaggctgttttcaatttgtcagtttgtggatgatggaattgacttaaatcgaactaaattggaatgtgaatctgcatgtacagaagcatattcccaatctgatgagcaatatgcttgccatcttggttgccagaatcagctgccattcgctgaactgagacaagaacaagtacgaaacaatactgcctttcaaactagcctgcttagatggcactgacttgtattgcttgaagtgtttatcacccacttgatcctattttagtgttatattttatatttggctttcagcaaacaaaattagtttgcaaatagaaaagtcagttgaataattgcttttgtataatgctttactattaaaagttatgcttacgttca

SEQ ID NO: 194276 - DNA, 1116 bp, Homo sapiens
  Payload ID: 18389
  Gene Name: transmembrane protein 59
  ENST ID: ENST00000371341
  CDS Start-End: 354-932
accgtgcgcctcccgcctacggagaactacatgccccagcctgccccgcgaagggaagaagtcaggaggccccgcttcgcgctaacgcttgcgatggttgaattcccctcctcacgccagcctaggagaagaagttcgtagtcccagaggaagaggagttgtacgcatgtcagagaggttgcaggctgttttcaatttgtcagtttgtggatgatggaattgacttaaatcgaactaaattggaatgtgaatctgcatgtacagaagcatattcccaatctgatgagcaatatgcttgccatcttggttgccagaatcagctgccattcgctgaactgagacaagaacaacttatgtccctgatgccaaaaatgcacctactctttcctctaactctggtgaggtcattctggagtgacatgatggactccgcacagagcttcataacctcttcatggactttttatcttcaagccgatgacggaaaaatagttatattccagtctaagccagaaatccagtacgcaccacatttggagcaggagcctacaaatttgagagaatcatctctaagcaaaatgtcctatctgcaaatgagaaattcacaagcgcacaggaattttcttgaagatggagaaagtgatggctttttaagatgcctctctcttaactctgggtggattttaactacaactcttgtcctctcggtgatggtattgctttggatttgttgtgcaactgttgctacagctgtggagcagtatgttccctctgagaagctgagtatctatggtgacttggagtttatgaatgaacaaaagctaaacagatatccagcttcttctcttgtggttgttagatctaaaactgaagatcatgaagaagcagggcctctacctacaaaagtgaatcttgctcattctgaaatttaagcatttttcttttaaaagacaagtgtaatagacatctaaaattccactcctcatagagcttttaaaatggtttcattggatataggccttaagaaatcactataaaatgcaaataaagttactcaaatctgtgaagactgtatttgctataactttattggtattgtttttgtagtaatttaag

SEQ ID NO: 194277 - DNA, 2473 bp, Homo sapiens
  Payload ID: 18389
  Gene Name: transmembrane protein 59
  ENST ID: ENST00000371344
  CDS Start-End: 1421-1999
aatgtagccaaggttactaatgcatagatatgttatgcgtatacaaggatgtacacatatattttgtaaatataagtatacataaagagcttctactaatttttttctactacataatattctgtgtagatatattataattttttaggcagtcccttatttgtgaacatgtaggttgttcctaatctttttcttttgtaaatgatacctattttgcacatttgtgagtatacctgtagaataaaatcatagggctagaattgctgagttaagaggtatatgcattttttatttttatgttttttagagatgaggatctcactatattacccaggctggcctcaagcttctgggcccaagtgctaccatagataccactgcactccagcctgggtgacagagcgagacactgtctcaaaaaaaaaaaaaaaaaacagatgaaaaaagaaacaaagcagaaccaaagctatccctagagtttagtaaatggcatcccacacttgtgctttagagaggcccagtgctgctaaagaagtcaagaaatcagaattggaggaaagatgatatcatttgtcaaaatcctttttttttttttttttttgtgatggagtctcgctctgtcgccaggctggagtgcagtggcatgatcttggctcacggcaacctctgcctccctggcttaagggattctcctgcctcagcctcctgagtagctgggactacaggcgtgcgccaccacgcctagctaatttttgtgtatttttagtagagatcgggtttcaccatgttgcccaggatggtctccatctcttgacctcgtgatccacccgcctcagcctcccaaagtgctgggattaccggtgtgagccaccacgctgggccattaaaatcttatcagtagcttactacatatattcagcccataaatactcccttcaccctgtcgtgttgtcagatgtctaccattttatgtatatattcttctgattgattttttccgttctcttttccattgatgttcattatagcatgatttattcttgatgaaagcattaaagatgagaatgatacgatttgtcccttcccgttctacccttaaggccttgctggtccttatttaattacatcttaagagtcttcttatttttggacttaattcaaaagcctgttattctgatagaggtgacaggtagctagtaagtgtgtttggtggcaaattaaagtatccttggtttttaagctttaccataatgtgcatagataactaagagtttactctaatgctattgattatggtagatgtatttaattgtttgtatcctgtcccaataaggattggagtaatcttgattatattgttcttttgaatatacatatataaaaataatatatttctcattatttattttatttttagcttatgtccctgatgccaaaaatgcacctactctttcctctaactctggtgaggtcattctggagtgacatgatggactccgcacagagcttcataacctcttcatggactttttatcttcaagccgatgacggaaaaatagttatattccagtctaagccagaaatccagtacgcaccacatttggagcaggagcctacaaatttgagagaatcatctctaagcaaaatgtcctatctgcaaatgagaaattcacaagcgcacaggaattttcttgaagatggagaaagtgatggctttttaagatgcctctctcttaactctgggtggattttaactacaactcttgtcctctcggtgatggtattgctttggatttgttgtgcaactgttgctacagctgtggagcagtatgttccctctgagaagctgagtatctatggtgacttggagtttatgaatgaacaaaagctaaacagatatccagcttcttctcttgtggttgttagatctaaaactgaagatcatgaagaagcagggcctctacctacaaaagtgaatcttgctcattctgaaatttaagcatttttcttttaaaagacaagtgtaatagacatctaaaattccactcctcatagagcttttaaaatggtttcattggatataggccttaagaaatcactataaaatgcaaataaagttactcaaatctgtgaagactgtatttgctataactttattggtattgtttttgtagtaatttaagaggtggatgtttgggattgtattattattttactaatatctgtagctattttgttttttgctttggttattgtttttttcccttttcttagctatgagctgatcattgctccttctcacctcctgccatgatactgtcagttaccttagttaacaagctgaatatttagtagaaatgatgcttctgctcaggaatggcccacaaatctgtaatttgaaatttagcaggaaatgacctttaatgacactacattttcaggaactgaaatcattaaaattttatttgaataa

SEQ ID NO: 194278 - DNA, 1911 bp, Homo sapiens
  Payload ID: 18389
  Gene Name: transmembrane protein 59
  ENST ID: ENST00000371348
  CDS Start-End: 846-1424
ttctagttatatcaccgttgtgttttttgttgttgttgttttttaagcaacagggtctcactttgtaccccaagctggagtacagtggtgtgattatagctcactgtaccctcaaactcctgggctcaaacaatcctcacacctcagcctactgagtactaggacaacaagtgtgcactaccatacccagttatttttgtgtgtgtgtttgttttggtacagatggggtctcgctatatagtccaggctggcctcaaactgttggcctcaagcagtcctcccacctcagcttcccaaagccctgggattacaggtgtgagccactgcacctggcctgtcactattagttttatttttaatttttcccccccacagattgtaaccaaagaaaatggaaaaagggtggtggttttacctactaggcttttttcttcgtatcacttttaaaataaggaactaaaacctctatatggcaaaggtcttgagtatcaactggctcctatcatttttttctttcagttatgaaacttactggacgatttgtaataaactttactaactgctttcttcctaacctgttttcccctgaggaaaaaaaaatactattttttggtaacccttcctgttcttgaactccctaggaagaggagttgtacgcatgtcagagaggttgcaggctgttttcaatttgtcagtttgtggatgatggaattgacttaaatcgaactaaattggaatgtgaatctgcatgtacagaagcatattcccaatctgatgagcaatatgcttgccatcttggttgccagaatcagctgccattcgctgaactgagacaagaacaacttatgtccctgatgccaaaaatgcacctactctttcctctaactctggtgaggtcattctggagtgacatgatggactccgcacagagcttcataacctcttcatggactttttatcttcaagccgatgacggaaaaatagttatattccagtctaagccagaaatccagtacgcaccacatttggagcaggagcctacaaatttgagagaatcatctctaagcaaaatgtcctatctgcaaatgagaaattcacaagcgcacaggaattttcttgaagatggagaaagtgatggctttttaagatgcctctctcttaactctgggtggattttaactacaactcttgtcctctcggtgatggtattgctttggatttgttgtgcaactgttgctacagctgtggagcagtatgttccctctgagaagctgagtatctatggtgacttggagtttatgaatgaacaaaagctaaacagatatccagcttcttctcttgtggttgttagatctaaaactgaagatcatgaagaagcagggcctctacctacaaaagtgaatcttgctcattctgaaatttaagcatttttcttttaaaagacaagtgtaatagacatctaaaattccactcctcatagagcttttaaaatggtttcattggatataggccttaagaaatcactataaaatgcaaataaagttactcaaatctgtgaagactgtatttgctataactttattggtattgtttttgtagtaatttaagaggtggatgtttgggattgtattattattttactaatatctgtagctattttgttttttgctttggttattgtttttttcccttttcttagctatgagctgatcattgctccttctcacctcctgccatgatactgtcagttaccttagttaacaagctgaatatttagtagaaatgatgcttctgctcaggaatggcccacaaatctgtaatttgaaatttagcaggaaatgacctttaatgacactacattttcaggaactgaaatcattaaaattttatttgaataattatgtgctgaaa

SEQ ID NO: 194279 - DNA, 1074 bp, Homo sapiens
  Payload ID: 18389
  Gene Name: transmembrane protein 59
  ENST ID: ENST00000452421
  CDS Start-End: 218-1074
gaattcccctcctcacgccagcctaggagaagaagttcgtagtcccagaggtgaggcaggaggcggcagtttctggcgggtgagggcggagctgaagtgacagcggaggcggaagcaacggtcggtggggcggagaagggggctggccccaggaggaggaggaaacccttccgagaaaacagcaacaagctgagctgctgtgacagaggggaacaagatggcggcgccgaaggggagcctctgggtgaggacccaactggggctcccgccgctgctgctgctgaccatggccttggccggaggttcggggaccgcttcggctgaagcatttgactcggtcttgggtgatacggcgtcttgccaccgggcctgtcagttgacctaccccttgcacacctaccctaaggtgtctgccagtttgtacacagtggatcacatagaagaggagttgtacgcatgtcagagaggttgcaggctgttttcaatttgtcagtttgtggatgatggaattgacttaaatcgaactaaattggaatgtgaatctgcatgtacagaagcatattcccaatctgatgagcaatatgcttgccatcttggttgccagaatcagctgccattcgctgaactgagacaagaacaacttatgtccctgatgccaaaaatgcacctactctttcctctaactctggtgaggtcattctggagtgacatgatggactccgcacagagcttcataacctcttcatggactttttatcttcaagccgatgacggaaaaatagttatattccagtctaagccagaaatccagtacgcaccacatttggagcaggagcctacaaatttgagagaatcatctctaagcaaaatgtcctatctgcaaatgagaaattcacaagcgcacaggaattttcttgaagatggagaaagtgatggctttttaagatgcctctctcttaactctgggtggattttaactacaactcttgtcctctcggtgatggtattgctttggatttgttgtgcaactgttgctacagctgtggagcagtatgttccctctgaggtaaattt

SEQ ID NO: 194280 - DNA, 618 bp, Homo sapiens
  Payload ID: 18389
  Gene Name: transmembrane protein 59
  ENST ID: ENST00000440019
  CDS Start-End: 185-618
aggaggccccgcttcgcgctaacgcttgcgatggttgaattcccctcctcacgccagcctaggagaagaagttcgtagtcccagagcatgtacagaagcatattcccaatctgatgagcaatatgcttgccatcttggttgccagaatcagctgccattcgctgaactgagacaagaacaacttatgtccctgatgccaaaaatgcacctactctttcctctaactctggtgaggtcattctggagtgacatgatggactccgcacagagcttcataacctcttcatggactttttatcttcaagccgatgacggaaaaatagttatattccagtctaagccagaaatccagtacgcaccacatttggagcaggagcctacaaatttgagagaatcatctctaagcaaaatgtcctatctgcaaatgagaaattcacaagcgcacaggaattttcttgaagatggagaaagtgatggctttttaagatgcctctctcttaactctgggtggattttaactacaactcttgtcctctcggtgatggtattgctttggatttgttgtgcaactgttgctacagctgtggagcagtatgttccctctgaggtaaatttaat

SEQ ID NO: 194281 - DNA, 728 bp, Homo sapiens
  Payload ID: 18389
  Gene Name: transmembrane protein 59
  ENST ID: ENST00000420738
  CDS Start-End: 295-728
gatggttgaattcccctcctcacgccagcctaggagaagaagttcgtagtcccagaggtgtctgccagtttgtacacagtggatcacatagaagaggagttgtacgcatgtcagagaggttgcaggctgttttcaatttgtcagtttgtggatgatggaattgacttaaatcgaactaaattggaatgtgaatctgcatgtacagaagcatattcccaatctgatgagcaatatgcttgccatcttggttgccagaatcagctgccattcgctgaactgagacaagaacaacttatgtccctgatgccaaaaatgcacctactctttcctctaactctggtgaggtcattctggagtgacatgatggactccgcacagagcttcataacctcttcatggactttttatcttcaagccgatgacggaaaaatagttatattccagtctaagccagaaatccagtacgcaccacatttggagcaggagcctacaaatttgagagaatcatctctaagcaaaatgtcctatctgcaaatgagaaattcacaagcgcacaggaattttcttgaagatggagaaagtgatggctttttaagatgcctctctcttaactctgggtggattttaactacaactcttgtcctctcggtgatggtattgctttggatttgttgtgcaactgttgctacagctgtggagcagtatgttccctctgaggtaaatttaat

SEQ ID NO: 194282 - DNA, 1613 bp, Homo sapiens
  Payload ID: 18390
  Gene Name: transmembrane protein 59-like
  Uniprot ID: Q9UK28
  ENST ID: ENST00000262817
  CDS Start-End: 88-1116
cagcgccccggtccccgccgcagccgctgcatcctccgtgcccggcctgagctggagtcccccgcgccccccgcgttccgcccggccatggctgcggtggcgctgatgccaccgccgctgctgctgctgctgctgttggcgtcgccgcccgccgcctccgcgccgtccgcccgcgatcccttcgccccccagctcggggacacgcagaactgccagctgcggtgccgcgaccgcgacctcggcccgcagccctcgcaggcggggctggagggcgcctccgagtctccctatgacagagccgttctgatcagcgcttgcgagcgtggctgccgcctcttctccatctgccgatttgtggccagaagctccaagcccaatgccacccaaactgagtgtgaagcagcctgcgtggaagcctatgtgaaggaggcagagcagcaggcctgtagccacggctgctggagccagcccgcggagcctgagccggagcagaagagaaaggtcctggaggctccaagtggggccctctccctcttggacttgttttccaccctctgcaatgaccttgtcaactcagcccagggatttgtctcctccacctggacatactacttgcagactgacaatgggaaagtggtggtgtttcagactcagcccatagtggagagcctcggcttccaggggggccgtctgcagcgcgtggaggtgacctggcgaggctcccaccctgaagccctggaggtgcacgtggaccctgtaggccccctggacaaggtgaggaaggccaagatccgagtcaagaccagcagcaaggccaaggtggagtctgaagagccacaggacaatgacttcctcagttgcatgtcccggcgctcgggtctgcctcgctggatcctggcctgctgcctcttcctctccgtgctggtgatgctgtggctgagctgctccaccctggtgaccgcgcctggccagcacctcaagttccagcctctgaccctggagcagcacaagggcttcatgatggagcccgattggcccctgtacccgccgccgtcccacgcctgtgaggacagcctaccaccctacaagctgaagctggacctgaccaagctgtaggcctccactggccccatcactgccaactgcagggggcccctcgggcctcacttgccctgagcccaggagtccaagggcagggtgggtccagccttgagcccctccacccccaaatccttcctctcctcccagtcccaccccttgccccacggagtcctggggacgcagtgccccagctgggaagagggcgggatcgggcactggttcctccttgtccccgctttcttgggggcttgctactttttgtcttctattgtgtggctttctgagtatttgaaccccagtcctgtgtcaccttcctttttccttctatgtcccctctctgcggggggggcgctgaggctgagggggagctgcgtcttgctagggcttcccccttctccccatcccggtctccagagacccagcttctgagagacagggtgtgggcatctccatgcccctataaagcgtgcctggggcttgtctggggctggggaggaataaaccatgtatat

SEQ ID NO: 194283 - DNA, 1717 bp, Homo sapiens
  Payload ID: 18390
  Gene Name: transmembrane protein 59-like
  Uniprot ID: Q9UK28
  ENST ID: ENST00000600490
  CDS Start-End: 186-1214
gaaaaagcaggaaggcacggagtccctcgccttcgccctggctgcgctgtccccttcgcgcgcgggatgggtttgaggctgcctcgctcgggtgacgtcagcgccccggtccccgccgcagccgctgcatcctccgtgcccggcctgagctggagtcccccgcgccccccgcgttccgcccggccatggctgcggtggcgctgatgccaccgccgctgctgctgctgctgctgttggcgtcgccgcccgccgcctccgcgccgtccgcccgcgatcccttcgccccccagctcggggacacgcagaactgccagctgcggtgccgcgaccgcgacctcggcccgcagccctcgcaggcggggctggagggcgcctccgagtctccctatgacagagccgttctgatcagcgcttgcgagcgtggctgccgcctcttctccatctgccgatttgtggccagaagctccaagcccaatgccacccaaactgagtgtgaagcagcctgcgtggaagcctatgtgaaggaggcagagcagcaggcctgtagccacggctgctggagccagcccgcggagcctgagccggagcagaagagaaaggtcctggaggctccaagtggggccctctccctcttggacttgttttccaccctctgcaatgaccttgtcaactcagcccagggatttgtctcctccacctggacatactacttgcagactgacaatgggaaagtggtggtgtttcagactcagcccatagtggagagcctcggcttccaggggggccgtctgcagcgcgtggaggtgacctggcgaggctcccaccctgaagccctggaggtgcacgtggaccctgtaggccccctggacaaggtgaggaaggccaagatccgagtcaagaccagcagcaaggccaaggtggagtctgaagagccacaggacaatgacttcctcagttgcatgtcccggcgctcgggtctgcctcgctggatcctggcctgctgcctcttcctctccgtgctggtgatgctgtggctgagctgctccaccctggtgaccgcgcctggccagcacctcaagttccagcctctgaccctggagcagcacaagggcttcatgatggagcccgattggcccctgtacccgccgccgtcccacgcctgtgaggacagcctaccaccctacaagctgaagctggacctgaccaagctgtaggcctccactggccccatcactgccaactgcagggggcccctcgggcctcacttgccctgagcccaggagtccaagggcagggtgggtccagccttgagcccctccacccccaaatccttcctctcctcccagtcccaccccttgccccacggagtcctggggacgcagtgccccagctgggaagagggcgggatcgggcactggttcctccttgtccccgctttcttgggggcttgctactttttgtcttctattgtgtggctttctgagtatttgaaccccagtcctgtgtcaccttcctttttccttctatgtcccctctctgcggggggggcgctgaggctgagggggagctgcgtcttgctagggcttcccccttctccccatcccggtctccagagacccagcttctgagagacagggtgtgggcatctccatgcccctataaagcgtgcctggggcttgtctggggctggggaggaataaaccatgtatataaaaga

SEQ ID NO: 194284 - DNA, 403 bp, Homo sapiens
  Payload ID: 18390
  Gene Name: transmembrane protein 59-like
  ENST ID: ENST00000594709
  CDS Start-End: 1-403
gaaaggtcctggaggctccaagtggggccctctccctcttggacttgttttccaccctctgcaatgaccttgtcaactcagcccagggatttgtctcctccacctggacatactacttgcagactgacaatgggaaagtggtggtgtttcagactcagcccatagtggagagcctcggcttccaggggggccgtctgcagcgcgtggaggtgacctggcgaggctcccaccctgaagccctggaggtgcacgtggaccctgtaggccccctggacaaggtgaggaaggccaagatccgagtcaagaccagcagcaaggccaaggcgctcgggtctgcctcgctggatcctggcctgctgcctcttcctctccgtgctggtgatgctgtggctgagctgctcca

SEQ ID NO: 194285 - DNA, 1023 bp, Homo sapiens
  Payload ID: 18391
  Gene Name: transmembrane protein 60
  Uniprot ID: Q9H2L4
  ENST ID: ENST00000257663
  CDS Start-End: 378-779
aaaggtcggttggtttgcactggcggacaaatggtccaattaccgcggaaaagggacctctgaatccagattggcgtcctctctacctatagggtaggctcaggggcggtgagaaccagccccggatgtgggcgcggcactgaggtagaactgagagatcctctaccgcagtcgtttgaggaggcggaactgaagttttttcttaattatcatgtgacgggttctggatttaatggggggaaaagggcggaaaaggacaaggatccaaactggcgaatttgctgatcttcgcgtccctctccgctttccggccggcagcgctgccagggtatatttccttttttccgatcctgcaacagcctctttaaactgtttaaatgagaatgtccttggctcagagagtactactcacctggcttttcacactactcttcttgatcatgttggtgttgaaactggatgagaaagcaccttggaactggttcctcatattcattccagtctggatatttgatactatccttcttgtcctgctgattgtgaaaatggctgggcggtgtaagtctggctttgaccctcgacatggatcacacaatattaaaaaaaaagcctggtacctcattgcaatgttacttaaattagccttctgcctcgcactctgtgctaaactggaacagtttactaccatgaatctatcctatgtcttcattcctttatgggccttgctggctggggctttaacagaactcggatataatgtcttttttgtgagagactgacttctaagtacatcatctcctttctattgctgttcaacaagttaccattaaagtgttctgaatctgtcaagcttcaagaataccagagaactgagggaaaataccaaatgtagttttatactacttccataaaacaggattggtgaatcacggacttctagtcaacctacagcttaattattcagcatttgagttattgagatccttattatctctatgtaaataaagtttgttttggacctca

SEQ ID NO: 194286 - DNA, 1097 bp, Homo sapiens
  Payload ID: 18392
  Gene Name: transmembrane protein 61
  Uniprot ID: Q8N0U2
  ENST ID: ENST00000371268
  CDS Start-End: 275-907
ggcctggctcggtccctgcgcaccgggtgcgggcggcggagagggcgcggctggtgagccctgggagggcccaggagccagacctcggttttgcgggctggggagcagggctcgggggcagcggccaggcccctccgcccctaacacccgcgcctcctgcagacccgagggtcgccgctggtagggtcgctcagccctggcgtcctccaccaccacaccttcacctgcgcccggctccctgcgcgcctggacagcgcctgctgcccgcctcccgatggccctgccccagatgtgtgacgggagccacttggcctccaccctccgctattgcatgacagtcagcggcacagtggttctggtggccgggacgctctgcttcgcttggtggagcgaaggggatgcaaccgcccagcctggccagctggccccacccacggagtatccggtgcctgagggccccagccccctgctcaggtccgtcagcttcgtctgctgcggtgcaggtggcctgctgctgctcattggcctgctgtggtccgtcaaggccagcatcccagggccacctcgatgggacccctatcacctctccagagacctgtactacctcactgtggagtcctcagagaaggagagctgcaggacccccaaagtggttgacatccccacttacgaggaagccgtgagcttcccagtggccgaggggcccccaacaccacctgcataccctacggaggaagccctggagccaagtggatcgagggatgccctgctcagcacccagcccgcctggcctccacccagctatgagagcatcagccttgctcttgatgccgtttctgcggagacgacaccgagtgccacacgctcctgctcaggcctggttcagactgcacggggaggaagttaaaggctcctagcaggtcctgaatccagagacaaaaatgccgtgccttctccagagtcttatgcagtgcctgggacacagtaggcactcagcaaacgttcgttgttgaaggctgttctatttatctattgctgtataacaaaccaccccagaatttagtggcttaaaataaatcccattttattatgtctca

SEQ ID NO: 194287 - DNA, 2771 bp, Homo sapiens
  Payload ID: 18393
  Gene Name: transmembrane protein 62
  Uniprot ID: Q0P6H9
  ENST ID: ENST00000260403
  CDS Start-End: 280-2211
ggtgttcagagtttcggttctcttttctgtgatcgtattacttatgcaaaacgagcccagtcacttgcgcggccagagaggggcaggtgctgggcggcggctgacgggcgcagcaccctaggcccagtgtctggctccagccccgcatccggcgccggccccgcatccagctctggccctgcgacaatagagtccggaagtgcaggcaaagcggctcccgggagcgccgcgcggtcctgcgcgggatcagcgagggccgcgccccggcgggcgggcggcatggctgcagtgctggctctcagggtggtcgcggggttggcggccgcagcgctggtggccatgctcttggagcactacggcctggcgggccagccctcgccgctgccgcgccccgcgccccccaggaggccgcaccctgcgccagggcccggagacagcaacatcttctggggcctgcagatatccgacattcacctgagcaggtttcgagatccaggcagagcggtagacttagagaaattctgttctgaaactattgacatcattcaaccagctctcgtcctagcaacaggagacctgacagatgccaaaacaaaggaacagttgggatccaggcagcatgaggtagaatggcaaacctaccagggtattctgaagaagacaagagtcatggaaaaaaccaagtggctggatatcaaaggaaatcatgatgcattcaatattccaagtctggacagcatcaagaattattacaggaaatattctgctgtacgtagagatggctctttccattatgtccacagtactccctttggcaactattcgttcatctgtgtagatgccactgtaaatccagggcctaagagaccctataatttctttggaattttagataagaaaaagatggaggagctcttattactggccaaggaaagcagtcggagcaaccatacaatttggtttggacactttacaacatccactattctttctccatcaccaggaatccggtcaataatgagttcggctatagcttatttgtgtggacatctccatacacttggtggactgatgcctgttttgcacactcgtcacttccagggcactttggaacttgaggtgggagactggaaggataataggaggtaccggatttttgcttttgatcacgacctctttagctttgcagatttgatctttgggaagtggcctgtggttcttatcaccaatcctaaatcactcctttatagttgtggtgaacatgaaccactagaaagacttcttcactcaacacacatcagagtcttggccttttccttatcctccattacttctgtcacagttaagattgatggagttcatttaggccaggctgttcatgtgtctggtcccattttcgtactgaagtggaatcctagaaactacagtagtgggacacataacatagaagtaatcgtccaggattctgctggaagaagtaagagtgttcaccacatattttctgttcaagagaataatcatctcagttttgatcccctggcatcatttattctccgtactgatcactacatcatggcccgggtcctttttgtgctgattgtgctgagccagctcaccattctcattatttttagatatcgaggatacccagagcttaaagaaccttcagggtttataaatctgacctcattttctcttcatgtcttgagcaaaataaacatcttctactattctgtgttgttgttgaccctgtatacagtgctgggtccatggttttttggtgaaatcattgatggcaaatttggttgctgcttttcctttgggatatttgttaatggacatttcctacaaggcagcataacatttataattggaattctccagctggcgttttttaacatccccttgatggcttacatgtgttggagcttgctgcagcggtgctttggtcacaacttcaggtctcatctccatcaaagaaaatacttgaaaattatgcctgttcacctacttatgctactgctgtacatctggcaggtttattcctgctactttctttatgcaacatacggcaccctagcttttttattctcccctttgcggacctggttgacactgctgacacctgttctcattcgttatgtgtggacactgaactccaccaagtttggaatcttcatggtgcagttaaaaagccacctgagctcctgaaggccatgtctcaccactggcagctgggcagaagcccagcctctgtgtctgtagcccaggcctctaccccagtagcaggtggagggccaggattggtgggtgagctttagggagcagctgctcgtttggagtcctggacgttggagggattacccactactgatacctgcagaatggactgcagaaaagtctcaaaaataatgcctttattccttccctccctaaggaggcaaagagttgatttacctttgtgaagagaaaacccttatctaggacatccacagggtagaggttgggtgtgtgtacgggagtgtctgaggcccagtgtgttttttagggttaccccatgtaaagcacttaccgctgtgcttggaattcagcagctgtcaaaggtgcaatttcaggggcagggaacctttgaggatctgggcccgaccctcactacccctgagatattagttcccaggcctgttttcccacaggattgtgggctctctgcttccttagtcggaagtgttttcaactaatcaaataaatgaatgaatgatgaataagaaaga

SEQ ID NO: 194288 - DNA, 573 bp, Homo sapiens
  Payload ID: 18393
  Gene Name: transmembrane protein 62
  ENST ID: ENST00000569535
  CDS Start-End: 358-480
gtgagccatgatcgcgccactgcattcctgcctgggggatagagaccctgtctgagaagtgaaggaaaggggaatggtagagggaaggggaagagaaagaaaagaaaacctatggaggtacgttaataatcagaaggggccagaggaagccacctgacacatttgtgagacaatttaaaaggcgttctcatacattctcactttgatacaacaaccctgcaaagtgcgcacggaaggtgttattaactccgttttacaggagacctgacagatgccaaaacaaaggaacagttgggatccaggcagcatgaggtagaatggcaaacctaccagggtattctgaagaagacaagagtcatggaaaaaaccaagtggctggatatcaaaggaaatcatggaaatattctgctgtacgtagagatggctctttccattatgtccacagtactccctttggcaactattcgttcatctgtgtagatgccactgtaaatccagggcctaagagaccctataatttctttggaattttagataagaaaaagatggaggagctcttattactggccaagg

SEQ ID NO: 194289 - DNA, 500 bp, Homo sapiens
  Payload ID: 18393
  Gene Name: transmembrane protein 62
  ENST ID: ENST00000569926
  CDS Start-End: 85-273
ggaagtgcaggcaaagcggctcccgggagcgccgcgcggtcctgcgcgggatcagcgagggccgcgccccggcgggcgggcggcatggctgcagtgctggctctcagggtggtcgcggggttggcggccgcagcgctggtggccatgctcttggagcactacggcctggcgggccagccctcgccgctgccgcgccccgcgccccccaggaggccgcaccctgcgccagggcccggagacagcaacatcttctggggcctgcaggagacctgacagatgccaaaacaaaggaacagttgggatccaggcagcatgaggtagaatggcaaacctaccagggtattctgaagaagacaagagtcatggaaaaaaccaagtggctggatatcaaaggaaatcatggaaatattctgctgtacgtagagatggctctttccattatgtccacagtactccctttggcaactattcgttcatctgtgtagatgccactgtaaatc

SEQ ID NO: 194290 - DNA, 571 bp, Homo sapiens
  Payload ID: 18393
  Gene Name: transmembrane protein 62
  ENST ID: ENST00000564698
  CDS Start-End: 183-571
aagaagcgctcgcccaggaggaggcagggcaaattggtgaacagggcggcgtgtccttatacgggcacgaactcgcgaggtcctgagacctgacagatgccaaaacaaaggaacagttgggatccaggcagcatgaggtagaatggcaaacctaccagggtattctgaagaagacaagagtcatggaaaaaaccaagtggctggatatcaaaggaaatcatgatgcattcaatattccaagtctggacagcatcaagaattattacaggaaatattctgctgtacgtagagatggctctttccattatgtccacagtactccctttggcaactattcgttcatctgtgtagatgccactgtaaatccagggcctaagagaccctataatttctttggaattttagataagaaaaagatggaggagctcttattactggccaaggaaagcagtcggagcaaccatacaatttggtttggacactttacaacatccactattctttctccatcaccaggaatccggtcaataatgagttcggctatagcttatttgtgtggacatctccatac

SEQ ID NO: 194291 - DNA, 493 bp, Homo sapiens
  Payload ID: 18393
  Gene Name: transmembrane protein 62
  ENST ID: ENST00000568182
  CDS Start-End: 1-150
gcggccgcagcgctggtggccatgctcttggagcactacggcctggcgggccagccctcgccgctgccgcgccccgcgccccccaggaggccgcaccctgcgccagggcccggagacagcaacatcttctggggcctgcaggagacctgacagatgccaaaacaaaggaacagttgggatccaggcagcatgaggtagaatggcaaacctaccagggtattctgaagaagacaagagtcatggaaaaaaccaagtggctggatatcaaaggaaatcatgaaaaagatggaggagctcttattactggccaaggaaagcagtcggagcaaccatacaatttggtttggacactttacaacatccactattctttctccatcaccaggaatccggtcaataatgagggcactttggaacttgaggtgggagactggaaggataataggaggtaccggatttttgcttttgatcacgacctctttagctttgcaga

SEQ ID NO: 194292 - DNA, 356 bp, Homo sapiens
  Payload ID: 18393
  Gene Name: transmembrane protein 62
  ENST ID: ENST00000568197
  CDS Start-End: 1-66
aggaggccgcaccctgcgccagggcccggagacagcaacatcttctggggcctgcaggagacctgacagatgccaaaacaaaggaacagttgggatccaggcagcatgaggtagaatggcaaacctaccagggtattctgaagaagacaagagtcatggaaaaaaccaagtggctggatatcaaaggaaatcatgatgcattcaatattccaagtctggacagcatcaagaattattacaggaaatattctgctgtacgtagagatggctctttccattatgtccacagtactccctttggcaactattcgttcatctgtgtagatgccactgtaaatccagggcctaagagaccc

SEQ ID NO: 194293 - DNA, 566 bp, Homo sapiens
  Payload ID: 18393
  Gene Name: transmembrane protein 62
  ENST ID: ENST00000565291
  CDS Start-End: 452-566
actgcattcctgcctgggggatagagaccctgtctgagaagtgaaggaaaggggaatggtagagggaaggggaagagaaagaaaagaaaacctatggaggtacgttaataatcagaaggggccagaggaagccacctgacacatttgtgagacaatttaaaaggcgttctcatacattctcactttgatacaacaaccctgcaaagtgcgcacggaaggtgttattaactccgttttacagatatccgacattcacctgagcaggtttcgagatccaggcagagcggtagacttagagaaattctgttctgaaactattgacatcattcaaccagctctcgtcctagcaacaggagacctgacagatgccaaaacaaaggaacagttgggatccaggcagcatgaggtagaatggcaaacctaccagggtattctgaagaagacaagagtcatggaaaaaaccaagtggctggatatcaaaggaaatcatgatgcattcaatattccaagtctggacagcatcaagaattattacaggaaatattctgctgtacgtagagatggct

SEQ ID NO: 194294 - DNA, 627 bp, Homo sapiens
  Payload ID: 18393
  Gene Name: transmembrane protein 62
  ENST ID: ENST00000567441
  CDS Start-End: 1-149
cggccgcagcgctggtggccatgctcttggagcactacggcctggcgggccagccctcgccgctgccgcgccccgcgccccccaggaggccgcaccctgcgccagggcccggagacagcaacatcttctggggcctgcaggagacctgacagatgccaaaacaaaggaacagttgggatccaggcagcatgaggtagaatggcaaacctaccagggtattctgaagaagacaagagtcatggaaaaaaccaagtggctggatatcaaaggaaatcatgaaaaagatggaggagctcttattactggccaaggaaagcagtcggagcaaccatacaatttggtttggacactttacaacatccactattctttctccatcaccaggaatccggtcaataatgagttcggctatagcttatttgtgtggacatctccatacacttggtggactgatgcctgttttgcacactcgtcacttccagggcactttggaacttgaggtgggagactggaaggataataggaggtaccggatttttgcttttgatcacgacctctttagctttgcagatttgatctttgggaagtggcctgtggttcttatcaccaatcctaaatcactccttt

SEQ ID NO: 194295 - DNA, 2025 bp, Homo sapiens
  Payload ID: 18393
  Gene Name: transmembrane protein 62
  ENST ID: ENST00000564494
  CDS Start-End: 1-1622
ttcgagatccaggcagagcggtagacttagagaaattctgttctgaaactattgacatcattcaaccagctctcgtcctagcaacaggagacctgacagatgccaaaacaaaggaacagttgggatccaggcagcatgaggtagaatggcaaacctaccagggtattctgaagaagacaagagtcatggaaaaaaccaagtggctggatatcaaaggaaatcatgatgcattcaatattccaagtctggacagcatcaagaattattacaggaaatattctgctgtacgtagagatggctctttccattatgtccacagtactccctttggcaactattcgttcatctgtgtagatgccactgtaaatccagggcctaagagaccctataatttctttggaattttagataagaaaaagatggaggagctcttattactggccaaggaaagcagtcggagcaaccatacaatttggtttggacactttacaacatccactattctttctccatcaccaggaatccggtcaataatgagttcggctatagcttatttgtgtggacatctccatacacttggtggactgatgcctgttttgcacactcgtcacttccagggcactttggaacttgaggtgggagactggaaggataataggaggtaccggatttttgcttttgatcacgacctctttagctttgcagatttgatctttgggaagtggcctgtggttcttatcaccaatcctaaatcactcctttatagttgtggtgaacatgaaccactagaaagacttcttcactcaacacacatcagagtcttggccttttccttatcctccattacttctgtcacagttaagattgatggagttcatttaggccaggctgttcatgtgtctggtcccattttcgtactgaagtggaatcctagaaactacagtagtgggacacataacatagaagtaatcgtccaggattctgctggaagaagtaagagtgttcaccacatattttctgttcaagagaataatcatctcagttttgatcccctggcatcatttattctccgtactgatcactacatcatggcccgggtcctttttgtgctgattgtgctgagccagctcaccattctcattatttttagatatcgaggatacccagagcttaaaggtccatggttttttggtgaaatcattgatggcaaatttggttgctgcttttcctttgggatatttgttaatggacatttcctacaaggcagcataacatttataattggaattctccagctggcgttttttaacatccccttgatggcttacatgtgttggagcttgctgcagcggtgctttggtcacaacttcaggtctcatctccatcaaagaaaatacttgaaaattatgcctgttcacctacttatgctactgctgtacatctggcaggtttattcctgctactttctttatgcaacatacggcaccctagcttttttattctcccctttgcggacctggttgacactgctgacacctgttctcattcgttatgtgtggacactgaactccaccaagtttggaatcttcatggtgcagttaaaaagccacctgagctcctgaaggccatgtctcaccactggcagctgggcagaagcccagcctctgtgtctgtagcccaggcctctaccccagtagcaggtggagggccaggattggtgggtgagctttagggagcagctgctcgtttggagtcctggacgttggagggattacccactactgatacctgcagaatggactgcagaaaagtctcaaaaataatgcctttattccttccctccctaaggaggcaaagagttgatttacctttgtgaagagaaaacccttatctaggacatccacagggtagaggttgggtgtgtgtacgggagtgtctgaggcccagtgtgttttttagggttaccccatgtaaagcacttaccgctgtgcttggaattcagcagctgtcaaaggtgcaatttca

SEQ ID NO: 194296 - DNA, 4098 bp, Homo sapiens
  Payload ID: 18394
  Gene Name: transmembrane protein 63A
  Uniprot ID: O94886
  ENST ID: ENST00000366835
  CDS Start-End: 272-2695
gtaacttttaagtggtcggaacacgccccgcgctgctgggtcccgccagacacgccgccgccgcaggaaagtctacagtttggtaccccaggactcgctggtcaggaaagccctgcaggacatgagtgttaggcccgacgcctggcccttggcagcttgggaggtggctggggctgcttttgcctttgccagagacagctccaactgaggacctctccaacgggcccatccacagtccttccttcccctagtgtctgggaagacaggcgcgatgatggactccccgttcctggagctgtggcagtccaaggcagtgtccatcagggagcagctgggactcggggaccggcccaacgactcctattgctacaactcggccaaaaacagcaccgtgctccagggggtcacctttggtggcatccccactgtcctgctcatagacgtcagctgcttcctgttcttaatcttggtgttttctattataagaagaagattctgggactatggccgcattgccctggtgtcagaagcagacagcgagtccagatttcagagattgtcatcgacttcctcctcaggtcaacaagactttgaaaatgagctgggatgctgtccctggctgactgccatcttccgtctgcatgatgaccagatcctggaatggtgtggggaggacgccatccactacctgtccttccagaggcacatcatcttcctgttggtggtggtcagctttttgtccctgtgtgtcatcctgcctgtcaacctctcaggggacttgctggacaaagacccgtatagttttgggaggacaacaatagcaaacctacagactgacaatgacctcctttggctgcacaccatctttgctgtcatttacctcttcctcactgtgggtttcatgcggcaccacactcagtccattaagtacaaagaggagaacctggtgaggcggaccctgttcatcacaggactccccagagatgccaggaaggagactgtggagagccacttccgggacgcgtatcccacgtgtgaggtggttgatgtgcagctgtgctacaacgtggccaaactgatctacctgtgcaaggagaaaaagaagactgagaagagcctgacctattacacaaacctgcaggtgaagacaggccagcggaccctcatcaaccccaagccctgtggccagttttgctgctgtgaagtgctgggctgtgagtgggaagacgccatctcttactacacacggatgaaggacaggctgctggagaggatcacagaggaagaacgccacgtccaggaccagcccctgggaatggccttcgtcaccttccaggagaagtccatggccacctacatcctgaaagatttcaatgcctgcaagtgtcagagccttcagtgcaaaggtgagccccagccgtcctcccatagcagggagctctatacctccaagtggacagtcacctttgctgctgaccctgaggacatctgctggaagaacctctctatccagggcctccgctggtggctacagtggctgggcatcaacttcaccctcttcctggggctatttttcctgaccacaccctccatcatcctgtccaccatggacaagtttaatgtcaccaaacccatccatgcgctgaataacccgatcatcagccagttcttccccaccctcctgctctggtccttctcggccctgctcccctccattgtctactactctacactgctggagtctcactggaccaagtcgggggaaaaccagatcatgatgaccaaagtctacatattcttgatcttcatggtgctgatcctgccctccctgggtctcaccagtctagattttttcttccggtggctctttgacaaaacttcctcggaggcctccatcaggttggagtgcgtcttcctgcctgaccagggtgccttctttgtgaactatgtcatcgcctcggccttcatcggcaatggcatggagctgctgcggctgccaggtctcatcctctataccttccgcatgatcatggccaagacggctgctgaccgcaggaatgtcaagcagaaccaggccttccagtacgagtttggagccatgtatgcatggatgctgtgtgtcttcactgtcatcgtggcctacagcatcacttgtcccatcatcgcgccatttggcctcatctacatcctgctcaagcacatggtggaccggcacaacctctacttcgtctacctcccagccaagctggagaaggggatccactttgccgctgtgaaccaggccttggcagcccccatcctgtgcctcttctggctctacttcttttccttcctgcgcctgggtatgaaggcccccgccactctgttcaccttcctggtgctgctgctcaccatcctggtctgcctggctcacacctgctttggatgcttcaagcacctcagccctctgaactacaaaacagaagagcctgcaagtgacaaaggaagtgaggcagaggcccacatgcccccaccgttcacaccctacgtgcctcggattctgaacggcttggcctcggagaggacagcactgtctccgcagcagcagcagcagcagacctatggtgccatccacaacatcagcgggactatccctggacagtgcttggcgcagagcgccacgggcagtgtggctgctgccccccaggaggcctgaggctgggtctcactgctctgaaaagacacaaccagaatggcctggggctcaggcccttggctgagtgggaatgcgttgggactgcccagctgagctatcaggtgcccatcttttctggtcccagcagtggtgaggagagcacaggcaggcctcgcccctcccttgctcacccagtttcccctccggcacaagcttccagctctgcagctggggtgacatccccagtggtttgtcgccaagaccatgtggtggacttttcgccccccaaactgatgagtccgggagaatatatggagagagagatgtaacaaggggaaggcctcctcccttctgagcacacacacaaccgataaccaaagagatgctgcagtccaggtctgaggtcccgctggcatccagctccctgctccatggccagtccctccccagcccagcagtccctccaggctacatccaggagtaagctatggggaacaggttgggaggtggccagtgctcctgccagctgtgcacacatctctgtatcccgctagagttctgtgtttttgtatcatgttgtcagggacgctagctgggtcagggttaccccatagcaggcagggacaaggaccactcataatatgcccattggaccacagttaagatccagcctctctcacctcttcagggctgagtgcatgagtctgcacctccaggcaggctctgtgcagtactcaccccctccgtctgctccctccaaggtgtgggggtgggcagtgctcagggcctcctcggagccaaaggacagcatggtcggcacagaggaaggggtacctgggctgggtgcagggccatcccactgcccttgagctgtggctctggcaggaaggaggggcagcccatccctcttctccctcctggggattctggggaatgggatgcaacttaagacttctgcctgagaagcctcctccctgctgcctccagggggcaccaaggcacaagcctgtgcagtaggggcgggatgggggtgtggaagagcaggtccaggctcctagcacaactggcctggggccttggcacctctgtaggccctgcctgtgcctgtccgctggcctggggggcctgggcttatctgggccttctcactcagggactctcttgacgctgacttgcccccgcagtggtggccagtgctgcctctgctccaagctgcccctgcgctgggaggggtgggggcggtgccattggtctggtgcagcatagccctggccagtggcctcatccccagcaggcctcccgtgcctctgccagcaaggaggggccggccagctctgcttgcacagggggccccatgtggggtcagcgcacgctcatgtcactgagttccagccgcttttagagtaaagtcgtttatcatcaaa

SEQ ID NO: 194297 - DNA, 454 bp, Homo sapiens
  Payload ID: 18394
  Gene Name: transmembrane protein 63A
  ENST ID: ENST00000436966
  CDS Start-End: 100-454
gcctttggctctgccagcactggtgggaacctgcaagaaatttgagccctgaacgtctgccttgtcctgttgtcctgtgctccagggaagacaggcgcgatgatggactccccgttcctggagctgtggcagtccaaggcagtgtccatcagggagcagctgggactcggggaccggcccaacgactcctattgctacaactcggccaaaaacagcaccgtgctccagggggtcacctttggtggcatccccactgtcctgctcatagacgtcagctgcttcctgttcttaatcttggtgttttctattataagaagaagattctgggactatggccgcattgccctggtgtcagaagcagacagcgagtccagatttcagagattgtcatcgacttcctcctcaggtcaacaagactttgaaaatgagctgggatgctgtccctggctgactg

SEQ ID NO: 194298 - DNA, 1018 bp, Homo sapiens
  Payload ID: 18394
  Gene Name: transmembrane protein 63A
  ENST ID: ENST00000537914
  CDS Start-End: 638-886
ccagctctgcacccccagctccctgcctgggatcccagccctgatggcaggtggtttccctctcagcaatgacctcctttggctgcacaccatctttgctgtcatttacctcttcctcactgtgggtttcatgcggcaccacactcagtccattaagtacaaagaggagaacctgtctcctgccatgcaaagaaggctcatagagttgctttggaagtggattctttgtacagcctggaagaagacgctgtaggctggagttgggtaggaaacctgagcataccggcacactggcttgtgggtgacttctctccctgctgtatttcccggacaggtgaggcggaccctgttcatcacaggactccccagagatgccaggaaggagactgtggagagccacttccgggacgcgtatcccacgtgtgaggtggttgatgtgcagctgtgctacaacgtggccaaactgatctacctgtgcaaggagaaaaagaagactgagaagagcctgacctattacacaaacctgcaggtgaagacaggccagcggaccctcatcaaccccaagccctgtggccagttttgctgctgtgaagtgctgggctgtgagtgggaagacgccatctcttactacacacggatgaaggacaggctgctggagaggatcacagaggaagaacgccacgtccaggaccagcccctgggaatggccttcgtcaccttccaggagaagtccatggccacctacatcctgaaagatttcaatgcctgcaagtgtcagagccttcagtgcaaaggtgagccccagccgtcctcccatagcagggagctctatacctccaagtggacagtcacctttgctgctgaccctgaggacatctgctggtaagctcctagaccaaggagaggtgggagagaggcctgggttcctggtgggagctgcccatcacctggagcacaggtgtgacctggcagtcaatggagatctccacacatctgcaattctgtgggctgtgatgct

SEQ ID NO: 194299 - DNA, 3318 bp, Homo sapiens
  Payload ID: 18395
  Gene Name: transmembrane protein 63B
  Uniprot ID: Q5T3F8
  ENST ID: ENST00000259746
  CDS Start-End: 184-2682
accacagaggcgtctggctaactcatctccagacctaagttgggaaaggggaggggagcgcggaaagcggagaagccggaggagacgctccggagtgaccagcgacggctgaacgcagcccgccctccccaagtcgacgccgcaacccggggaaagcaggaggaccatgcggcagtagcagccatgctgccctttctgctggccacactgggcaccacagccctcaacaacagcaaccccaaggactactgctacagcgcccgcatccgcagcactgtcctgcagggcctgccctttgggggcgtccccaccgtgctggctctcgacttcatgtgcttccttgcactgctgttcttattctctatcctccggaaggtggcctgggactatgggcggctggccttggtgacagatgcagacaggcttcggcggcaggagagggaccgagtggaacaggaatatgtggcttcagctatgcacggggacagccatgaccggtatgagcgtctcacctctgtctccagctccgttgactttgaccaaagggacaatggtttctgttcctggctgacagccatcttcaggataaaggatgatgagatccgggacaaatgtgggggcgatgccgtgcactacctgtcctttcagcggcacatcatcgggctgctggtggttgtgggcgtcctctccgtaggcatcgtgctgcctgtcaacttctcaggggacctgctggagaacaatgcctacagctttgggagaaccaccattgccaacttgaaatcagggaacaacctgctatggctgcacacctccttcgccttcctgtatctgctgctcaccgtctacagcatgcgtagacacacctccaagatgcgctacaaggaggatgatctggtgaagcggaccctcttcatcaatggaatctccaaatatgcagagtcagaaaagatcaagaagcattttgaggaagcctaccccaactgcacagttctcgaagcccgcccgtgttacaacgtggctcgcctaatgttcctcgatgcagagaggaagaaggccgagcggggaaagctgtacttcacaaacctccagagcaaggagaacgtgcctaccatgatcaaccccaagccctgtggccacctctgctgctgtgtggtgcgaggctgtgagcaggtggaggccattgagtactacacaaagctggagcagaagctgaaggaagactacaagcgggagaaggagaaggtgaatgagaagcctcttggcatggcctttgtcaccttccacaatgagactatcaccgccatcatcctgaaggacttcaacgtgtgtaaatgccagggctgcacctgccgtggggagccacgcccctcatcctgcagcgagtccctgcacatctccaactggaccgtgtcctatgcccctgaccctcagaacatctactgggagcacctctccatccgaggcttcatctggtggctgcgctgcctggtcatcaatgtcgtcctcttcatcctcctcttcttcctcaccactccagccatcatcatcaccaccatggacaagttcaacgtcaccaagcctgtggagtacctcaacaaccccatcatcacccagttcttccccaccctgctgctgtggtgcttctcggccctccttcccaccatcgtctactactcagccttctttgaagcccactggacacgctctggggagaacaggacaaccatgcacaagtgctacactttcctcatcttcatggtgctgctcctaccctcgctgggactgagcagcctggacctcttcttccgctggctctttgataagaaattcttggctgaggcagctattcggtttgagtgtgtgttcctgcccgacaacggcgccttcttcgtgaactacgtcattgcctcagcctttatcggcaacgccatggacctgctgcgcatcccaggcctgctcatgtacatgatccggctctgcctggcgcgctcggccgccgagaggcgcaacgtgaagcggcatcaggcctacgagttccagtttggcgcagcctacgcctggatgatgtgcgtcttcacggtggtcatgacctacagtatcacctgccccatcatcgtgcccttcgggctcatgtacatgctgctgaagcacctggtagacaggtacaatctctactacgcctacctgccggccaagctggacaagaagatccactcgggggctgtgaaccaggtggtggccgcgcccatcctctgcctcttctggctgctcttcttttccaccatgcgcacggggttcctagctcccacgtctatgttcacatttgtggtcctggtcatcaccatcgtcatctgtctctgccacgtctgctttggacacttcaaatacctcagtgcccacaactacaagattgagcacacggagacagatactgtggaccccagaagcaatggacggccccccactgctgctgctgtccccaaatctgcgaaatacatcgctcaggtgctgcaggactcagaggtggacggggatggggatggggctcctgggagctcaggggatgagcccccatcatcctcatcccaagatgaggagttgctgatgccacccgacgccctcacggacacagacttccagtcttgcgaggacagcctcatagagaatgagattcaccagtaaggggagggaggggccctggaggccacatcctgccccaccccacccccactcccacggacactaaaacgctaataatttattagatctaaagccccttcctccccagcccctgctttcattaaggtatttaaacttgggggtttcactgctctcccccatgatggagggagggagccccccaacctcagtgaggagagccccgagccggccccggggcaaagaggggtgcagagggagttcccccagatcagtaccccccacccctccccagctagtagcatgaccaggagagggttaatgagagccaagaggagtacctggtgcacctggtgccggtggctggagacctggggggcaggtggatctggggctgttcccccccctccgttttttccaccccacagttcctcctgggatctggccctccagggaagtggagcctccagcccctaggggatgcatgaggggggagggggtgctgagtgggaggaagagtcaggctcacagctggggtggcctgggggtgggggtgggcaaggctgacactggaaaatgggtttttgcactgttttttttttggtttttttgttcttttttgtttttttcctttaaaataaaaacaaagaaaagctctga

SEQ ID NO: 194300 - DNA, 3198 bp, Homo sapiens
  Payload ID: 18395
  Gene Name: transmembrane protein 63B
  Uniprot ID: Q5T3F8
  ENST ID: ENST00000323267
  CDS Start-End: 65-2563
aacccggggctccgagccggagccgagtctgcgcctgggggaggaccatgcggcagtagcagccatgctgccctttctgctggccacactgggcaccacagccctcaacaacagcaaccccaaggactactgctacagcgcccgcatccgcagcactgtcctgcagggcctgccctttgggggcgtccccaccgtgctggctctcgacttcatgtgcttccttgcactgctgttcttattctctatcctccggaaggtggcctgggactatgggcggctggccttggtgacagatgcagacaggcttcggcggcaggagagggaccgagtggaacaggaatatgtggcttcagctatgcacggggacagccatgaccggtatgagcgtctcacctctgtctccagctccgttgactttgaccaaagggacaatggtttctgttcctggctgacagccatcttcaggataaaggatgatgagatccgggacaaatgtgggggcgatgccgtgcactacctgtcctttcagcggcacatcatcgggctgctggtggttgtgggcgtcctctccgtaggcatcgtgctgcctgtcaacttctcaggggacctgctggagaacaatgcctacagctttgggagaaccaccattgccaacttgaaatcagggaacaacctgctatggctgcacacctccttcgccttcctgtatctgctgctcaccgtctacagcatgcgtagacacacctccaagatgcgctacaaggaggatgatctggtgaagcggaccctcttcatcaatggaatctccaaatatgcagagtcagaaaagatcaagaagcattttgaggaagcctaccccaactgcacagttctcgaagcccgcccgtgttacaacgtggctcgcctaatgttcctcgatgcagagaggaagaaggccgagcggggaaagctgtacttcacaaacctccagagcaaggagaacgtgcctaccatgatcaaccccaagccctgtggccacctctgctgctgtgtggtgcgaggctgtgagcaggtggaggccattgagtactacacaaagctggagcagaagctgaaggaagactacaagcgggagaaggagaaggtgaatgagaagcctcttggcatggcctttgtcaccttccacaatgagactatcaccgccatcatcctgaaggacttcaacgtgtgtaaatgccagggctgcacctgccgtggggagccacgcccctcatcctgcagcgagtccctgcacatctccaactggaccgtgtcctatgcccctgaccctcagaacatctactgggagcacctctccatccgaggcttcatctggtggctgcgctgcctggtcatcaatgtcgtcctcttcatcctcctcttcttcctcaccactccagccatcatcatcaccaccatggacaagttcaacgtcaccaagcctgtggagtacctcaacaaccccatcatcacccagttcttccccaccctgctgctgtggtgcttctcggccctccttcccaccatcgtctactactcagccttctttgaagcccactggacacgctctggggagaacaggacaaccatgcacaagtgctacactttcctcatcttcatggtgctgctcctaccctcgctgggactgagcagcctggacctcttcttccgctggctctttgataagaaattcttggctgaggcagctattcggtttgagtgtgtgttcctgcccgacaacggcgccttcttcgtgaactacgtcattgcctcagcctttatcggcaacgccatggacctgctgcgcatcccaggcctgctcatgtacatgatccggctctgcctggcgcgctcggccgccgagaggcgcaacgtgaagcggcatcaggcctacgagttccagtttggcgcagcctacgcctggatgatgtgcgtcttcacggtggtcatgacctacagtatcacctgccccatcatcgtgcccttcgggctcatgtacatgctgctgaagcacctggtagacaggtacaatctctactacgcctacctgccggccaagctggacaagaagatccactcgggggctgtgaaccaggtggtggccgcgcccatcctctgcctcttctggctgctcttcttttccaccatgcgcacggggttcctagctcccacgtctatgttcacatttgtggtcctggtcatcaccatcgtcatctgtctctgccacgtctgctttggacacttcaaatacctcagtgcccacaactacaagattgagcacacggagacagatactgtggaccccagaagcaatggacggccccccactgctgctgctgtccccaaatctgcgaaatacatcgctcaggtgctgcaggactcagaggtggacggggatggggatggggctcctgggagctcaggggatgagcccccatcatcctcatcccaagatgaggagttgctgatgccacccgacgccctcacggacacagacttccagtcttgcgaggacagcctcatagagaatgagattcaccagtaaggggagggaggggccctggaggccacatcctgccccaccccacccccactcccacggacactaaaacgctaataatttattagatctaaagccccttcctccccagcccctgctttcattaaggtatttaaacttgggggtttcactgctctcccccatgatggagggagggagccccccaacctcagtgaggagagccccgagccggccccggggcaaagaggggtgcagagggagttcccccagatcagtaccccccacccctccccagctagtagcatgaccaggagagggttaatgagagccaagaggagtacctggtgcacctggtgccggtggctggagacctggggggcaggtggatctggggctgttcccccccctccgttttttccaccccacagttcctcctgggatctggccctccagggaagtggagcctccagcccctaggggatgcatgaggggggagggggtgctgagtgggaggaagagtcaggctcacagctggggtggcctgggggtgggggtgggcaaggctgacactggaaaatgggtttttgcactgttttttttttggtttttttgttcttttttgtttttttcctttaaaataaaaacaaagaaaagctctg

SEQ ID NO: 194301 - DNA, 2921 bp, Homo sapiens
  Payload ID: 18395
  Gene Name: transmembrane protein 63B
  ENST ID: ENST00000371893
  CDS Start-End: 1-2285
tctctatcctccggaaggtggcctgggactatgggcggctggccttggtgacagatgcagacagtgtggcttcagctatgcacggggacagccatgaccggtatgagcgtctcacctctgtctccagctccgttgactttgaccaaagggacaatggtttctgttcctggctgacagccatcttcaggataaaggatgatgagatccgggacaaatgtgggggcgatgccgtgcactacctgtcctttcagcggcacatcatcgggctgctggtggttgtgggcgtcctctccgtaggcatcgtgctgcctgtcaacttctcaggggacctgctggagaacaatgcctacagctttgggagaaccaccattgccaacttgaaatcagggaacaacctgctatggctgcacacctccttcgccttcctgtatctgctgctcaccgtctacagcatgcgtagacacacctccaagatgcgctacaaggaggatgatctggtgaagcggaccctcttcatcaatggaatctccaaatatgcagagtcagaaaagatcaagaagcattttgaggaagcctaccccaactgcacagttctcgaagcccgcccgtgttacaacgtggctcgcctaatgttcctcgatgcagagaggaagaaggccgagcggggaaagctgtacttcacaaacctccagagcaaggagaacgtgcctaccatgatcaaccccaagccctgtggccacctctgctgctgtgtggtgcgaggctgtgagcaggtggaggccattgagtactacacaaagctggagcagaagctgaaggaagactacaagcgggagaaggagaaggtgaatgagaagcctcttggcatggcctttgtcaccttccacaatgagactatcaccgccatcatcctgaaggacttcaacgtgtgtaaatgccagggctgcacctgccgtggggagccacgcccctcatcctgcagcgagtccctgcacatctccaactggaccgtgtcctatgcccctgaccctcagaacatctactgggagcacctctccatccgaggcttcatctggtggctgcgctgcctggtcatcaatgtcgtcctcttcatcctcctcttcttcctcaccactccagccatcatcatcaccaccatggacaagttcaacgtcaccaagcctgtggagtacctcaacaaccccatcatcacccagttcttccccaccctgctgctgtggtgcttctcggccctccttcccaccatcgtctactactcagccttctttgaagcccactggacacgctctggggagaacaggacaaccatgcacaagtgctacactttcctcatcttcatggtgctgctcctaccctcgctgggactgagcagcctggacctcttcttccgctggctctttgataagaaattcttggctgaggcagctattcggtttgagtgtgtgttcctgcccgacaacggcgccttcttcgtgaactacgtcattgcctcagcctttatcggcaacgccatggacctgctgcgcatcccaggcctgctcatgtacatgatccggctctgcctggcgcgctcggccgccgagaggcgcaacgtgaagcggcatcaggcctacgagttccagtttggcgcagcctacgcctggatgatgtgcgtcttcacggtggtcatgacctacagtatcacctgccccatcatcgtgcccttcgggctcatgtacatgctgctgaagcacctggtagacaggtacaatctctactacgcctacctgccggccaagctggacaagaagatccactcgggggctgtgaaccaggtggtggccgcgcccatcctctgcctcttctggctgctcttcttttccaccatgcgcacggggttcctagctcccacgtctatgttcacatttgtggtcctggtcatcaccatcgtcatctgtctctgccacgtctgctttggacacttcaaatacctcagtgcccacaactacaagattgagcacacggagacagatactgtggaccccagaagcaatggacggccccccactgctgctgctgtccccaaatctgcgaaatacatcgctcaggtgctgcaggactcagaggtggacggggatggggatggggctcctgggagctcaggggatgagcccccatcatcctcatcccaagatgaggagttgctgatgccacccgacgccctcacggacacagacttccagtcttgcgaggacagcctcatagagaatgagattcaccagtaaggggagggaggggccctggaggccacatcctgccccaccccacccccactcccacggacactaaaacgctaataatttattagatctaaagccccttcctccccagcccctgctttcattaaggtatttaaacttgggggtttcactgctctcccccatgatggagggagggagccccccaacctcagtgaggagagccccgagccggccccggggcaaagaggggtgcagagggagttcccccagatcagtaccccccacccctccccagctagtagcatgaccaggagagggttaatgagagccaagaggagtacctggtgcacctggtgccggtggctggagacctggggggcaggtggatctggggctgttcccccccctccgttttttccaccccacagttcctcctgggatctggccctccagggaagtggagcctccagcccctaggggatgcatgaggggggagggggtgctgagtgggaggaagagtcaggctcacagctggggtggcctgggggtgggggtgggcaaggctgacactggaaaatgggtttttgcactgttttttttttggtttttttgttcttttttgtttttttcctttaaaataaaaacaaagaaaagctctga

SEQ ID NO: 194302 - DNA, 2465 bp, Homo sapiens
  Payload ID: 18395
  Gene Name: transmembrane protein 63B
  ENST ID: ENST00000533121
  CDS Start-End: 1-1561
caatgcctacagctttgggagaaccaccattgccaacttgaaatcagggaacaacctgctatggctgcacacctccttcgccttcctgtatctgctgctcaccgtctacagcatgcgtagacacacctccaagatgcgctacaaggaggatgatctggtgaagcggaccctcttcatcaatggaatctccaaatatgcagagtcagaaaagatcaagaagcattttgaggaagcctaccccaactgcacagttctcgaagcccgcccgtgttacaacgtggctcgcctaatgttcctcgatgcagagaggaagaaggccgagcggggaaagctgtacttcacaaacctccagagcaaggagaacgtgcctaccatgatcaaccccaagccctgtggccacctctgctgctgtgtggtgcgaggctgtgagcaggtggaggccattgagtactacacaaagctggagcagaagctgaaggaagactacaagcgggagaaggagaaggtgaatgagaagcctcttggcatggcctttgtcaccttccacaatgagactatcaccgccatcatcctgaaggacttcaacgtgtgtaaatgccagggctgcacctgccgtggggagccacgcccctcatcctgcagcgagtccctgcacatctccaactggaccgtgtcctatgcccctgaccctcagaacatctactgggagcacctctccatccgaggcttcatctggtggctgcgctgcctggtcatcaatgtcgtcctcttcatcctcctcttcttcctcaccactccagccatcatcatcaccaccatggacaagttcaacgtcaccaagcctgtggagtacctcaacaaccccatcatcacccagttcttccccaccctgctgctgtggtgcttctcggccctccttcccaccatcgtctactactcagccttctttgaagcccactggacacgctctggggagaacaggacaaccatgcacaagtgctacactttcctcatcttcatggtgctgctcctaccctcgctgggactgagcagcctggacctcttcttccgctggctctttgataagaaattcttggctgaggcagctattcggtttgagtgtgtgttcctgcccgacaacggcgccttcttcgtgaactacgtcattgcctcagcctttatcggcaacgccatggacctgctgcgcatcccaggcctgctcatgtacatgatccggctctgcctggcgcgctcggccgccgagaggcgcaacgtgaagcggcatcaggcctacgagttccagtttggcgcagcctacgcctggatgatgtgcgtcttcacggtggtcatgacctacagtatcacctgccccatcatcgtgcccttcgggctcatgtacatgctgctgaagcacctggtagacaggtacaatctctactacgcctacctgccggccaagctggacaagaagatccactcgggggctgtgaaccaggtggtggccgcgcccatcctctgcctcttctggctgctcttcttttccaccatgcgcacggattgagcacacggagacagatactgtggaccccagaagcaatggacggccccccactgctgctgctgtccccaaatctgcgaaatacatcgctcaggtgctgcaggactcagaggtggacggggatggggatggggctcctgggagctcaggggatgagcccccatcatcctcatcccaagatgaggagttgctgatgccacccgacgccctcacggacacagacttccagtcttgcgaggacagcctcatagagaatgagattcaccagtaaggggagggaggggccctggaggccacatcctgccccaccccacccccactcccacggacactaaaacgctaataatttattagatctaaagccccttcctccccagcccctgctttcattaaggtatttaaacttgggggtttcactgctctcccccatgatggagggagggagccccccaacctcagtgaggagagccccgagccggccccggggcaaagaggggtgcagagggagttcccccagatcagtaccccccacccctccccagctagtagcatgaccaggagagggttaatgagagccaagaggagtacctggtgcacctggtgccggtggctggagacctggggggcaggtggatctggggctgttcccccccctccgttttttccaccccacagttcctcctgggatctggccctccagggaagtggagcctccagcccctaggggatgcatgaggggggagggggtgctgagtgggaggaagagtcaggctcacagctggggtggcctgggggtgggggtgggcaaggctgacactggaaaatgggtttttgcactgttttttttttggtttttttgttcttttttgtttttttcctttaaaataaaaacaaagaaaagctctga

SEQ ID NO: 194303 - DNA, 616 bp, Homo sapiens
  Payload ID: 18395
  Gene Name: transmembrane protein 63B
  ENST ID: ENST00000497371
  CDS Start-End: 1-83
cctctgtctccagctccgttgactttgaccaaagggacaatggtttctgttcctggctgacagccatcttcaggataaagtgaagcggaccctcttcatcaatggaatctccaaatatgcagagtcagaaaagatcaagaagcattttgaggaagcctaccccaactgcacagttctcgaagcccgcccgtgttacaacgtggctcgcctaatgttcctcgatgcagagaggaagaaggccgagcggggaaagctgtacttcacaaacctccagagcaaggagaacgtgcctaccatgatcaaccccaagccctgtggccacctctgctgctgtgtggtgcgaggctgtgagcaggtggaggccattgagtactacacaaagctggagcagaagctgaaggaagactacaagcgggagaaggagaaggtgaatgagaagcctcttggcatggcctttgtcaccttccacaatgagactatcaccgccatcatcctgaaggacttcaacgtgtgtaaatgccagggctgcacctgccgtggggagccacgcccctcatcctgcagcgagtccctgcacatctccaactggaccgtgtcctatgcccctgaccctcag

SEQ ID NO: 194304 - DNA, 828 bp, Homo sapiens
  Payload ID: 18395
  Gene Name: transmembrane protein 63B
  ENST ID: ENST00000532634
  CDS Start-End: 150-828
atacactgccgcggccgccgcaggagcccggagctcgagccgcccagcgactccccctccccctcccccagccccgccccgccccaacccggggctccgagccggagccgagtctgcgcctgggggaggaccatgcggcagtagcagccatgctgccctttctgctggccacactgggcaccacagccctcaacaacagcaaccccaaggactactgctacagcgcccgcatccgcagcactgtcctgcagggcctgccctttgggggcgtccccaccgtgctggctctcgacttcatgtgcttccttgcactgctgttcttattctctatcctccggaaggtggcctgggactatgggcggctggccttggtgacagatgcagacaggcttcggcggcaggagagggaccgagtggaacaggaatatgtggcttcagctatgcacggggacagccatgaccggtatgagcgtctcacctctgtctccagctccgttgactttgaccaaagggacaatggtttctgttcctggctgacagccatcttcaggataaaggatgatgagatccgggacaaatgtgggggcgatgccgtgcactacctgtcctttcagcggcacatcatcgggctgctggtggttgtgggcgtcctctccgtaggcatcgtgctgcctgtcaacttctcaggggacctgctggagaacaatgcctacagctttgggagaaccaccattgccaacttgaaatcagggaacaacctgctatggctgcacacctccttcgccttcctgtatctgctgctcaccgtctacagcatgcgtagacaca

SEQ ID NO: 194305 - DNA, 5334 bp, Homo sapiens
  Payload ID: 18396
  Gene Name: transmembrane protein 63C
  Uniprot ID: Q9P1W3
  ENST ID: ENST00000298351
  CDS Start-End: 145-2565
ctgtcactgcagcctggcggcctgagcgccgagcctggggctggggccgcggtgctgaggacgcaaatcagccccgtagctgggtggagcctccgggcctgacgtggaccttcactggagaagtgactcagggatcctcccaggatgtctgcctcaccagacgacctgagtacagggggaaggttacagaacatgacagtggatgaatgcttccagtctcggaacaccgtcctccaggggcagccctttgggggtgtccccaccgtgctgtgcctcaacatcgccctgtgggtgctcgtccttgtggtttactccttcctccggaaagctgcgtgggactatgggcgcctggctctgctgatacacaatgacagcctgacctcgctgatctatggggagcagagcgagaagacatctccctcggagacttccttggagatggaacgcagagacaagggattctgttcctggttcttcaacagcataacaatgaaggacgaggatctgattaacaagtgtggggacgacgcgcgcatctacatcgtgttccagtaccacctcatcatctttgtgctcatcatctgtatcccctccctgggcatcattttgcccatcaactatactggatctgttctggactggagcagtcactttgctcggaccaccattgtcaatgtctccacagagagcaagctcctgtggctgcatagcctgctgtccttcttctacttcatcaccaacttcatgttcatggctcatcactgcctggggtttgcacccaggaatagccaaaaggtcacaaggacactaatgatcacctatgtgcccaaggacattgaagacccagaactcatcattaagcattttcacgaggcctatccaggcagtgtcgtgacaagagtccacttctgctacgacgtcaggaacctgatcgacttggacgatcagaggcgccatgccatgcggggccggcttttctatacagccaaggccaagaagactgggaaggtgatgatcaggatccacccctgtgcccgcctgtgcttctgcaagtgctggacctgcttcaaggaggtggatgcagagcagtattacagcgagctagaggagcagctaacggacgagttcaacgccgagctcaaccgcgtgccgctcaagcggctggacctgatctttgtcaccttccaggactccaggatggccaagcgtgtccgtaaggattacaagtatgtccagtgtggtgtgcaaccccagcagtcctcagtgaccaccatcgtcaaatcatattactggagggtcactatggccccacaccccaaagacattatttggaaacacctgtctgtccgccgcttcttttggtgggcccgctttatcgcaatcaacaccttcctcttcttcctcttcttctttctcaccacgcctgccatcatcatgaacactatcgacatgtacaacgtcacccgccccatcgagaagctgcagaacccaattgtgacccagttcttcccctctgtgatgctctggggcttcacagtgatactgcctctgattgtctacttctccgccttcctcgaggcccactggaccagatcaagtcagaatctggtcatggtgcacaagtgctacatctttctggtgttcatggtagtcattctgccctctatgggactgaccagtttggatgtctttctccgctggctctttgacatctactatctagagcaagcatccatcaggttccagtgtgtgttcctgccagacaacggcgccttctttgtcaactacgtgatcacggcagctttacttggcacaggcatggagctgctgcgtctggggtcactcttctgctacagcacccgcctcttcttctctagatcagagccagagagagtcaacatcagaaagaaccaggccatagacttccagtttgggcgtgagtatgcgtggatgatgaacgtgttcagcgtggtgatggcgtacagcatcacttgccccatcattgtgccttttgggttgctctacctgtgcatgaagcacttgacggatcgctataacatgtactactcctttgcacccaccaaactgaacgagcagatccacatggctgccgtctcccaggccatctttgcgccactcttgggtctgttctggatgctgttcttctccatcctgcggttgggttctctccacgccatcaccatcttttccctgtccaccctcctcattgccatggtgattgcctttgttggcatttttctggggaagcttcggatggttgccgactacgagcccgaggaggaggagatccagacagtgtttgacatggagccaagcagcacctcctccacgcccacctccctcctgtatgtggccaccgtgctgcaagaaccggagttgaatctgacccccgcctcctccccagccaggcacacctatggcaccatgaacaaccagccggaagagggagaagaagagagtggtctgaggggctttgcgagggagctagactcggcccagttccaggaagggctggaactggagggccagaaccagtaccactgaccgggacctgaggcctccactggcgacttgttgaggggtcaggggagggcctggcaaggggaggcaggagggtggcctggacctccccactacctcctgcagactttgagaagcccacagtggagacatccaccaccccagccatgggccatacgggggtcctgacctgctgcccggctggaactgggggtgctcggcagtgctgaaggagcctgggaagggatgggaggatacaggcaagcacatgtcttgagagaggtggctggagccccggcacagagactgaacgctggggtcccttcctgggaccaagatggagaaggtgttcctaagggaggagacagaaggaggctgccgaaggctctgtggggtcatcaccactctgcatcagctgcccttccaaggagcttctgctgctgctcctcctcccagccccggcccattcctcccctgcagtctgaggaggcaaaggtatgtgcacggggcacattgacaggacacggaggaccacctcatcacagggttccctgcatggggatctgtaaagagaaagtttctgcacccaccagagcaagagccaactgaaagcgtagacctgagaagaggtaactcagccccttcctgctcctctgccctcatcagatgtccccaggagcagcagggcagaggcccttctttctattcttacaagggtagctagagcgtgatcactcagggctcatcaaatgagactcgtgtgcatttttcagaaggaaaccttggttagtccttgctgggtaacacaaagtggggtgagacgacagaagccgaattcatggaaggggggtcttctccccaaaactctgtgtggtgggaaaccagctatacctccccaagccccagggcctaaagagaagacccccgaagccaaagatgtggccacttaaaagcgtctcctgcctcctacccaactgagtgcctgggcccccagcttggccaagatgggcagtacgttagggtaagaaccccatgcttcaaacttaaggactgaccatcacctgcgtcccaagtaggacccttcctcccttctcggggctgcccctgcaccctgccttgaagaccacccaagcggcctccagtgtgggcctggtccagacattgcagatgcttcaaccgtgatgtcgccccaggcctgccaggggtgtggtggaggggaaggccacgtgctccagggagaagccctttctggagaagcaaggctgtcctcccagggctgccactaccagagacctgggggagctgaattccgaacagtgatggtgacactcagcacctttgccacagccggggggaaccggcttctgcctctgggatgggctctcatcaggaccaccgtgcagcccagccagggaggacatgagaagggccagtgggggcctcaatgaaccagaacaagccaagctgaatggggtctgtgtgctccagggccctcttcagccccctcccccaaaggtctgggtccctgccaccaacctactgaaggccggcccccggctcacctcacctgagcacctgcaccaggccccaggcacatggctgccctgaactcagatcacctagaccttgtccctgccccacctttgccccatcctagccccagaagctccaagcttcaccgcaggtgagaaattgtgctcaatgggcagaaactgctatacccccagggcatggcccacattttggcatgagggtgtctttccagagagcttgggttggctggagagaggctgtctttcccattccttgtccagctaggaataaaggggaaatggtcctagcctggcccctacacacccaggtcccacaggccccctccccactggaatttcaccaaccaacaaggggaaagtacgctgttacagcatagcggtcaggcccagcaggagcttggcacatgatggggaggtggccagctccaggccctgcccgaccccatcatgtgtatttggtgtatggggtgtggggggtcacaccagaagctggcctggggtctcttctttgctggacacagctccctggcccctgcccccagcccctgcagcccctgccggactgtggaagccacatatgggaaaagtcctggcagacaatgtggcgggatgactgggggcttctccctctgaacctgggtccagtgtagcctggctctgagagaaggtggtgagcatgtggagaaggttccatagtccactcttaggggaaccagcaaagcctcatggcagttggctccatctggacctcccatggtcactacaggatggtggagcagggggcatcttttagcctccccccgccaccacatccaggccctctcaggcacctcctgcctcagcccacacctgcctcacccattgcccccctccccccacctactgccatcccactcctctgccagccacttcccagccgccccaccccactccatccaccaaatcacctcctgacttaatcctttctggaaggagctgccgcccaggaaccggtattgcctagagcctccaggaggggccctcctcaggcctccagtggccccatgcccacctgcctgaccctccactgcccctggaagcaaagtgcctatcagcagcgttgcgtcctctggggcccccggtcgggggggagggggtgtgggctaaccttggccaccaccacaaaaggaatgtgccagaatgctgaaccttcttgttaatgctatgaccgtgccttgaataaacaagtcctcccaacctc

SEQ ID NO: 194306 - DNA, 582 bp, Homo sapiens
  Payload ID: 18396
  Gene Name: transmembrane protein 63C
  ENST ID: ENST00000557408
  CDS Start-End: 512-582
agtaaaagatgatgaaagccactatcaatcctcactgctgagtggcagggagaagcagcaccactctcagctcttttctaatcttgtaacttagtgctagaagtctctccaggctattaccatgggcatttgttctctgttggagctgtaagcagatgaacccaagtagagaagatagatcttggaaggagagatccattgagtccagaagccagatcagcaaatggaggaacctcggaggtgaccagaaagatctccatcggttgcccaaggctagccttggaggagcctccctcggggtcaggaatcgagcggggacaccgctgggccactcagaaggaccgtttcctggggactgatcaagaggagggaaggtcctattacagcccagaggccacgtggggcctgagccccaaacctcagctgctgttccagcagccccgtagctgggtggagcctccgggcctgacgtggaccttcactggagaagtgactcagggatcctcccaggatgtctgcctcaccagacgacctgagtacagggggaaggttacagaacatgacagtggatgaatgcttcca

SEQ ID NO: 194307 - DNA, 457 bp, Homo sapiens
  Payload ID: 18396
  Gene Name: transmembrane protein 63C
  ENST ID: ENST00000554346
  CDS Start-End: 308-457
ctgtcactgcagcctggcggcctgagcgccgagcctggggctggggccgcggtgctgaggacgcaaatgtgagccttggaggagcctccctcggggtcaggaatcgagcggggacaccgctgggccactcagaaggaccgtttcctggggactgatcaagaggagggaaggtcctattacagcccagaggccacgtggggcctgagccccaaacctcagctgctgttccagcagccccgtagctgggtggagcctccgggcctgacgtggaccttcactggagaagtgactcagggatcctcccaggatgtctgcctcaccagacgacctgagtacagggggaaggttacagaacatgacagtggatgaatgcttccagtctcggaacaccgtcctccaggggcagccctttgggggtgtccccaccgtgctgtgcctcaacatcgccctgtgggtg

SEQ ID NO: 194308 - DNA, 515 bp, Homo sapiens
  Payload ID: 18396
  Gene Name: transmembrane protein 63C
  ENST ID: ENST00000555338
  CDS Start-End: 362-515
aatatcattcagtgatagtggcggtggataacaatgacctcctaccagctgtgaatttctcgtcttccactagtactagtaaaagagattgctgctggctaagaatacccaccggtggggtcttgagccttggaggagcctccctcggggtcaggaatcgagcggggacaccgctgggccactcagaaggaccgtttcctggggactgatcaagaggagggaaggtcctattacagcccagaggccacgtggggcctgagccccaaacctcagctgctgttccagcagccccgtagctgggtggagcctccgggcctgacgtggaccttcactggagaagtgactcagggatcctcccaggatgtctgcctcaccagacgacctgagtacagggggaaggttacagaacatgacagtggatgaatgcttccagtctcggaacaccgtcctccaggggcagccctttgggggtgtccccaccgtgctgtgcctcaacatcgccctgtgggtgctcg

SEQ ID NO: 194309 - DNA, 527 bp, Homo sapiens
  Payload ID: 18396
  Gene Name: transmembrane protein 63C
  ENST ID: ENST00000556514
  CDS Start-End: 419-527
atcattcagtgatagtggcggtggataacaatgacctcctaccagctgtgaatttctcgtcttccactagtactagtaaaagagattgctgctggctaagaatacccaccggtggggtcttgagccttggaggagcctccctcggggtcaggaatcgagcggggacaccgctgggccactcagaaggaccgtttcctggggactgatcaagaggagggaaggtcctattacagcccagaggccacgtggggcctgagccccaaacctcagctgctgttccagatatgggaactgaggctgagacagatgaagtcactgcccctggtcacacagctagcaaagcagccccgtagctgggtggagcctccgggcctgacgtggaccttcactggagaagtgactcagggatcctcccaggatgtctgcctcaccagacgacctgagtacagggggaaggttacagaacatgacagtggatgaatgcttccagtctcggaacaccgtcctccaggggcagccctttgggg

SEQ ID NO: 194310 - DNA, 1004 bp, Homo sapiens
  Payload ID: 18396
  Gene Name: transmembrane protein 63C
  ENST ID: ENST00000554766
  CDS Start-End: 512-1004
tgccagcctgggttccccggcaggtcagagaagctttggggcggggccaaggttggcccctgcttgggaggagccgggatgcctctctcacagtgatgcagagaggaatttgctgacagtcccttgccaggtggggctggcttcgcccagccggcgaggaggaggacccgctggcagtctcctcccaggtggggagcgtggagcctgtcactgcagcctggcggcctgagcgccgagcctggggctggggccgcggtgctgaggacgcaaatgtgagccttggaggagcctccctcggggtcaggaatcgagcggggacaccgctgggccactcagaaggaccgtttcctggggactgatcaagaggagggaaggtcctattacagcccagaggccacgtggggcctgagccccaaacctcagctgctgttccagcagccccgtagctgggtggagcctccgggcctgacgtggaccttcactggagaagtgactcagggatcctcccaggatgtctgcctcaccagacgacctgagtacagggggaaggttacagaacatgacagtggatgaatgcttccagtctcggaacaccgtcctccaggggcagccctttgggggtgtccccaccgtgctgtgcctcaacatcgccctgtgggtgctcgtccttgtggtttactccttcctccggaaagctgcgtgggactatgggcgcctggctctgctgatacacaatgacagcctgacctcgctgatctatggggagcagagcgagaagacatctccctcggagacttccttggagatggaacgcagagacaagggattctgttcctggttcttcaacagcataacaatgaaggacgaggatctgattaacaagtgtggggacgacgcgcgcatctacatcgtgttccagtaccacctcatcatctttgtgctcatcatctgtatcccctccctgggcatcattttgcccatcaactatactggatctgttctgg

SEQ ID NO: 194311 - DNA, 1174 bp, Homo sapiens
  Payload ID: 18397
  Gene Name: transmembrane protein 64
  ENST ID: ENST00000422900
  CDS Start-End: 1-594
ctgtgcttcgcttccctggccctggtccgccgctaccttcaccacctcctgctgtgggtggagagccttgactcgctgctgggggtcctgctcttcgtcgtgggcttcatcgtggtctctttcccctgcggctggggctacatcgtgctcaacgtggccgctggctacctgtacggcttcgtgctgggcatgggtctgatgatggtgggcgtcctcatcggcaccttcatcgcccatgtggtctgcaagcggctcctcaccgcctgggtggccgccaggatccagagcagcgagaagctgagcgcggttattcgcgtagtggagggaggaagcggcctgaaagtggtggcgctggccagactgacacccataccttttgggcttcagaatgcagtgttttcgattattataagtataggcctcatgttttatgtagttcatcgagctcaagtggaattgaatgcagctattgtagcttgtgaaatggaactgaaatcttctctggttaaaggcaatcaaccaaataccagtggctcttcattctacaacaagaggaccctaacattttctggaggtggaatcaatgttgtatgattctaatgagatacgtgattgtcaagagcctagtgtgctatctaaggtctagcagtcacttcactagtgggcagagacaagttctaattgtattacagcacaaacaaaactgactagtttttaaattgcacaattttttttttttaaagcaagaatcattttctgggtatgtaagtgtaaatgtagatgcaaatttggctgcacctctttatcatgcctgtattggcctataggtctgcactttagtgttttttaattgttttatttctgtgtatttacgaacagagaaataacccaaatattatttctgcttagtgtctttatttataaagcccatgagtagtttgtatgcatctttcctacttgtaaagatgagtaaaagtatgcagttttaaatttataatattattggatgttctttgctttggtagtctttccagaaaggataaacagtggtttttgttttgttttgttttattgtttaagtgggaccacttagcttcccgtttccttactagttaaagaacagacattaattttcagttgaatgtatttttgcaggcatcatattgttacaggg

SEQ ID NO: 194312 - DNA, 4663 bp, Homo sapiens
  Payload ID: 18397
  Gene Name: transmembrane protein 64
  Uniprot ID: Q6YI46
  ENST ID: ENST00000418210
  CDS Start-End: 1-987
atgcggagcccgggcgggatcctgctccaggcgctgccccggctgctgcagcacgccgccctcccgggcctcgccgagctgccggcccgctgggccctgccgcggggtgcgggcggggacggcccggcggaccgccttccccgcgggggcggggcgagcgcggcggcggcagcagcggcggcctcgggcgccctgctcggcgcctatctggagcgccacggtccgcccgaggcttcggagctgccggagccgggcggggccttggcgggcggccccgggagtggcggcggcggcgtggtggtcggcgtggctgaggtgagaaactggcgctgctgctgcctcggcagcacctgttggtgccggagcctcgtgctggtctgcgtgttggccgccctgtgcttcgcttccctggccctggtccgccgctaccttcaccacctcctgctgtgggtggagagccttgactcgctgctgggggtcctgctcttcgtcgtgggcttcatcgtggtctctttcccctgcggctggggctacatcgtgctcaacgtggccgctggctacctgtacggcttcgtgctgggcatgggtctgatgatggtgggcgtcctcatcggcaccttcatcgcccatgtggtctgcaagcggctcctcaccgcctgggtggccgccaggatccagagcagcgagaagctgagcgcggttattcgcgtagtggagggaggaagcggcctgaaagtggtggcgctggccagactgacacccataccttttgggcttcagaatgcagtgttttcgattattataagtataggcctcatgttttatgtagttcatcgagctcaagtggaattgaatgcagctattgtagcttgtgaaatggaactgaaatcttctctggttaaaggcaatcaaccaaataccagtggctcttcattctacaacaagaggaccctaacattttctggaggtggaatcaatgttgtatgattctaatgagatacgtgattgtcaagagcctagtgtgctatctaaggtctagcagtcacttcactagtgggcagagacaagttctaattgtattacagcacaaacaaaactgactagtttttaaattgcacaattttttttttttaaagcaagaatcattttctgggtatgtaagtgtaaatgtagatgcaaatttggctgcacctctttatcatgcctgtattggcctataggtctgcactttagtgttttttaattgttttatttctgtgtatttacgaacagagaaataacccaaatattatttctgcttagtgtctttatttataaagcccatgagtagtttgtatgcatctttcctacttgtaaagatgagtaaaagtatgcagttttaaatttataatattattggatgttctttgctttggtagtctttccagaaaggataaacagtggtttttgttttgttttgttttattgtttaagtgggaccacttagcttcccgtttccttactagttaaagaacagacattaattttcagttgaatgtatttttgcaggcatcatattgttacagggccatttacacctattcacaaagcttaaatcctaccttgtgggactgaagtgctcttaatataactgtttattttcactgtgtaatatgcaaagcaaaagggaaattatttggtggatggtagctcaaaattggaactcttgttctaattcagttacattggctttaccctccttagatttttcatcaaagggctgtcccattgcaatcttactaaaacattttgttaaaataaactcttttcctttttatattaataattaggcttttaaataaagatgttattcctttaaaatggtgggcttaccatcattgaagatgtcactcaggtggccttgtttgatcaaaacgccttttttaaaaaccaagctttaaaaacatgtttataatttcatgaagtacatatatattgttcccatagtcttcagctttaaaactataaatatgcccaaattttgttatttgccctactttaagtaggtttattgtgtttgttttttcagtacttgtttttctctgataagactcaggaattctgaaatgtgaaattgtctcaattctttctcttgtagcatgaatcaaatgtatttattaatagcacttatgactatagaatataatttggcatatgattcatattacatatgtattcgttttatttttaaaatagtttataaacttaatgatttttttttacaaatgaggttatagatattaatgcaaattttctggtaggtatctctttttttgctatgatgattccaacttatcagagacctcccatttgccttttcattacggtgaaagctttgccctcatctactaaagtacaaaggaattctttggaagcagattattctagtcttatgctagagatgaatttgatcattttaatgtgtgatctttttgctctatcaggtataattgttttcctttcctttataatgggtaagttttctcacctttgagtaacagtaaagttcatttatatgtccatacctagaagaccagtgcaaatactttgagagcacctgggtctacaggacataattggcatctaaatcctcatttcttgctattagtaggaaaacagatatagtattgtaatacccttattctttttgaatcctaattactcatttcggttttttttctctcttttgaatctagttgctggttttcgtttaatgattttagtttaacaatcccaaccaacaatacatttgatttatttttttctgtctaacctgacaacctttttcttgtgcttcttgtttgttggttagtttttgtgaaaggaatcattgtttaagatcactgttttcatacttgttttacacttcacgtattttgaagtacatttatttactaagcatttgtgacttgaataatttcaccaaatgaatacattttggtagtttgtaatgagttcttctaattgttacactttgcttggtacttaacaataaatatgtaaaggtaaaagaaataattttctgtattctgccaatcttaattttatataataaatcatccatttttttcttaaaatagtatggattgactgtttctaaaataccaatctgtggctgtggtttttcttttcttcagcatttccagcatccaagtaaacaatagtcccttatagtcctgctacttgatgggtaaatttggttgctgggtttttaagttgcactcacaataaatcgtgcaaagcattgtcatgccttatttactccatttttaatcctgcatcccagatttatggcagcaacacatatctacaggatacttttatgttgtccaaatattgctgtcagtcatatgtacttataaaatgtctccactcatgtatatttatagaaatgaaatgtcaaatttctcagactgttaaagtgcagtataaagttgcttaatgcacacttaaaaatgatatataatttctgaatcctatgaaatatgtgttcttttttaattctttgggagttttcttaagttttacatgttttttggtttattgttaatgattttgtttactctttgccaaattttgtcatgtaggttattttacaatagcacctttaaaaaaaatgtatatgctaatttactaagcatattcatgtccatttttatttgatcatctgatttgtgaaataacttgaaatttgtactgtttggtttgtgaaaataatattaccaaatctctgtcattagaatgtgtactttatgttcagaagtgactgtgggtttattcagagccagccattctctcccttgatgcactttgtaaccagctacacatgcttttaggtggcttttccctgatagggtcaagtatatgactataaaacatttttcttgtgaagctattaagttcattagttactcttatttccccttgttgtaactaagtggtgcaggtataagcatatccccagcattcctgtgtgtgtgaatgtgcactgctgatttggactgttcttgagaaaggtgctgtgacatatgtcaatatttgttagctctggggatatctttagaatgcttgagaaagttgctaggtgtgtgccacattggtgcaggtaaatccatgctgttcacagccaagcagcatttgcagagaaaaggagagttttacatagaccccaggaaaaacagtactaacctggttgatggccttggtggtggaattttgtttcagccagaggctactcattatatcagaatgatgttcagtataacactatctgatttttagattggtcgatttctgttgtaatcaagtatttaggatgtaatctttttaaagtcattgctttaatctgaaaagccattagaagggagaggaatcactgttccacaggatatttaaaactcaggagttcaaataacctcacatattgaacataaactgttaacttattccacaactaaattctaacctgatacttatgaattgcaaagtgattgctgcaaactttttctaaggtggctgaagatttaaaatagatcattctaaagggaaatcagtaaaatgtcttgataattggtatccaaatcacttgtgtgcctgagaaaataaaaggtaatattttactttc

SEQ ID NO: 194313 - DNA, 4997 bp, Homo sapiens
  Payload ID: 18397
  Gene Name: transmembrane protein 64
  Uniprot ID: Q6YI46
  ENST ID: ENST00000458549
  CDS Start-End: 179-1321
actccccgcctggccgtcgctcctccgctgactccgcgcccttctacgggccgtctcccaccctctgagcggacgcagggagtcgatgccgggcgaaccgggcgccatgaagggcagctgcctaacgggcgccgcggcggaggggctggccggctgagggcccgcgctgggccgaggcatgcggagcccgggcgggatcctgctccaggcgctgccccggctgctgcagcacgccgccctcccgggcctcgccgagctgccggcccgctgggccctgccgcggggtgcgggcggggacggcccggcggaccgccttccccgcgggggcggggcgagcgcggcggcggcagcagcggcggcctcgggcgccctgctcggcgcctatctggagcgccacggtccgcccgaggcttcggagctgccggagccgggcggggccttggcgggcggccccgggagtggcggcggcggcgtggtggtcggcgtggctgaggtgagaaactggcgctgctgctgcctcggcagcacctgttggtgccggagcctcgtgctggtctgcgtgttggccgccctgtgcttcgcttccctggccctggtccgccgctaccttcaccacctcctgctgtgggtggagagccttgactcgctgctgggggtcctgctcttcgtcgtgggcttcatcgtggtctctttcccctgcggctggggctacatcgtgctcaacgtggccgctggctacctgtacggcttcgtgctgggcatgggtctgatgatggtgggcgtcctcatcggcaccttcatcgcccatgtggtctgcaagcggctcctcaccgcctgggtggccgccaggatccagagcagcgagaagctgagcgcggttattcgcgtagtggagggaggaagcggcctgaaagtggtggcgctggccagactgacacccataccttttgggcttcagaatgcagtgttttcgattactgatctctcattacccaactatctgatggcatcttcggttggactgcttcctacccagcttctgaattcttacttgggtaccaccctgcggacaatggaagatgtcattgcagaacagagtgttagtggatattttgttttttgtttacagattattataagtataggcctcatgttttatgtagttcatcgagctcaagtggaattgaatgcagctattgtagcttgtgaaatggaactgaaatcttctctggttaaaggcaatcaaccaaataccagtggctcttcattctacaacaagaggaccctaacattttctggaggtggaatcaatgttgtatgattctaatgagatacgtgattgtcaagagcctagtgtgctatctaaggtctagcagtcacttcactagtgggcagagacaagttctaattgtattacagcacaaacaaaactgactagtttttaaattgcacaattttttttttttaaagcaagaatcattttctgggtatgtaagtgtaaatgtagatgcaaatttggctgcacctctttatcatgcctgtattggcctataggtctgcactttagtgttttttaattgttttatttctgtgtatttacgaacagagaaataacccaaatattatttctgcttagtgtctttatttataaagcccatgagtagtttgtatgcatctttcctacttgtaaagatgagtaaaagtatgcagttttaaatttataatattattggatgttctttgctttggtagtctttccagaaaggataaacagtggtttttgttttgttttgttttattgtttaagtgggaccacttagcttcccgtttccttactagttaaagaacagacattaattttcagttgaatgtatttttgcaggcatcatattgttacagggccatttacacctattcacaaagcttaaatcctaccttgtgggactgaagtgctcttaatataactgtttattttcactgtgtaatatgcaaagcaaaagggaaattatttggtggatggtagctcaaaattggaactcttgttctaattcagttacattggctttaccctccttagatttttcatcaaagggctgtcccattgcaatcttactaaaacattttgttaaaataaactcttttcctttttatattaataattaggcttttaaataaagatgttattcctttaaaatggtgggcttaccatcattgaagatgtcactcaggtggccttgtttgatcaaaacgccttttttaaaaaccaagctttaaaaacatgtttataatttcatgaagtacatatatattgttcccatagtcttcagctttaaaactataaatatgcccaaattttgttatttgccctactttaagtaggtttattgtgtttgttttttcagtacttgtttttctctgataagactcaggaattctgaaatgtgaaattgtctcaattctttctcttgtagcatgaatcaaatgtatttattaatagcacttatgactatagaatataatttggcatatgattcatattacatatgtattcgttttatttttaaaatagtttataaacttaatgatttttttttacaaatgaggttatagatattaatgcaaattttctggtaggtatctctttttttgctatgatgattccaacttatcagagacctcccatttgccttttcattacggtgaaagctttgccctcatctactaaagtacaaaggaattctttggaagcagattattctagtcttatgctagagatgaatttgatcattttaatgtgtgatctttttgctctatcaggtataattgttttcctttcctttataatgggtaagttttctcacctttgagtaacagtaaagttcatttatatgtccatacctagaagaccagtgcaaatactttgagagcacctgggtctacaggacataattggcatctaaatcctcatttcttgctattagtaggaaaacagatatagtattgtaatacccttattctttttgaatcctaattactcatttcggttttttttctctcttttgaatctagttgctggttttcgtttaatgattttagtttaacaatcccaaccaacaatacatttgatttatttttttctgtctaacctgacaacctttttcttgtgcttcttgtttgttggttagtttttgtgaaaggaatcattgtttaagatcactgttttcatacttgttttacacttcacgtattttgaagtacatttatttactaagcatttgtgacttgaataatttcaccaaatgaatacattttggtagtttgtaatgagttcttctaattgttacactttgcttggtacttaacaataaatatgtaaaggtaaaagaaataattttctgtattctgccaatcttaattttatataataaatcatccatttttttcttaaaatagtatggattgactgtttctaaaataccaatctgtggctgtggtttttcttttcttcagcatttccagcatccaagtaaacaatagtcccttatagtcctgctacttgatgggtaaatttggttgctgggtttttaagttgcactcacaataaatcgtgcaaagcattgtcatgccttatttactccatttttaatcctgcatcccagatttatggcagcaacacatatctacaggatacttttatgttgtccaaatattgctgtcagtcatatgtacttataaaatgtctccactcatgtatatttatagaaatgaaatgtcaaatttctcagactgttaaagtgcagtataaagttgcttaatgcacacttaaaaatgatatataatttctgaatcctatgaaatatgtgttcttttttaattctttgggagttttcttaagttttacatgttttttggtttattgttaatgattttgtttactctttgccaaattttgtcatgtaggttattttacaatagcacctttaaaaaaaatgtatatgctaatttactaagcatattcatgtccatttttatttgatcatctgatttgtgaaataacttgaaatttgtactgtttggtttgtgaaaataatattaccaaatctctgtcattagaatgtgtactttatgttcagaagtgactgtgggtttattcagagccagccattctctcccttgatgcactttgtaaccagctacacatgcttttaggtggcttttccctgatagggtcaagtatatgactataaaacatttttcttgtgaagctattaagttcattagttactcttatttccccttgttgtaactaagtggtgcaggtataagcatatccccagcattcctgtgtgtgtgaatgtgcactgctgatttggactgttcttgagaaaggtgctgtgacatatgtcaatatttgttagctctggggatatctttagaatgcttgagaaagttgctaggtgtgtgccacattggtgcaggtaaatccatgctgttcacagccaagcagcatttgcagagaaaaggagagttttacatagaccccaggaaaaacagtactaacctggttgatggccttggtggtggaattttgtttcagccagaggctactcattatatcagaatgatgttcagtataacactatctgatttttagattggtcgatttctgttgtaatcaagtatttaggatgtaatctttttaaagtcattgctttaatctgaaaagccattagaagggagaggaatcactgttccacaggatatttaaaactcaggagttcaaataacctcacatattgaacataaactgttaacttattccacaactaaattctaacctgatacttatgaattgcaaagtgattgctgcaaactttttctaaggtggctgaagatttaaaatagatcattctaaagggaaatcagtaaaatgtcttgataattggtatccaaatcacttgtgtgcctgagaaaataaaaggtaatattttactttc

SEQ ID NO: 194314 - DNA, 873 bp, Homo sapiens
  Payload ID: 18397
  Gene Name: transmembrane protein 64
  Uniprot ID: Q6YI46
  ENST ID: ENST00000519519
  CDS Start-End: 514-873
tgtcatccccgcacgtagcaacgcgcggaggggagcgggctctgcccccggcacggccatcggccacggctggagatagcctggggacccctaccagccccacgacggccccaagtgcagggatggaggagggcgtccggacagagagaagggacgaatggcagggcgtttgtcctgagcagccaaagcgcaagctatctcagctcagttcagaacccttgctggagaggtggtgcagtcatttggaggaaagaagaactctggctttttgaattaattcatgaaagctgagcaaattaaagatgagtctttaaagataacacaaaaagttcccagccaagatggacgaataggaacaactctggtctgcagttcccagtgagaccaatgcagaaggaggaggatgaagctcagaaagttcagttgacctgagaaaagtcacacagacagtgactagcaaaactgcaagcggactaatacttacctgattcgaagtctcctgatggttttgctatgcctccacgtattactgatctctcattacccaactatctgatggcatcttcggttggactgcttcctacccagcttctgaattcttacttgggtaccaccctgcggacaatggaagatgtcattgcagaacagagtgttagtggatattttgttttttgtttacagattattataagtataggcctcatgttttatgtagttcatcgagctcaagtggaattgaatgcagctattgtagcttgtgaaatggaactgaaatcttctctggttaaaggcaatcaaccaaataccagtggctcttcattctacaacaagaggaccctaacattttctggaggtggaatcaatgttgtatga

SEQ ID NO: 194315 - DNA, 587 bp, Homo sapiens
  Payload ID: 18397
  Gene Name: transmembrane protein 64
  ENST ID: ENST00000521852
  CDS Start-End: 434-587
atgtcatccccgcacgtagcaacgcgcggaggggagcgggctctgcccccggcacggccatcggccacggctggagatagcctggggacccctaccagccccacgacggccccaagtgcagggatggaggagggcgtccggacagagagaagggacgaatggcagggcgtttgtcctgagcagccaaagcgcaagaattcatgaaagctgagcaaattaaagatgagtctttaaagataacacaaaaagttcccagccaagatggacgaataggaacaactctggtctgcagttcccagtgagaccaatgcagaaggaggaggatgaagctcagaaagttcagttgacctgagaaaagtcacacagacagtgactagcaaaactgcaagcggactaatacttacctgattcgaagtctcctgatggttttgctatgcctccacgtattactgatctctcattacccaactatctgatggcatcttcggttggactgcttcctacccagcttctgaattcttacttgggtaccaccctgcggacaatggaagatgtcattgcagaacagagtgttagtggatattttg

SEQ ID NO: 194316 - DNA, 9029 bp, Homo sapiens
  Payload ID: 18398
  Gene Name: transmembrane protein 65
  Uniprot ID: Q6PI78
  ENST ID: ENST00000297632
  CDS Start-End: 536-1258
gccgctaggggtagcggcggcggcggcggctgcggctcgggagcgcggctgctttgagggctcgggaaccttacagagtggggacgtggggaggctagagggtgagaaagctggcgggagagtagggcggcgctggaggagggcggtgcgtggctgactcatcctctggaagatcagactgacagagacacacactagcccgccccgcccgcccgcgccgctcctcctcagccgggaggcgcccgcccgcaccgaccgcccgccctctccgggcgctgtccgggcccggccgtctcagagaaagtttttcccatcggaggggcgggagccgccgcgggccttttggaaaggaagtggggacggaacaggaggcgagagccgcgcgggcccgcggagtgcatggtgcccggcgcctcggctgcctggcaggaggacctcggggcggggtcgagctgagcccagctccttctcgcctcagccgcgccagaaaccgccttgccggacggccgcgggggtcccagctcctcagctcgccatgtcccggctgctgccgctgctgaggagccggaccgcgcgcagcctgaggccgggcccggccgccgccgccgcgccccgcccgccgtcctggtgctgctgcgggcgggggctgctggcgctcgcgccccccggcggcttgccgggcggccccaggcggctgggcacgcaccccaagaaggagcccatggaggcgctgaacacggcgcagggcgcgcgcgacttcatctacagcctgcactccacggagaggagctgcctgctcaaagagctgcaccgcttcgagtctattgccattgcccaagaaaaattggaagctccaccacccaccccaggacagctgagatatgtattcatccacaatgcgatacctttcatagggtttggctttttggataatgcaattatgattgttgctggaacccatattgaaatgtctattggaattattttgggaatttcaactatggcagctgctgctttgggaaatcttgtgtcagatctagctggacttggacttgcaggctacgttgaagcattggcttccaggttaggcctgtcaattcctgatctcacaccaaagcaagttgacatgtggcaaacacgtcttagtacacatttgggcaaagctgttggggtgactattggctgcattctaggaatgtttcctttaattttctttggaggaggtgaagaagatgaaaaactggaaacgaaaagttaatcctcttagaatacctataaaaagatgtaaactaatgtacctcagtaattaaatatgctgtcacaacatttaggaattaagacagtaacagtatagatatgggatcaaataatttagcatgtattatggaaaacactaacttattgtggcttgatcttcttaggacatcttttttaaaaagctgtttagtatcattttgtgtatattgttgaaatgctttttcatcaatagcagtcaacattttatcctttctttttatattcataatgttatttaagtgtcattgatgtactgtattgacttggggtttgcttatttgttacttaacatgtgtacatgcatgaaagcatttttcgttgttccctgatagttacatttcaaccttgggatttttccaaattacttaagatgtttaatgtcagttaaagatttttttaccctctttttgggaacatcaattttgtactgttatgcagtaaacatttataataatataatttcagtcatttcttaactgtcacatctattgaaaatggatatagatacaggttttaagtattttaagtatatattacttattttaattttctgactttactattttaagggccagagggttaatcacaaagagcaattatgtggtctccctgctacatgaaaccgtgtatactaacaagcgtacaatttttagttgattttttttaaccttttagtttcccagttttgaataattacatggtggattctgacttttgaggggaagcaaatgattattttagagtctttgaaatggggattgtggaattagattgaactaagggatttaacatgatgcttggaaattaagagactaaagctttttttaaaaaaaggtggaaaataggaactgtcaagaaggtttatggtataaatgatgaagttgaagtgatgtttgaaagattaatgagatacaatttatattatttggtaaggtttttttttttccctccaaagatgtcatcttctcatctgaatggaataagtctgaataccccatattcatactcctaatctcattatatcttatttagtgaattttatttatgaataatttctgttgaagtgaaaactagatatttaatattttgcttttttgctacatagtctactcaaaaattacatgaggagaaatcctttttccctttgtttttcttttttcttcttttgtggtatttaaagcatattttaggttgaagttacttatttctagtcttgtacttctggcttaagtataaccatgtaagaattataaattttagttttctgaacccttaaacttttttagcatgtggtctgttacacatgctaaaaaattagtcttacttgtaacagcgtaattaaacacatcatggaggagagaaacttaaaattaaaatagtattttggcttttgaagttatttgtgttgctaaatagatgcagaggttttacagcagtttattttaaggttttatttatacataattactttgaactcttcagagtagatattttttcacaaggcagtttgtcataaattctctcatgcgcttcagaatgcataagtgccatcctttaatcatagactttgaggagagaaagcataaaaatatagcatataatctaaaaataaatatataacatgcacaaataatgtgacattcttactgaatcaaatcatgattctagaacttgagatcttaaatagaatttcggtttgtatcttccatataataaccacacacagataaccacacaaaaaatcctttgtaaaatttctgattgataggattagagtgcttaaatttttggggggggaagggtggggtaaagtgtaagtgctttcttttgtccctaacttgtgtattgatggcagtccactctgttttctaaaaatgtattttactgtggtgcttaacttcttattaattaaatcccgtatcagaaaccttgcctgtgactttagaaagggcttttgattattgttttttcttcttgctcttgaaagtaatctggtcccagggaattactggtttaactgaacatctccagaattatttaaggtgtcaaaatatataaccttcacattgaaagataattttaatttatgggcataataaaaatttgaatcattcaggtaattttcaaaaaatggagaccatttgtctttaactgaaggtatatgtttaagatcatagtctaccctagtatggtgctttgccacaaagtgatttctgaagaatggttctttttaagataatgacttcatatgatcattgtttcatgttacttgccacaaataactttaatttaggttgaaactggaactgtttgtttctcatattagctacttctctattaggagcacaagaaccatagttaaatgcaacatgagctactttagtcctgtttgtttaaatttgtgttgtccatgtattatgatttattaacttgttgatgcatgtaaattgggtgcattttgttgccatgtatgttaaatggtgaccaatgtttttacaaaggaattgaacaaaaaaagtatcttttaagaaatttggaatgtggttttgattttgaaatttgatttcttactaatctcagagggccttggtatattctgttactaaagcaaacaggattaatgaatacggatttgttacaaggtggcagcaatgtcactgagatagtgaatggaacaatttaccacctccctggaatctgcacctgagatacaacatcagcgtatgagtgaagagtgagcccatagaaaagctttagatagactcacataagtcacactgatgggtatttacagcagatatatccaagctgtttatgtaatagtctcatttactttattctttttctctagaacataaattttgaaggtaatggaagtttatcttttataccaaaagtttgtatgagccattttgaagtaaatctttctaattttagaattatattttctcgccatcttaagacagtatattaaatataatataacctttttcttagtggctaagcattatctttatgtatattattattgtgtggtaatgcagtaccttgagaatctagtttttatagttttcatttttttttctgatcttgcttctggcaacttttatctctctaatctgctttttttctcagttgtctggacttagaaactggttagcctatcttaccataaattatttgggaaatactaaaaaattggctttggatcctgactgagatgatgatgatgatagtagtagtagtaataataatagttcccttttattaaacacttatttggtcctttatgcactagtaatttacacacattattgcatttaatcaccttaatgacaacattaagttggggctattatcattatcatctctattttctcatagctaaattgaggcatgaagaggttagtttgccactacgaataagtggactggaatcctattttgtccaagtatgaagcctgtcttcttaactgctaggcagtagggacatcagttgcatgggctttgcaatgtctgctctctgcctaggttcctttttacctccagattcatggagtcattttcttatctataatttaagaatattgtgcttacaatccaagattcatttaagaaatcttgtgttctttattacatactatgtgctaggatgttcaaggcactgagtgaacaaccagaacatctgtaccctcatgaagcttattcttttggggtgggtagtaataggggaagagaacacagaaaagcaaatatacttttttttgagatggagtcttgatgtcacccaggctggagtgcagtggcgtgatcttggcttattgcaacctctgcttcctgggttcaagtgattctcctgcctcagcctcctgagtagctgggattacagtcacgtgccaccgagcctaatttttttgtatttttagtagaaacggggtttcaccatgttggccaggctggcctcagactcctgacctcctgagtagctgggattacaggcacgtgccaccgagcctaatttttttgtatttttagtagaaacggggtttcaccatgttggccaggctggcctcagactcctgacctcaggtggtccacctgtctcggcctcccaaagtgctgggattacaggcgtgagcccctgcgcccacctgcaaatatacacttaaatattgtttatgtcagatggtggtaagttctatagagataaatgaaacaagataaagaggatagaaagtaccagtggtcataagtgaagatggtcagtgaagacctgaaggaagcgaaggtacaaacagtacagatattctgtgaagagaaagtatcatgctaggtactagaaagttggtgttaagaaaatctcagatatgtgaaatatgtttcactttggaattcattgtaaaatgttttctttttgtttcatattactaataactgcattaagcctaaagagtaacagttaaatattaagattaatacttacttcttgcatgtttactgacagcagtaggtgaaaatggcacagaagtgtggggaagcaaccctagaattcaaaaaagtctgtagatattcccatcagcaaatcatttacagttgactcttgaacaatggagggattagggacaccaaccccctgtgctgctgaaaatctgaatacaactttttactctctccaaactttacttatagcctcctattggctggaagcctttctgataaataagcagtagattaacacgtattttgtatgttatatgtatcatatattgtattaaaataaaggtagaagaaagaaaatgttattaaaatcatcaggaagagaaaatacatttactattcattaagtggatcatgataaaagtcttcatcctccttgtcttcatgttgagtaggctgaggtggaggaggaagaggaaggattggtcttgctcttagtggtagcagaggtgcaaggggaagcaggaaaggcaggcacactacgtgtaattatgaaaatgcattgtaacttctgtctgatgttttgctttttttcatttctcaaaatatttctatatatggtattaatccttcttccaccatttgctttagttttagtgcctgtgtgatagaagggttcatgttgtaaaatcagtcttgaataatcagaacacttctaccagattgtctaatgttgatttgttttctggcactgcttctaaatgtcttcctcctcattctgtggcactgattcagaggcactcatctccaaaagctaagcttttgaattgcttagcttttgattcactccaggattcagatcttgaaactttctaccctccaccatttatttatttatttaatttgacatatctacaacctctttcatgattttcttgattggctctgttgtaaattctgcgaagtcacacacaacatctggttgttttcctcagcaggaatttattgttttgggcttgatggctttcatgtcttctgtagcaacaatggcatcatcagtggtggaatccttccagactttgatgatgttctctttgttagagttctcttgcatggcactgatggttctttgcatagagtactgtgtgtaatgagcctataggtccttatgactccctgatctagaaactaaattagagacattgtgtttgggggcaaatagatcacttcgatgcctttagtattgaactcatggagttctgggtgggtggccaggggcattgtccagtatcaaaacaactttaaaaggcagtcctttactggcaaggtacttcctgacttcaaagacaaaacagcaatggagccaatccagaaaaagggttcttgtcgtccaggccttcttgttatactgccagaagactggcagctggtgtttatcttttcccttcaagacttgggagttaacagctttatagataagtgcagtcttgatcataaacccaacagcatttgcaaaaacccatagcattagcctgtccctttctgccttaaaccctggtgctcacttctcttctttactaataaatgttctttgtggcatattattatttttccataatagggcacttctgtctgccttaagaacctgttttggtagatatgctttctcctcaatgattttcttaatggcatctgggaactcatttgctgcctcttggtcatcaggagctgcctcttctgttatcttaacatttttaaagccaaacttctttctaatattatcaagccatcctttgctggcattaaattctctagatttagatccttcaccttccttttgctttaaattgtcatataatgaccgccttttctccaatcatattagagcctataggtacgtctttcttgtagcaatactgcacccacataaaagttgcatttttaatacgagataaaaaggtatatcacaaaaagtgtaaggtttgctggtatagatgcagtaatggcttcataaattttcttaattttttttaacagtggtccttatgctggattcatttatcttgaaggatgggcaactacagctgcagaccagtacacatcaagcaatttaactttttcttgtaatgtcatgactttgctccttgggagcacttccagcgtcactagcgggacttcatatgggtcccttggtattattgcaaggtttatggttgtactaaacatgatgaaaaataactgagaaccatgagagatcactttttactacgatacacaatttactggagagatgaactgcccatgtggagatgataaacatcacatggcattttaagtgaatacagcacttgagctcacagcaacagcaacaggaggtagctctgaaattatggtagtagtgcagtatgtactatagttaatcttatccagttgtaatttagtactgcatctttatgtttgtctcaactgcaaatggctccaatgtatagtctgtgtatgcgttaagttttgataaattttaactttttttttttttgagatggagtcttgctctgttgtccaggctggagtgcagtggcaccatgccggctcactgcaacctctgtcttctgggttcaagtgattctcctgcctcagcctcccaagtagttgggattacaggcatgcatccccatgcccagctaatttttgtatttttaggagaaacagggtttcaccatgttggccaggctgctcttgaactcctgacctcaggtgatccgcctgcctcggcctcctgaagtgttgggattacaggcgtgagccactgcgcccggccaattttaacttttcataatagatttgtatatatttatggtagtaaatgataaaatagactagtgtctacatatattatatgaattcatgacacacctttttcttagtttttcagtatttctaagctacatggtgcatctgcaagttttttaaattgttgcaaatttccaaaaaaattttcaatatatttatcaaaatatgcatataagcggtcctatgcagttcaaacccgtgtttgagaatcaactttatgacttccagtgtcattctccaccatttctgcagtttatcacattttgcttcaggcagatttggtaaatcttcaatgatagttctctaggccattgttttgtaacatgatcaaatgcttaatgggaaatagaatatgtatatgtattctttgtctaccaactaccaaagaaacaaatactcctcagtttgacttgacttagtaaataaacttgtgttgggttaatgga

SEQ ID NO: 194317 - DNA, 3284 bp, Homo sapiens
  Payload ID: 18399
  Gene Name: transmembrane protein 67
  ENST ID: ENST00000323130
  CDS Start-End: 19-2976
ggtggggctggggtggcaatggcggtttggtccctcttatccgcccgggccgtgaccgcgttccttctgttgttcctccctcgcttcttacaggcccagaccttctctttccctttccagcagccggagaagtgcgacaacaaccagtactttgatatctccgccctctcgtgtgttccttgtggagctaaccagaggcaagatgcccgaggaacttcatgtgtatgtctaccaggatttcagatgatctctaataatggaggacctgctattatttgtaaaaagtgcccagaaaacatgaaaggtgttacagaagatggctggaactgcatttcttgccctagtgacttaactgccgaaggaaaatgtcactgtcccattggccatattttagtggaaagagacattaatggaacattgttgtctcaagcaacttgtgagctctgtgatggaaatgaaaactcttttatggtagtaaatgctttaggagacaggtgcgtccgatgtgagccaacatttgttaataccagcaggtcctgtgcatgttcagaacctaacattttaacagggggattatgtttcagcagcacagggaattttcctctacgtagaatttcagctgcacgttatggagaagttggcatgtctttaacttcagaatggtttgcaaagtatttgcaatcatcagcagctgcatgttgggtatatgccaatctaacatcttgtcaagctcttggaaatatgtgtgtgatgaacatgaattcttacgactttgccacatttgatgcatgtggactatttcagtttatctttgaaaatactgctggactgagcactgttcattctatttcattttggagacagaatcttccttggctgttttatggagaccagttaggattagcacctcaagtgctcagttctacctctcttcctacaaatttcagttttaaaggagaaaaccagaatacaaaactgaagtttgttgctgcttcctatgatataagaggaaattttctcaagtggcaaactttagaaggaggtgttttacagctttgtccagacacagagacaaggctaaatgctgcttattcatttggaacaacctaccaacaaaattgtgagattcctatctctaagatcttaattgactttcccactcctatattttatgatgtgtaccttgaatatactgatgaaaatcaacatcaatatattttggctgtgcctgtgttaaacctaaatcttcaacataataagatatttgtgaaccaagacagcaactctggaaagtggcttctaactcggcgcattttcttagtggatgcagtaagtggacgagaaaatgacttaggaactcagccaagagtaattcgagttgctactcaaatatcactgagtgtccaccttgtacccaacacaataaatggaaacatctaccctcccttaatcaccattgcctacagtgacattgatatcaaagatgccaacagccagtctgtgaaggtttctttctcagtcacatatgaaatggatcatggagaagcacatgtccagacagatattgctttgggtgtattgggtgggctagctgttttagcatctcttttgaagacagcaggatggaagaggcgcattgggagtcccatgattgatttacagacagttgtgaaattcttggtgtactatgctggtgatctggccaatgttttctttatcatcacagtgggaacaggtctttactggcttattttcttcaaagcacagaagtctgtgtctgttttgctgccaatgccaattcaggaagaacgttttgtcacttatgttggatgtgcctttgctctgaaggcactacaatttttgcataagctcatatcccagattacaatagatgtattctttattgattgggagcgacctaaaggaaaggttcttaaagctgttgaaggtgagggtggtgtacgaagtgccactgttcctgtaagcatatggagaacatattttgtagcaaatgaatggaatgaaattcagactgtgagaaaaattaattcactctttcaagtacttactgtcctcttctttttggaggttgtgggattcaagaacttagcattaatggactcatcttctagtctttctagaaacccacctagctacatagctccttatagctgcattttgagatatgcagtgtctgctgctctttggctagccattggaattatacaggtcgtgttctttgctgtcttttatgagagatttatagaagataaaattcgacagttcgttgatttatgctctatgagtaatatatcagtgtttctgttatcccacaaatgttttggatattacattcatggtagatcagtacatgggcatgcagatactaatatggaagaaatgaatatgaaccttaaaagagaagcggaaaatttgtgtagccagagaggtttggtacccaacacagatggtcagacttttgagattgcaatttctaaccagatgagacaacattatgacagaattcatgagacactaataaggaaaaatggtcctgctagactactgagttcatcagcaagtacttttgagcagagtataaaagcatatcatatgatgaataaatttcttggctccttcattgaccatgttcataaggaaatggattactttataaaagataagttgcttcttgaaagaattcttggaatggaattcatggaaccaatggaaaaaagcatcttttacaatgatgaaggttattctttcagcagtgtcctgtattatggaaatgaagctactcttcttatttttgatctgctgttcttctgtgttgtggatttggcttgccaaaattttattttagcatccttccttacatatctacaacaagagatttttagatatatccgtaatacagtaggacaaaagaatttggcatccaaaacattggtggatcaaagatttttgatttaacttcctgaataaataacttaaagactcagtataatcatggccaaaaaaaagtcatgatatcagagacaagggttcaccatgttgcccaggctagtcttgaactcctgatcgagagattcacccacctcggcctccaaaagtgctgggattacaggtgtcagccactacacatggccaggattagtttcttagaatgtgcttttaacattgagtaaactatgaatgctggaatttttatttttagtttaaaatatctgccccaaaatatatttttttcttgctaataaattaataatatgatattaaaa

SEQ ID NO: 194318 - DNA, 3255 bp, Homo sapiens
  Payload ID: 18399
  Gene Name: transmembrane protein 67
  Uniprot ID: Q5HYA8
  ENST ID: ENST00000409623
  CDS Start-End: 203-2947
aggctgtgaggcttccagcgtcggcccagaccttctctttccctttccagcagccggagaagtgcgacaacaaccagtactttgatatctccgccctctcgtgtgttccttgtggagctaaccagaggcaagatgcccgaggtgttacagaagatggctggaactgcatttcttgccctagtgacttaactgccgaaggaaaatgtcactgtcccattggccatattttaggctggtcttgaacttccgacctcaggtgatctgcctgcctcagcctcccaaagtgctgggatacaggcttgagccaccgcacctgaccttggcatgtactttagaaggaatgtacaacataattgaagaaattttggaaagagacattaatggaacattgttgtctcaagcaacttgtgagctctgtgatggaaatgaaaactcttttatggtagtaaatgctttaggagacaggtgcgtccgatgtgagccaacatttgttaataccagcaggtcctgtgcatgttcagaacctaacattttaacagggggattatgtttcagcagcacagggaattttcctctacgtagaatttcagctgcacgttatggagaagttggcatgtctttaacttcagaatggtttgcaaagtatttgcaatcatcagcagctgcatgttgggtatatgccaatctaacatcttgtcaagctcttggaaatatgtgtgtgatgaacatgaattcttacgactttgccacatttgatgcatgtggactatttcagtttatctttgaaaatactgctggactgagcactgttcattctatttcattttggagacagaatcttccttggctgttttatggagaccagttaggattagcacctcaagtgctcagttctacctctcttcctacaaatttcagttttaaaggagaaaaccagaatacaaaactgaagtttgttgctgcttcctatgatataagaggaaattttctcaagtggcaaactttagaaggaggtgttttacagctttgtccagacacagagacaaggctaaatgctgcttattcatttggaacaacctaccaacaaaattgtgagattcctatctctaagatcttaattgactttcccactcctatattttatgatgtgtaccttgaatatactgatgaaaatcaacatcaatatattttggctgtgcctgtgttaaacctaaatcttcaacataataagatatttgtgaaccaagacagcaactctggaaagtggcttctaactcggcgcattttcttagtggatgcagtaagtggacgagaaaatgacttaggaactcagccaagagtaattcgagttgctactcaaatatcactgagtgtccaccttgtacccaacacaataaatggaaacatctaccctcccttaatcaccattgcctacagtgacattgatatcaaagatgccaacagccagtctgtgaaggtttctttctcagtcacatatgaaatggatcatggagaagcacatgtccagacagatattgctttgggtgtattgggtgggctagctgttttagcatctcttttgaagacagcaggatggaagaggcgcattgggagtcccatgattgatttacagacagttgtgaaattcttggtgtactatgctggtgatctggccaatgttttctttatcatcacagtgggaacaggtctttactggcttattttcttcaaagcacagaagtctgtgtctgttttgctgccaatgccaattcaggaagaacgttttgtcacttatgttggatgtgcctttgctctgaaggcactacaatttttgcataagctcatatcccagattacaatagatgtattctttattgattgggagcgacctaaaggaaaggttcttaaagctgttgaaggtgagggtggtgtacgaagtgccactgttcctgtaagcatatggagaacatattttgtagcaaatgaatggaatgaaattcagactgtgagaaaaattaattcactctttcaagtacttactgtcctcttctttttggaggttgtgggattcaagaacttagcattaatggactcatcttctagtctttctagaaacccacctagctacatagctccttatagctgcattttgagatatgcagtgtctgctgctctttggctagccattggaattatacaggtcgtgttctttgctgtcttttatgagagatttatagaagataaaattcgacagttcgttgatttatgctctatgagtaatatatcagtgtttctgttatcccacaaatgttttggatattacattcatggtagatcagtacatgggcatgcagatactaatatggaagaaatgaatatgaaccttaaaagagaagcggaaaatttgtgtagccagagaggtttggtacccaacacagatggtcagacttttgagattgcaatttctaaccagatgagacaacattatgacagaattcatgagacactaataaggaaaaatggtcctgctagactactgagttcatcagcaagtacttttgagcagagtataaaagcatatcatatgatgaataaatttcttggctccttcattgaccatgttcataaggaaatggattactttataaaagataagttgcttcttgaaagaattcttggaatggaattcatggaaccaatggaaaaaagcatcttttacaatgatgaaggttattctttcagcagtgtcctgtattatggaaatgaagctactcttcttatttttgatctgctgttcttctgtgttgtggatttggcttgccaaaattttattttagcatccttccttacatatctacaacaagagatttttagatatatccgtaatacagtaggacaaaagaatttggcatccaaaacattggtggatcaaagatttttgatttaacttcctgaataaataacttaaagactcagtataatcatggccaaaaaaaagtcatgatatcaggttagtttgccatattttttaaaacttataatgcagactattctgtttttgttttttatttgcagaaagatttatttttataacttgggaatatataacctgatataatagaaaatactgttttcccattgtgtgtagtatttaatgcagtaaataataaattaatactgacagtgaggccaaaaaaaatctaaatgttgctttcagcataatactttttaatgctaattaaaacagtccccatc

SEQ ID NO: 194319 - DNA, 1461 bp, Homo sapiens
  Payload ID: 18399
  Gene Name: transmembrane protein 67
  ENST ID: ENST00000452276
  CDS Start-End: 271-1461
aatcagctcagcgaagccgccgcagaggctgatggggggctggaggctgtgaggcttccagcgtcggcccagaccttctctttccctttccagcagccggagaagtgcgacaacaaccagtactttgatatctccgccctctcgtgtgttccttgtggagctaaccagaggcaagatgcccgaggaacttcatgtgtatgtctaccaggatttcagatgatctctaataatggaggacctgctattatttgtaaaaagtgcccagaaaacatgaaaggtgttacagaagatggctggaactgcatttcttgccctagtgacttaactgccgaaggaaaatgtcactgtcccattggccatattttagtggaaagagacattaatggaacattgttgtctcaagcaacttgtgagctctgtgatggaaatgaaaactcttttatggtagtaaatgctttaggagacaggtgcgtccgatgtgagccaacatttgttaataccagcaggtcctgtgcatgttcagaacctaacattttaacagggggattatgtttcagcagcacagggaattttcctctacgtagaatttcagctgcacgttatggagaagttggcatgtctttaacttcagaatggtttgcaaagtatttgcaatcatcagcagctgcatgttgggtatatgccaatctaacatcttgtcaagctcttggaaatatgtgtgtgatgaacatgaattcttacgactttgccacatttgatgcatgtggactatttcagtttatctttgaaaatactgctggactgagcactgttcattctatttcattttggagacagaatcttccttggctgttttatggagaccagttaggattagcacctcaagtgctcagttctacctctcttcctacaaatttcagttttaaaggagaaaaccagaatacaaaactgaagtttgttgctgcttcctatgatataagaggaaattttctcaagtggcaaactttagaaggaggtgttttacagctttgtccagacacagagacaaggctaaatgctgcttattcatttggaacaacctaccaacaaaattgtgagattcctatctctaagatcttaattgactttcccactcctatattttatgatgtgtaccttgaatatactgatgaaaatcaacatcaatatattttggctgtgcctgtgttaaacctaaatcttcaacataataagatatttgtgaaccaagacagcaactctggaaagtggcttctaactcggcgcattttcttagtggatgcagtaagtggacgagaaaatgacttaggaactcagccaagagtaattcgagttgctactcaaatatcactgagtgtccaccttgtacccaacacaataaatggaaacatctaccctcccttaatcaccattgcctacagtgacattgatatcaaagatgcc

SEQ ID NO: 194320 - DNA, 4651 bp, Homo sapiens
  Payload ID: 18399
  Gene Name: transmembrane protein 67
  Uniprot ID: Q5HYA8
  ENST ID: ENST00000453321
  CDS Start-End: 59-3046
aagccgccgcagaggctgatggggggctggaggctgtgaggcttccagcgtcggtaccatggcgacgcgcggtggggctggggtggcaatggcggtttggtccctcttatccgcccgggccgtgaccgcgttccttctgttgttcctccctcgcttcttacaggcccagaccttctctttccctttccagcagccggagaagtgcgacaacaaccagtactttgatatctccgccctctcgtgtgttccttgtggagctaaccagaggcaagatgcccgaggaacttcatgtgtatgtctaccaggatttcagatgatctctaataatggaggacctgctattatttgtaaaaagtgcccagaaaacatgaaaggtgttacagaagatggctggaactgcatttcttgccctagtgacttaactgccgaaggaaaatgtcactgtcccattggccatattttagtggaaagagacattaatggaacattgttgtctcaagcaacttgtgagctctgtgatggaaatgaaaactcttttatggtagtaaatgctttaggagacaggtgcgtccgatgtgagccaacatttgttaataccagcaggtcctgtgcatgttcagaacctaacattttaacagggggattatgtttcagcagcacagggaattttcctctacgtagaatttcagctgcacgttatggagaagttggcatgtctttaacttcagaatggtttgcaaagtatttgcaatcatcagcagctgcatgttgggtatatgccaatctaacatcttgtcaagctcttggaaatatgtgtgtgatgaacatgaattcttacgactttgccacatttgatgcatgtggactatttcagtttatctttgaaaatactgctggactgagcactgttcattctatttcattttggagacagaatcttccttggctgttttatggagaccagttaggattagcacctcaagtgctcagttctacctctcttcctacaaatttcagttttaaaggagaaaaccagaatacaaaactgaagtttgttgctgcttcctatgatataagaggaaattttctcaagtggcaaactttagaaggaggtgttttacagctttgtccagacacagagacaaggctaaatgctgcttattcatttggaacaacctaccaacaaaattgtgagattcctatctctaagatcttaattgactttcccactcctatattttatgatgtgtaccttgaatatactgatgaaaatcaacatcaatatattttggctgtgcctgtgttaaacctaaatcttcaacataataagatatttgtgaaccaagacagcaactctggaaagtggcttctaactcggcgcattttcttagtggatgcagtaagtggacgagaaaatgacttaggaactcagccaagagtaattcgagttgctactcaaatatcactgagtgtccaccttgtacccaacacaataaatggaaacatctaccctcccttaatcaccattgcctacagtgacattgatatcaaagatgccaacagccagtctgtgaaggtttctttctcagtcacatatgaaatggatcatggagaagcacatgtccagacagatattgctttgggtgtattgggtgggctagctgttttagcatctcttttgaagacagcaggatggaagaggcgcattgggagtcccatgattgatttacagacagttgtgaaattcttggtgtactatgctggtgatctggccaatgttttctttatcatcacagtgggaacaggtctttactggcttattttcttcaaagcacagaagtctgtgtctgttttgctgccaatgccaattcaggaagaacgttttgtcacttatgttggatgtgcctttgctctgaaggcactacaatttttgcataagctcatatcccagattacaatagatgtattctttattgattgggagcgacctaaaggaaaggttcttaaagctgttgaaggtgagggtggtgtacgaagtgccactgttcctgtaagcatatggagaacatattttgtagcaaatgaatggaatgaaattcagactgtgagaaaaattaattcactctttcaagtacttactgtcctcttctttttggaggttgtgggattcaagaacttagcattaatggactcatcttctagtctttctagaaacccacctagctacatagctccttatagctgcattttgagatatgcagtgtctgctgctctttggctagccattggaattatacaggtcgtgttctttgctgtcttttatgagagatttatagaagataaaattcgacagttcgttgatttatgctctatgagtaatatatcagtgtttctgttatcccacaaatgttttggatattacattcatggtagatcagtacatgggcatgcagatactaatatggaagaaatgaatatgaaccttaaaagagaagcggaaaatttgtgtagccagagaggtttggtacccaacacagatggtcagacttttgagattgcaatttctaaccagatgagacaacattatgacagaattcatgagacactaataaggaaaaatggtcctgctagactactgagttcatcagcaagtacttttgagcagagtataaaagcatatcatatgatgaataaatttcttggctccttcattgaccatgttcataaggaaatggattactttataaaagataagttgcttcttgaaagaattcttggaatggaattcatggaaccaatggaaaaaagcatcttttacaatgatgaaggttattctttcagcagtgtcctgtattatggaaatgaagctactcttcttatttttgatctgctgttcttctgtgttgtggatttggcttgccaaaattttattttagcatccttccttacatatctacaacaagagatttttagatatatccgtaatacagtaggacaaaagaatttggcatccaaaacattggtggatcaaagatttttgatttaacttcctgaataaataacttaaagactcagtataatcatggccaaaaaaaagtcatgatatcaggttagtttgccatattttttaaaacttataatgcagactattctgtttttgttttttatttgcagaaagatttatttttataacttgggaatatataacctgatataatagaaaatactgttttcccattgtgtgtagtatttaatgcagtaaataataaattaatactgacagtgaggccaaaaaaaatctaaatgttgctttcagcataatactttttaatgctaattaaaacagtccccatcatttgtctctgtagattattttataaactgagagctgcctgaatcttctcacattgacaaagtaatttgattccaagtttaagactagttttcagtttgatattttcatgttttgtgtgcttatggttaaataaatgttgaaagatattttcaagtttacttagaaattttaaattgtattattgctgattcaatttgcatcattctaattgctcatcctctttggcagtggattaattcactgttgggttaatatgcatctcatgaaatgatatcttttcattcctttgtatacctgtattaggtcagtatacgctttccatgaaatatatttgcatttctaatatagtttacatttattaagttataacgtatgacatttttcccaatatcattttttatacattttaattacttaatgttttaagagttctcttccagagttttgcttttcaattacgtttaaagactgtaaataacaaacagtaaggctgggcgctgtggcttacgcctgtaatcccagcactttggaaggccaaggcacgtggatcactttaggtcaggagttcaagaacagcctggccaacatggaaaaccccatctctacaaaaaatacaaaaattagttggatgtggtggcctgtaatcccagctatttgggaggctgaggcatgagaatagcttgaaaccaggaggtggaggctgtagtgagccagatagcaccactgcactccagccaggatgacagagcaagaccctgtctcagaaaaaacaaaaacaaaacactgtaaatgtatcatgtttctcactgctttctatgttaatgctgtgtaaatacttaaaatggaatactgtataaatattatttatattttctcagatgaaaatatatactaaaacatttggtatttctgttttctgtttcattaatgtatatctgatggagtaccatttaggaatataacattattggggcagaggtcccagccattgccaaagttgaatcttttacatttccctgaatcttgaggatgactgaaaaggaagtctttgaaactgcagtttctgaaggatcacagtacaggaatgcctttataaaagctgcagagataaatacatgtacttatatggcatggatatttaaaaccactcactcagaagcatatgaaagaaattcaaccatcattcaacatagaagaagttaattttagtgcaaaagtttttaagtattaaatttcacaataaaggatcaattggcttacttgctgataaattaaaacagaaaacatttaaaatca

SEQ ID NO: 194321 - DNA, 561 bp, Homo sapiens
  Payload ID: 18399
  Gene Name: transmembrane protein 67
  ENST ID: ENST00000453906
  CDS Start-End: 21-561
aggcttccagcgtcggtaccatggcgacgcgcggtggggctggggtggcaatggcggtttggtccctcttatccgcccgggccgtgaccgcgttccttctgttgttcctccctcgcttcttacaggcccagaccttctctttccctttccagcagccggagaagtgcgacaacaaccagtactttgatatctccgccctctcgtgtgttccttgtggagctaaccagaggcaagatgcccgaggaacttcatgtgtatgtctaccaggatttcagatgatctctaataatggaggacctgctattatttgtaaaaagtgcccagaaaacatgaaaggtgttacagaagatggctggaactgcatttcttgccctagtgacttaactgccgaaggaaaatgtcactgtcccattggccatattttagacagcaactctggaaagtggcttctaactcggcgcattttcttagtggatgcagtaagtggacgagaaaatgacttaggaactcagccaagagtaattcgagttgctactcaaatatcactgagtgtccaccttg

SEQ ID NO: 194322 - DNA, 743 bp, Homo sapiens
  Payload ID: 18399
  Gene Name: transmembrane protein 67
  ENST ID: ENST00000455946
  CDS Start-End: 7-450
ggtaccatggcgacgcgcggtggggctggggtggcaatggcggtttggtccctcttatccgcccgggccgtgaccgcgttccttctgttgttcctccctcgcttcttacaggcccagaccttctctttccctttccagcagccggagaagtgcgacaacaaccagtactttgatatctccgccctctcgtgtgttccttgtggagctaaccagaggcaagatgcccgaggaacttcatgtgtatgtctaccaggatttcagatgatctctaataatggaggacctgctattatttgtaaaaagtgcccagaaaacatgaaaggtgttacagaagatggctggaactgcatttcttgccctagtgacttaactgccgaaggaaaatgtcactgtcccattggccatattttagggtctcactcttgcccaggctggagtgtagtggtgtgatctcagctcactgcaacctccacctaccaggttcaagtgattctcatgcctcagacacttgagtagctgggattacagtggaaagagacattaatggaacattgttgtctcaagcaacttgtgagctctgtgatggaaatgaaaactcttttatggtagtaaatgctttaggagacaggtgcgtccgatgtgagccaacatttgttaataccagcaggtcctgtgcatgttcagaacctaacattttaacagggggattatgtttcagcagcacagggaattttcctctacgt

SEQ ID NO: 194323 - DNA, 492 bp, Homo sapiens
  Payload ID: 18399
  Gene Name: transmembrane protein 67
  ENST ID: ENST00000521065
  CDS Start-End: 1-262
gacgcgcggtggggctggggtggcaatggcggtttggtccctcttatccgcccgggccgtgaccgcgttccttctgttgttcctccctcgcttcttacaggcccagaccttctctttccctttccagcagccggagaagtgcgacaacaaccagtactttgatatctccgccctctcgtgtgttccttgtggagctaaccagaggcaagatgcccgagaaaggtgttacagaagatggctggaactgcatttcttgccctagtgacttaactgccgaaggaaaatgtcactgtcccattggccatattttagtggaaagagacattaatggaacattgttgtctcaagcaacttgtgagctctgtgatggaaatgaaaactcttttatggtagtaaatgctttaggagacaggtgcgtccgatgtgagccaacatttgttaataccagcaggtcctgtgcatgttcagaacctaacattttaacagggggat

SEQ ID NO: 194324 - DNA, 715 bp, Homo sapiens
  Payload ID: 18399
  Gene Name: transmembrane protein 67
  ENST ID: ENST00000520680
  CDS Start-End: 1-715
attttatgatgtgtaccttgaatatactgatgaaaatcaacatcaatatattttggctgtgcctgtgttaaacctaaatcttcaacataataagatatttgtgaaccaagacagcaactctggaaagtggcttctaactcggcgcattttcttagtggatgcagtaagtggacgagaaaatgacttaggaactcagccaagagtaattcgagttgctactcaaatatcactgagtgtccaccttgtacccaacacaataaatggaaacatctaccctcccttaatcaccattgcctacagtgacattgatatcaaagatgccaacagccagtctgtgaaggtttctttctcagtcacatatgaaatggatcatggagaagcacatgtccagacagatacggagttttgcacttgttgcccaggctggagtgcaatggcacgatcttggctcaccgcaacctctgcctcccgggttcaagcgattctcctgtctcagcctcctgaatatctgggattacagattgctttgggtgtattgggtgggctagctgttttagcatctcttttgaagacagcaggatggaagaggcgcattgggagtcccatgattgatttacagacagttgtgaaattcttggtgtactatgctggtgatctggccaatgttttctttatcatcacagtgggaacaggtctttactggcttattttcttc

SEQ ID NO: 194325 - DNA, 564 bp, Homo sapiens
  Payload ID: 18399
  Gene Name: transmembrane protein 67
  ENST ID: ENST00000521222
  CDS Start-End: 10-369
gtcggtaccatggcgacgcgcggtggggctggggtggcaatggcggtttggtccctcttatccgcccgggccgtgaccgcgttccttctgttgttcctccctcgcttcttacaggcccagaccttctctttccctttccagcagccggagaagtgcgacaacaaccagtactttgatatctccgccctctcgtgtgttccttgtggagctaaccagaggcaagatgcccgaggaacttcatgtgtatgtctaccaggatttcagatgatctctaataatggaggacctgctattatttgtaaaaagtgcccagaaaacatggtgttacagaagatggctggaactgcatttcttgccctagtgacttaactgccgaaggaaaatgtcactgtcccattggccatattttagtggaaagagacattaatggaacattgttgtctcaagcaacttgtgagctctgtgatggaaatgaaaactcttttatggtagtaaatgctttaggagacaggtgcgtccgatgtgagccaacatttgttaataccagcaggtcctgtgcatgtt

SEQ ID NO: 194326 - DNA, 480 bp, Homo sapiens
  Payload ID: 18399
  Gene Name: transmembrane protein 67
  ENST ID: ENST00000498673
  CDS Start-End: 463-480
gcagaggctgatggggggctggaggctgtgaggcttccagcgtcggcccagaccttctctttccctttccagcagccggagaagtgcgacaacaaccagtactttgatatctccgccctctcgtgtgttccttgtggagctaaccagaggcaagatgcccgaggaacttcatgtgtatgtctaccaggatttcagatgatctctaataatggaggacctgctattatttgtaaaaagtgcccagaaaacatggtgcgcataatttattttaaaataacttacctgtaaaaagtaaaaggtgttacagaagatggctggaactgcatttcttgccctagtgacttaactgccgaaggaaaatgtcactgtcccattggccatattttagtggaaagagacattaatggaacattgttgtctcaagcaacttgtgagctctgtgatggaaatgaaaactcttttatggtagtaaatgcttta

SEQ ID NO: 194327 - DNA, 571 bp, Homo sapiens
  Payload ID: 18399
  Gene Name: transmembrane protein 67
  ENST ID: ENST00000518319
  CDS Start-End: 456-571
gcagaggctgatggggggctggaggctgtgaggcttccagcgtcggcccagaccttctctttccctttccagcagccggagaagtgcgacaacaaccagtactttgatatctccgccctctcgtgtgttccttgtggagctaaccagaggcaagatgcccgaggaacttcatgtgtatgtctaccaggatttcagatgatctctaataatggaggacctgctattatttgtaaaaagtgcccagaaaacatggtgttacagaagatggctggaactgcatttcttgccctagtgacttaactgccgaaggaaaatgtcactgtcccattggccatattttagtgtttcacgcctgtaatcgcagcactttgggaagccgagtggaaagagacattaatggaacattgttgtctcaagcaacttgtgagctctgtgatggaaatgaaaactcttttatggtagtaaatgctttaggagacaggtgcgtccgatgtgagccaacatttgttaataccagcaggtcctgtgcatgttcagaacctaacattttaacagggggattatgtttcag

SEQ ID NO: 194328 - DNA, 518 bp, Homo sapiens
  Payload ID: 18399
  Gene Name: transmembrane protein 67
  ENST ID: ENST00000521517
  CDS Start-End: 1-518
gcgcggtggggctggggtggcaatggcggtttggtccctcttatccgcccgggccgtgaccgcgttccttctgttgttcctccctcgcttcttacaggcccagaccttctctttccctttccagcagccggagaagtgcgacaacaaccagtactttgatatctccgccctctcgtgtgttccttgtggagctaaccagaggcaagatgcccgaggaacttcatgtgtatgtctaccaggatttcagatgatctctaataatggaggacctgctattatttgtaaaaagtgcccagaaaacatgaaaggtgttacagaagatggctggaactgcatttcttgccctagtgacttaactgccgaaggaaaatgtcactgtcccattggccatattttagtggaaagagacattaatggaacattgttgtctcaagcaacttgtgagctctgtgatggaaatgaaaactcttttatggtagtaaatgctttaggagacagacagggggattatgtttcag

SEQ ID NO: 194329 - DNA, 2401 bp, Homo sapiens
  Payload ID: 18400
  Gene Name: transmembrane protein 68
  Uniprot ID: Q96MH6
  ENST ID: ENST00000334667
  CDS Start-End: 254-1027
ggtgtcacccccatcgcggcccgggctgcagccgccgcttggcttctttcacacgggttgcttcggaggaatccgccgtgcaaatctgtccgcccccttggccactgatcccccgaagagcttctgtcgccgctctaggaatagagacattgaagtttgggacaagatatttatctaacttctgtgtcaaaattagcgacctgctatggcaatgaagaaagaaactgaatttgtcattttcacctgaagaaaaatgatagacaaaaatcaaacctgtggtgtaggacaggattctgtgccctatatgatttgtctgattcacatactcgaagaatggtttggtgtggagcagttggaggactatttgaattttgcaaactatctcttgtgggtttttacaccactaatacttttaatacttccttactttactatctttcttctctaccttactattattttcttacacatttataagagaaagaatgtattgaaagaagcctactctcataatttatgggatggtgcaaggaaaacagtggcaactctgtgggatggacatgcagccgtttggcatggttatgaagttcatggaatggaaaaaataccagaagatggaccagcacttataattttttatcatggagctattcctatagatttttactatttcatggctaaaatatttatacacaaaggcagaacttgccgagtagtagctgatcactttgtctttaaaattccagggtttagtttattactggatgtgttttgtgctctacatggaccaagagaaaaatgtgttgaaattctgaggagtggccacttgttagctatctcaccaggtggagttcgagaagccctaattagtgatgaaacttataacatcgtatggggtcatcgcagaggctttgctcaggttgcaattgatgcaaaagtgacgaagaatgctgttcaagctttgattgataagcaccaaagaataccaggaaacattatgagtgctttgttagaacgttttcattgataacaaagggtcaactagaagatgatttagtacatttatattaaatgtttgtatctaaggtactgtcttctgaattttgtaggtcctataattagtattttttaaaaaaatcatgttaataagcatctttcacagaattcgtttctttaaaatagtcaattttgtttttgcaattgtgtcaaatactaacaaattacacacctagtaattcagaaaaagatgtcttatttgtaaattcctaacaatttatgctaaacatatagattcttaagtttattaataacagcagtttaggttaaacaaacattcctggataatgcgttaaatttctgtatctgtcgccctgagctgattttgaaagatggtataagctaggggttagtatagttgtttaagttagaaaaaacatgctgttgtctgcccctcattcccttcatgaccttgggcaagtcacgtaatgtttttgtgcctcaacaattcactttttaaaaacatgatcgtatgatgaatgatattattttgttatttatatttactgtgattgataactgttgaaccaaaataataaaataattaatttaaacaatgtcaaaatcctttagcagttatgtatatattttctccattgtgtgtttaaattatgtcatgtccagttgccaagcacaatgaaaaagatgtattattttttaaattgaataaaaaattaggaaaaataaaatttctaattattatttttagtatgatatttttaacaagagtctataggcaaacaatatagggtgtgctgtgcattgtcagccctatactgtggtcttaataatgccagcttaaaaatcactgttgtgctctgcatttcgtgtgttagaagctgattctaggctgaggaaagcaagagttctctacttttgctcaatattgaggcttacccagtttgactctacagccagtgaagtggtttattgcttcaataaaaatatacttgaatgatgaatttatttatgttttgttttgtttttatttagagatggggttttgccatgttggccaggctggtcttgaactcctgacctcaggtgatccacctgcctcagcctcccaacttgctgggattacaggtgtgagccaccatgcccagcctgaatgatgaatttatgtgaacacaaagccctctgaaaaattaatgattttcaatttgttgtcttcttgaaaactgaatttaagtattatttaaacagaaaagtgtcagaaatcaaatgcagtatctccctctcccttttttaaatgttgaattagtagggtttttgtatagctttttgtattgtgtgtatttatgatatgtgaaatgtacataaaattaaacaatgtgaaaataaa

SEQ ID NO: 194330 - DNA, 2549 bp, Homo sapiens
  Payload ID: 18400
  Gene Name: transmembrane protein 68
  Uniprot ID: Q96MH6
  ENST ID: ENST00000434581
  CDS Start-End: 201-1175
cgggttgcttcggaggaatccgccgtgcaaatctgtccgcccccttggccactgatcccccgaagagcttctgtcgccgctctaggaatagagacattgaagtttgggacaagatatttatctaacttctgtgtcaaaattagcgacctgctatggcaatgaagaaagaaactgaatttgtcattttcacctgaagaaaaatgatagacaaaaatcaaacctgtggtgtaggacaggattctgtgccctatatgatttgtctgattcacatactcgaagaatggtttggtgtggagcagttggaggactatttgaattttgcaaactatctcttgtgggtttttacaccactaatacttttaatacttccttactttactatctttcttctctaccttactattattttcttacacatttataagagaaagaatgtattgaaagaagcctactctcataatttatgggatggtgcaaggaaaacagtggcaactctgtgggatggacatgcagccgtttggcatggttatgaagttcatggaatggaaaaaataccagaagatggaccagcacttataattttttatcatggagctattcctatagatttttactatttcatggctaaaatatttatacacaaaggcagaacttgccgagtagtagctgatcactttgtctttaaaattccagggtttagtttattactggatgtgttttgtgctctacatggaccaagagaaaaatgtgttgaaattctgaggagtggccacttgttagctatctcaccaggtggagttcgagaagccctaattagtgatgaaacttataacatcgtatggggtcatcgcagaggctttgctcaggttgcaattgatgcaaaagtgcccattattcctatgtttacacaaaatattcgagaaggatttagatcacttggaggaacaaggttatttaggtggctttatgaaaaattccgctatccatttgctccaatgtatggaggttttccagtgaagttacggacctatttaggcgaccccattccgtatgacccacagataacagcggaagaattagctgaaaagacgaagaatgctgttcaagctttgattgataagcaccaaagaataccaggaaacattatgagtgctttgttagaacgttttcattgataacaaagggtcaactagaagatgatttagtacatttatattaaatgtttgtatctaaggtactgtcttctgaattttgtaggtcctataattagtattttttaaaaaaatcatgttaataagcatctttcacagaattcgtttctttaaaatagtcaattttgtttttgcaattgtgtcaaatactaacaaattacacacctagtaattcagaaaaagatgtcttatttgtaaattcctaacaatttatgctaaacatatagattcttaagtttattaataacagcagtttaggttaaacaaacattcctggataatgcgttaaatttctgtatctgtcgccctgagctgattttgaaagatggtataagctaggggttagtatagttgtttaagttagaaaaaacatgctgttgtctgcccctcattcccttcatgaccttgggcaagtcacgtaatgtttttgtgcctcaacaattcactttttaaaaacatgatcgtatgatgaatgatattattttgttatttatatttactgtgattgataactgttgaaccaaaataataaaataattaatttaaacaatgtcaaaatcctttagcagttatgtatatattttctccattgtgtgtttaaattatgtcatgtccagttgccaagcacaatgaaaaagatgtattattttttaaattgaataaaaaattaggaaaaataaaatttctaattattatttttagtatgatatttttaacaagagtctataggcaaacaatatagggtgtgctgtgcattgtcagccctatactgtggtcttaataatgccagcttaaaaatcactgttgtgctctgcatttcgtgtgttagaagctgattctaggctgaggaaagcaagagttctctacttttgctcaatattgaggcttacccagtttgactctacagccagtgaagtggtttattgcttcaataaaaatatacttgaatgatgaatttatttatgttttgttttgtttttatttagagatggggttttgccatgttggccaggctggtcttgaactcctgacctcaggtgatccacctgcctcagcctcccaacttgctgggattacaggtgtgagccaccatgcccagcctgaatgatgaatttatgtgaacacaaagccctctgaaaaattaatgattttcaatttgttgtcttcttgaaaactgaatttaagtattatttaaacagaaaagtgtcagaaatcaaatgcagtatctccctctcccttttttaaatgttgaattagtagggtttttgtatagctttttgtattgtgtgtatttatgatatgtgaaatgtacataaaattaaacaatgtgaaaataaa

SEQ ID NO: 194331 - DNA, 510 bp, Homo sapiens
  Payload ID: 18400
  Gene Name: transmembrane protein 68
  ENST ID: ENST00000523180
  CDS Start-End: 505-510
agccgccgcttggcttctttcacacgggttgcttcggaggaatccgccgtgcaaatctgtccgcccccttggccactgatcccccgaagagcttctgtcgccgctctaggaatagagacattgaagtttgggacaagatatttatctaacttctgagttatctcaatatggctgggcatggtggctgatgcctgtaatctcagcactttgggaggctgaggtgggtggaccacttgaggtcaggagtttgggaccagcctggccaacatagtgaaaccctgtctctactaaaaatacaaaaattagccaggcatggtggcacatgcctgtagtcccagctgctcgggatgctgaggcaggaggattacctgaacctgggaggcagaggtttcagtgactgagatcgtgccactgtactccagcccgagcaaaaggtgtcaaaattagcgacctgctatggcaatgaagaaagaaactgaatttgtcattttcacctgaagaaaaatgata

SEQ ID NO: 194332 - DNA, 659 bp, Homo sapiens
  Payload ID: 18400
  Gene Name: transmembrane protein 68
  ENST ID: ENST00000520061
  CDS Start-End: 1-326
ttcttctctaccttactattattttcttacacatttataagagaaagaatgtattgaaagaagcctactctcataatttatgggatggtgcaaggaaaacagtggcaactctgtgggatggacatgcagccgtttggcatggttatgaagttcatggaatggaaaaaataccagaagatggaccagcacttataattttttatcatggagctattcctatagatttttactatttcatggctaaaatatttatacacaaaggcagaacttgccgagtagtagctgatcactttgtctttaaaattccagggttaatggaagattagatttctgattgctgatgggatatcatttctgaatcccattagaatcctatctctggaatctctgccctgccacttcttagatgtgtgactttgagcaagctattattctggtttagtttattactggatgtgttttgtgctctacatggaccaagagaaaaatgtgttgaaattctgaggagtggccacttgttagctatctcaccaggtggagttcgagaagccctaattagtgatgaaacttataacatcgtatggggtcatcgcagaggctttgctcaggttgcaattgatgcaaaagtgcccattattcctatgtttacacaaaatatt

SEQ ID NO: 194333 - DNA, 726 bp, Homo sapiens
  Payload ID: 18400
  Gene Name: transmembrane protein 68
  ENST ID: ENST00000522470
  CDS Start-End: 1-204
ttttgtgctctacatggaccaagagaaaaatgtgttgaaattctgaggagtggccacttgttagctatctcaccaggtggagttcgagaagccctaattagtgatgaaacttataacatcgtatggggtcatcgcagaggctttgctcaggttgcaattgatgcaaaagtggctttgactggaatggcatgctttcacatataaacatcctgctctaaggaatcaaagttgacttatagagctaataaaagccccttggaaaaactagcttcataccttgcctatgcattccctgtacaggattcttgacctgtgtatcaagattaagacaaaaaggttgcccccttcagcatgtcgagtcatgtgagggtggctaccctctggggctgcagctttctcactttggaagacttatgagttttttcctgtgccctgtacagtgaagaacaaagaaactagtgacagtttgatgagaaacagatatacacatagcttcaaagaatctctccataaagtacttattcattataaaaggaaaaaaataatttcatagggaagaaacctggtggatgacatcttaatcaagtgatcaaagttaccaccacgactaatgacacaaaccaacattatatgcctcctgatgtgatgtgacatgctagaaagaaaacaacatcatttatacggtatttctgccagagaaacataatctgcattttcatgttaaag

SEQ ID NO: 194334 - DNA, 1009 bp, Homo sapiens
  Payload ID: 18400
  Gene Name: transmembrane protein 68
  ENST ID: ENST00000519784
  CDS Start-End: 147-578
ggttgcttcggaggaatccgccgtgcaaatctgtccgcccccttggccactgatcccccgaagagcttctgtcgccgctctaggaatagagacattgaagtttgggacaagatatttatctaacttctggttatgaagttcatggaatggaaaaaataccagaagatggaccagcacttataattttttatcatggagctattcctatagatttttactatttcatggctaaaatatttatacacaaaggcagaacttgccgagtagtagctgatcactttgtctttaaaattccagggtttagtttattactggatgtgttttgtgctctacatggaccaagagaaaaatgtgttgaaattctgaggagtggccacttgttagctatctcaccaggtggagttcgagaagccctaattagtgatgaaacttataacatcgtatggggtcatcgcagaggctttgctcaggttgcaattgatgcaaaagtgacgaagaatgctgttcaagctttgattgataagcaccaaagaataccaggaaacattatgagtgctttgttagaacgttttcattgataacaaagggtcaactagaagatgatttagtacatttatattaaatgtttgtatctaaggtactgtcttctgaattttgtaggtcctataattagtattttttaaaaaaatcatgttaataagcatctttcacagaattcgtttctttaaaatagtcaattttgtttttgcaattgtgtcaaatactaacaaattacacacctagtaattcagaaaaagatgtcttatttgtaaattcctaacaatttatgctaaacatatagattcttaagtttattaataacagcagtttaggttaaacaaacattcctggataatgcgttaaatttctgtatctgtcgccctgagctgattttgaaagatggtataagctaggggttagtatagttgtttaagttagaaaaaacatgctgttgtctgcccctcattcc

SEQ ID NO: 194335 - DNA, 536 bp, Homo sapiens
  Payload ID: 18400
  Gene Name: transmembrane protein 68
  ENST ID: ENST00000523073
  CDS Start-End: 84-518
cgccgtgcaaatctgtccgcccccttggccactgatcccccgaagagcttctgtcgccgctctagggttatgaagttcatggaatggaaaaaataccagaagatggaccagcacttataattttttatcatggagctattcctatagatttttactatttcatggctaaaatatttatacacaaaggcagaacttgccgagtagtagctgatcactttgtctttaaaattccagggtttagtttattactggatgtgttttgtgctctacatggaccaagagaaaaatgtgttgaaattctgaggagtggccacttgttagctatctcaccaggtggagttcgagaagccctaattagtgatgaaacttataacatcgtatggggtcatcgcagaggctttgctcaggttgcaattgatgcaaaagtgcccattattcctatgtttacacaaaatattcgagaaggatttagatcacttggaggaacaaacgaagaatgctgttcaagctttgattgataagcaccaaagaatacc

SEQ ID NO: 194336 - DNA, 710 bp, Homo sapiens
  Payload ID: 18400
  Gene Name: transmembrane protein 68
  ENST ID: ENST00000523423
  CDS Start-End: 219-710
gccactgatcccccgaagagcttctgtcgccgctctaggaatagagacattgaagtttgggacaagatatttatctaacttctgagttatctcaatatggctgggcatggtggctgatgcctgtaatctcagcactttgggaggctgagtgtcaaaattagcgacctgctatggcaatgaagaaagaaactgaatttgtcattttcacctgaagaaaaatgatagacaaaaatcaaacctgtggtgtaggacaggattctgtgccctatatgatttgtctgattcacatactcgaagaatggtttggtgtggagcagttggaggactatttgaattttgcaaactatctcttgtgggtttttacaccactaatacttttaatacttccttactttactatctttcttctctaccttactattattttcttacacatttataagagaaagaatgtattgaaagaagcctactctcataatttatgggatggtgcaaggaaaacagtggcaactctgtgggatggacatgcagccgtttggcatggttatgaagttcatggaatggaaaaaataccagaagatggaccagcacttataattttttatcatggagctattcctatagatttttactatttcatggctaaaatatttatacacaaaggcagaacttgccgagtagtagctgatcactttgtctttaaaattcca

SEQ ID NO: 194337 - DNA, 2400 bp, Homo sapiens
  Payload ID: 18400
  Gene Name: transmembrane protein 68
  Uniprot ID: Q96MH6
  ENST ID: ENST00000521229
  CDS Start-End: 214-621
ggcttctttcacacgggttgcttcggaggaatccgccgtgcaaatctgtccgcccccttggccactgatcccccgaagagcttctgtcgccgctctaggaatagagacattgaagtttgggacaagatatttatctaacttctgtgtcaaaattagcgacctgctatggcaatgaagaaagaaactgaatttgtcattttcacctgaagaaaaatgatagacaaaaatcaaacctgtggtgtaggacaggattctgtgccctatatgatttgtctgattcacatactcgaagaatggtttggtgtggagcagttggaggactatttgaattttgcaaactatctcttgtgggtttttacaccactaatacttttaatacttccttactttactatctttcttctctaccttactattattttcttacacatttataagagaaagaatgtattgaaagaagcctactctcataatttatgggatggtgcaaggaaaacagtggcaactctgtgggatggacatgcagccgtttggcatggtaagcaaggatactttcacctttgtgttgccattcatgtgtgctgcattggaactgtgttaccattccattttattgattgagaagatactgaaaaatataatagaagtgatatttactattccctgttacctgtttgcatgcattgtgcatatgtatgtgtctttcttaaaatgagttttcccatagacgttggtttccattaaacaaagaaccacgcagcactgtagactataagttgaaataagaaaatttatatttaaaacatctaaaagagtaagagactaaataaagctgtagaaaactgctttaaaaatgcttcaattatttagcatttacttctgttcaaaataagtttgactctaccagtgtggatttaaaaaaatgaaatattaaataatattacattaaatataatttgcataccaaaatttatgcattttctgttgattcattcctgaggttggtgtgtctttctgaataaataagatagcaatagatttctctccaggatagtcattcttttctttattactcgagaaattttgatgttgtatacttaatgattggtggttcttctttgtttggccatcatgaaaattgccttctggtggcctatttttaagtggttagtgtttcactctaccaacttttacttcattattccaacaatatctagtttgttggtctcttttgtttttagactacacaaaaatactgaagattcaataggcaggtaacaaacattggctttctgtattatgttgttgagcatcacagtggtttcatagaaggacatggaaggaagcacagactttaaaagacacttgaggatatatatcactgaactattaggctgctattagcagaaatcaccagtgacatgcttattagactaatgtattttcattttaatactacatacatacttaacgaacctacaaattttttttgagcacctacctatgccagacactgtcaattgcttaatataaattaactgctttaaatctcattaacataatggagtctatgtggtaccccgattatactcatgaggaaactgaggcacagagaggttgttatttgcccaaggtatactaggaatagggccaggttacaaccccagatacctgggagtatacatttgagagagctcttggaggtaaaataaacagaacttggggactgagtgtagagtcttgagggaggaggagttaaagtccagtaagatttctactgctagacagggaaacatgaactggaagtgctccaagtaatagcaaccatgtgagcagaagcacaaaggtggaaaagtactctgggagccacagttagttcatatgatacatgaaataatgtaatgtcactttataggcaattggggcctcaaggggcttgaaaatgttggactagagtggtaatgcactgatactttctcagcagggagtagtatgatcacatctgctctaagagtgacacagttaaatagccctaggttttaaggtttactggcactatagtaaactattttttttaaatatttgattagttggatttttctgctttcaaccaggtggtttggtattatgtgagtagttcaattgtttattatttaaaaaaatactctgtaaaaccagagagaaccttggtaatattctgtatagaatccttcaaaggagtttctttattgctcagaaaatgtatttgatgggacagttgatcctcaaactcagtgactgttttgtagagcttaaagtaaattgaattacttgagttagaattatgtaattggaaagaaatgatataatatggaaacatacaaaatcttggaatatcattaaattatttttcaaaacatt

SEQ ID NO: 194338 - DNA, 707 bp, Homo sapiens
  Payload ID: 18400
  Gene Name: transmembrane protein 68
  ENST ID: ENST00000519780
  CDS Start-End: 162-707
ggcttctttcacacgggttgcttcggaggaatccgccgtgcaaatctgtccgcccccttggccactgatcccccgaagagcttctgtcgccgctctaggaatagagacattgaagtttgggacaagatatttatctaacttctggttatgaagttcatggaatggaaaaaataccagaagatggaccagcacttataattttttatcatggagctattcctatagatttttactatttcatggctaaaatatttatacacaaaggcagaacttgccgagtagtagctgatcactttgtctttaaaattccagggtttagtttattactggatgtgttttgtgctctacatggaccaagagaaaaatgtgttgaaattctgaggagtggccacttgttagctatctcaccaggtggagttcgagaagccctaattagtgatgaaacttataacatcgtatggggtcatcgcagaggctttgctcaggttgcaattgatgcaaaagtgcccattattcctatgtttacacaaaatattcgagaaggatttagatcacttggaggaacaaggttatttaggtggctttatgaaaaattccgctatccatttgctccaatgtatggaggttttccagtgaagttacggacctatttaggcgaccccattccgtatgacccacagataacagcggaagaattagctgaaaag

SEQ ID NO: 194339 - DNA, 639 bp, Homo sapiens
  Payload ID: 18400
  Gene Name: transmembrane protein 68
  ENST ID: ENST00000520414
  CDS Start-End: 261-639
agtctcttcgcgggcaggctcggcttcccgccggcctcagtgttgcgccccagcgccagagtggccgggtgtggagatcctccctcctctgggtcaaagagcctgctctccccgcccctcttctcccctggcgctctaaaccttcgaatagagacattgaagtttgggacaagatatttatctaacttctgtgtcaaaattagcgacctgctatggcaatgaagaaagaaactgaatttgtcattttcacctgaagaaaaatgatagacaaaaatcaaacctgtggtgtaggacaggattctgtgccctatatgatttgtctgattcacatactcgaagaatggtttggtgtggagcagttggaggactatttgaattttgcaaactatctcttgtgggtttttacaccactaatacttttaatacttccttactttactatctttcttctctaccttactattattttcttacacatttataagagaaagaatgtattgaaagaagcctactctcataatttatgggatggtgcaaggaaaacagtggcaactctgtgggatggacatgcagccgtttggcatggttatgaagttcatggaatggaaaaaataccagaagatggaccagcacttataa

SEQ ID NO: 194340 - DNA, 1000 bp, Homo sapiens
  Payload ID: 18400
  Gene Name: transmembrane protein 68
  ENST ID: ENST00000522090
  CDS Start-End: 270-1000
tgcagccgccgcttggcttctttcacacgggttgcttcggaggaatccgccgtgcaaatctgtccgcccccttggccactgatcccccgaagagcttctgtcgccgctctagggtaaaggagagctgcccctgcccctgcccccgcctatccgagaatagagacattgaagtttgggacaagatatttatctaacttctgtgtcaaaattagcgacctgctatggcaatgaagaaagaaactgaatttgtcattttcacctgaagaaaaatgatagacaaaaatcaaacctgtggtgtaggacaggattctgtgccctatatgatttgtctgattcacatactcgaagaatggtttggtgtggagcagttggaggactatttgaattttgcaaactatctcttgtgggtttttacaccactaatacttttaatacttccttactttactatctttcttctctaccttactattattttcttacacatttataagagaaagaatgtattgaaagaagcctactctcataatttatgggatggtgcaaggaaaacagtggcaactctgtgggatggacatgcagccgtttggcatggttatgaagttcatggaatggaaaaaataccagaagatggaccagcacttataattttttatcatggagctattcctatagatttttactatttcatggctaaaatatttatacacaaaggcagaacttgccgagtagtagctgatcactttgtctttaaaattccagggtttagtttattactggatgtgttttgtgctctacatggaccaagagaaaaatgtgttgaaattctgaggagtggccacttgttagctatctcaccaggtggagttcgagaagccctaattagtgatgaaacttataacatcgtatggggtcatcgcagaggctttgctcaggttgcaattgatgcaaaagtgcccattattcctatgtttacacaaaatattcgagaaggatttag

SEQ ID NO: 194341 - DNA, 481 bp, Homo sapiens
  Payload ID: 18400
  Gene Name: transmembrane protein 68
  ENST ID: ENST00000522030
  CDS Start-End: 50-481
tatggcaatgaagaaagaaactgaatttgtcattttcacctgaagaaaaatgatagacaaaaatcaaacctgtggtgtaggacaggattctgtgccctatatgatttgtctgattcacatactcgaagaatggtttggtgtggagcagttggaggactatttgaattttgcaaactatctcttgtgggtttttacaccactaatacttttaatacttccttactttactatctttcttctctaccttactattattttcttacacatttataagagaaagaatgtattgaaagaagcctactctcataatttatgggatggtgcaaggaaaacagtggcaactctgtgggatggacatgcagccgtttggcatgggtttagtttattactggatgtgttttgtgctctacatggaccaagagaaaaatgtgttgaaattctgaggagtggccacttgttagctatctcaccaggtggagtt

SEQ ID NO: 194342 - DNA, 751 bp, Homo sapiens
  Payload ID: 18400
  Gene Name: transmembrane protein 68
  ENST ID: ENST00000517576
  CDS Start-End: 1-405
ataccagaagatggaccagcacttataattttttatcatggagctattcctatagatttttactatttcatggctaaaatatttatacacaaaggcagaacttgccgagtagtagctgatcactttgtctttaaaattccagggtttagtttattactggatgtgttttgtgctctacatggaccaagagaaaaatgtgttgaaattctgaggagtggccacttgttagctatctcaccaggtggagttcgagaagccctaattagtgatgaaacttataacatcgtatggggtcatcgcagaggctttgctcaggttgcaattgatgcaaaagtgggttatttaggtggctttatgaaaaattccgctatccatttgctccaatgtatggaggttttccagtgaagttacggacctatttaggcgaccccattccgtatgacccacagataacagcggaagaattagctgaaaagacgaagaatgctgttcaagctttgattgataagcaccaaagaataccaggaaacattatgagtgctttgttagaacgttttcattgataacaaagggtcaactagaagatgatttagtacatttatattaaatgtttgtatctaaggtactgtcttctgaattttgtaggtcctataattagtattttttaaaaaaatcatgttaataagcatctttcacagaattcgtttctttaaaatagtcaattttgtttttgcaattgtgtcaaatacta

SEQ ID NO: 194343 - DNA, 826 bp, Homo sapiens
  Payload ID: 18400
  Gene Name: transmembrane protein 68
  Uniprot ID: Q96MH6
  ENST ID: ENST00000522576
  CDS Start-End: 267-674
agccgccgcttggcttctttcacacgggttgcttcggaggaatccgccgtgcaaatctgtccgcccccttggccactgatcccccgaagagcttctgtcgccgctctagggtaaaggagagctgcccctgcccctgcccccgcctatccgagaatagagacattgaagtttgggacaagatatttatctaacttctgtgtcaaaattagcgacctgctatggcaatgaagaaagaaactgaatttgtcattttcacctgaagaaaaatgatagacaaaaatcaaacctgtggtgtaggacaggattctgtgccctatatgatttgtctgattcacatactcgaagaatggtttggtgtggagcagttggaggactatttgaattttgcaaactatctcttgtgggtttttacaccactaatacttttaatacttccttactttactatctttcttctctaccttactattattttcttacacatttataagagaaagaatgtattgaaagaagcctactctcataatttatgggatggtgcaaggaaaacagtggcaactctgtgggatggacatgcagccgtttggcatggtaagcaaggatactttcacctttgtgttgccattcatgtgtgctgcattggaactgtgttaccattccattttattgattgagaagatactgaaaaatataatagaagtgatatttactattccctgttacctgtttgcatgcattgtgcatatgtatgtgtctttcttaaaatgagttttcccatagacgttggtttccattaaacaaagaaccacgcagcactgtagactat

SEQ ID NO: 194344 - DNA, 2477 bp, Homo sapiens
  Payload ID: 18400
  Gene Name: transmembrane protein 68
  Uniprot ID: Q96MH6
  ENST ID: ENST00000617782
  CDS Start-End: 115-1089
aatagagacattgaagtttgggacaagatatttatctaacttctgtgtcaaaattagcgacctgctatggcaatgaagaaagaaactgaatttgtcattttcacctgaagaaaaatgatagacaaaaatcaaacctgtggtgtaggacaggattctgtgccctatatgatttgtctgattcacatactcgaagaatggtttggtgtggagcagttggaggactatttgaattttgcaaactatctcttgtgggtttttacaccactaatacttttaatacttccttactttactatctttcttctctaccttactattattttcttacacatttataagagaaagaatgtattgaaagaagcctactctcataatttatgggatggtgcaaggaaaacagtggcaactctgtgggatggacatgcagccgtttggcatggttatgaagttcatggaatggaaaaaataccagaagatggaccagcacttataattttttatcatggagctattcctatagatttttactatttcatggctaaaatatttatacacaaaggcagaacttgccgagtagtagctgatcactttgtctttaaaattccagggtttagtttattactggatgtgttttgtgctctacatggaccaagagaaaaatgtgttgaaattctgaggagtggccacttgttagctatctcaccaggtggagttcgagaagccctaattagtgatgaaacttataacatcgtatggggtcatcgcagaggctttgctcaggttgcaattgatgcaaaagtgcccattattcctatgtttacacaaaatattcgagaaggatttagatcacttggaggaacaaggttatttaggtggctttatgaaaaattccgctatccatttgctccaatgtatggaggttttccagtgaagttacggacctatttaggcgaccccattccgtatgacccacagataacagcggaagaattagctgaaaagacgaagaatgctgttcaagctttgattgataagcaccaaagaataccaggaaacattatgagtgctttgttagaacgttttcattgataacaaagggtcaactagaagatgatttagtacatttatattaaatgtttgtatctaaggtactgtcttctgaattttgtaggtcctataattagtattttttaaaaaaatcatgttaataagcatctttcacagaattcgtttctttaaaatagtcaattttgtttttgcaattgtgtcaaatactaacaaattacacacctagtaattcagaaaaagatgtcttatttgtaaattcctaacaatttatgctaaacatatagattcttaagtttattaataacagcagtttaggttaaacaaacattcctggataatgcgttaaatttctgtatctgtcgccctgagctgattttgaaagatggtataagctaggggttagtatagttgtttaagttagaaaaaacatgctgttgtctgcccctcattcccttcatgaccttgggcaagtcacgtaatgtttttgtgcctcaacaattcactttttaaaaacatgatcgtatgatgaatgatattattttgttatttatatttactgtgattgataactgttgaaccaaaataataaaataattaatttaaacaatgtcaaaatcctttagcagttatgtatatattttctccattgtgtgtttaaattatgtcatgtccagttgccaagcacaatgaaaaagatgtattattttttaaattgaataaaaaattaggaaaaataaaatttctaattattatttttagtatgatatttttaacaagagtctataggcaaacaatatagggtgtgctgtgcattgtcagccctatactgtggtcttaataatgccagcttaaaaatcactgttgtgctctgcatttcgtgtgttagaagctgattctaggctgaggaaagcaagagttctctacttttgctcaatattgaggcttacccagtttgactctacagccagtgaagtggtttattgcttcaataaaaatatacttgaatgatgaatttatttatgttttgttttgtttttatttagagatggggttttgccatgttggccaggctggtcttgaactcctgacctcaggtgatccacctgcctcagcctcccaacttgctgggattacaggtgtgagccaccatgcccagcctgaatgatgaatttatgtgaacacaaagccctctgaaaaattaatgattttcaatttgttgtcttcttgaaaactgaatttaagtattatttaaacagaaaagtgtcagaaatcaaatgcagtatctccctctcccttttttaaatgttgaattagtagggtttttgtatagctttttgtattgtgtgtatttatgatatgtgaaatgtacataaaattaaacaatgtgaaaataaacctgagttgcagtt

SEQ ID NO: 194345 - DNA, 4512 bp, Homo sapiens
  Payload ID: 18400
  Gene Name: transmembrane protein 68
  ENST ID: ENST00000617977
  CDS Start-End: 2871-3146
atgaaagcttgcgtgccagtgtagaaaccatattcccagactatagtgaggaatactgagcctgctagggtaagctttcttttatttagtgggccctagaaatgtccagcttctagagaggtagctatttaaggaatgatatttcaacaggaaagtctttaaatgcatacatcaatacagaattctgggatcatgccagtcagtagatataaatccagccatactggttggaagtggcaaatggtatatgcatgagctgaaatatttctgtttcttcttggacattttaggttctcaactataaagacattttataactatttaaaacattaggatttcagccatactaatattttattttacaaaactagttttattttacaaaactagtagtgatttccagataacagtctgaattttttactgaagaattcagtgtctgagtattgtggaagctaccaaaataataataataataataattaaaggccaggtatggaggctcatgcctgtaatcccagcactttgggaggctgaggcaggaggatcccttgaaaccagttcaagactagcctgagcaacaaagcaagaacccatctctacaaaaacaagcaaataaactatatttacttatatgtataaataattcagtgtattttgtcttctttatcttcttgtgttttagctttatgagttaactccatcaaattttaatttcttcatttgactgctcttttttacttttaatttttttgagacagagtcttgctctgtcacccaggctggagtgcaatggcgtgatctctgctcattgcggcctccacctcccgggttcaggtgattctcctgcctcagcctcccgagtaggtgggttacagacgctggccaccacgcctggctgatttttgtatttttagtagagatggggttcaccatgttggccaggctggtcttgaactcctgacctcaagtgatccacctgccttggcctcccaaagtgctgggattacaggcatgagccaccatgcccggccctgactgcgcttcttttctttacctaacttctccccttttcctaactgattttgagattgctgctgtctatttctgacttttgtattcagagaatacaaattaattcatttagaagcattgtctctttgctctgtttactcactgtttgtttaattcctccatctcactttctgttagcacctagtggattccaggcacagttctaggtgctatacaacagtgaacaaaacaatgtccttgcagtatattaggcgtcttccttctggcgagaggagagatataacaaatgattggttagttatatgtgaagtagtaggttttatgaaggctttgcctgtagtctctttcctttagtccactgtattttactgttttccaaagcttagtaggaataacttttaagcttatttaaatatctcacctattaagcaggtaattttatattaggcatttactcatggttgactgtaagtaatgtaatactcccccaaccaaaattttatctattctgaaacatcatttaattcagtatattatgtatatttttaagtgtttcattcaattttttatctattttagtattcacagtggcataacctctttacatatcaatacttcattattttatatgtatttaaggttttcattattaaaaatatactgaatcattgatatttttggagaataaaaatcatgaacttattagcagaaattctctacaatcaattatggagaattcttttttttttttttttttttttttgggagacagtgtctcgctctattgcccttactggagtgcagtggtgtgatcttggttcactgcaacctctgcctcctggtcttaaacaatcctcccacctcagcctcccaggtaactgagactacaggcacgtaccaccgcaactggccaaattctttaatatatgtgcttttcctttttgtctgtgtggttgagtcttatagttacttttcattgatgttgagtattttagatttaatagactcacaaaaaattttaccaattccacgacagcatcttgccaaaacttgtcatttaaatatacataaatttccctttggagccaggtgcagtggctcacgcctgtaatcctaacactttgggaaactaaggttggaggattgcttgaacctgggaggttgagactgcagtgagccgtgatcacgccactgcaatccagcctgagccacagagtgagactctgtccccaactccccccgaaaaattacccttagaatccctgcttgcaacttttctccagtgagcgtactattcagtagcccactaaagacaattcagtttaccacattcattttatttagtgaaattaatgattactgtaatctctattttgagtttcaaggttttatgtgaaatgttaggaaaactggtcaatgaaatattatatattaccactggagggtagtgtttccaatttctatttttacaaatgatcaagttgaatttagttgatagactaatcgtgtgcttttattttaaaaatattttattttcataatatcaaacaggccctcaaaagtttgcataatcactttgtgatcccctcacgcccccatgctaatgaatttgtaccccttttctctttctcccatgccaatactaacgagacccgaccctgcttagcttctgggatcagacgagattgggcatgttcagggtggcatggccataggtgccttttctctttcttaaaaaaaaaaagtttgcattagttactctaatggagacattgaatggattaatttatttactttttaattcaaattctccttttctttagcccattattcctatgtttacacaaaatattcgagaaggatttagatcacttggaggaacaaggttatttaggtggctttatgaaaaattccgctatccatttgctccaatgtatggaggttttccagtgaagttacggacctatttaggcgaccccattccgtatgacccacagataacagcggaagaattagctgaaaagacgaagaatgctgttcaagctttgattgataagcaccaaagaataccaggaaacattatgagtgctttgttagaacgttttcattgataacaaagggtcaactagaagatgatttagtacatttatattaaatgtttgtatctaaggtactgtcttctgaattttgtaggtcctataattagtattttttaaaaaaatcatgttaataagcatctttcacagaattcgtttctttaaaatagtcaattttgtttttgcaattgtgtcaaatactaacaaattacacacctagtaattcagaaaaagatgtcttatttgtaaattcctaacaatttatgctaaacatatagattcttaagtttattaataacagcagtttaggttaaacaaacattcctggataatgcgttaaatttctgtatctgtcgccctgagctgattttgaaagatggtataagctaggggttagtatagttgtttaagttagaaaaaacatgctgttgtctgcccctcattcccttcatgaccttgggcaagtcacgtaatgtttttgtgcctcaacaattcactttttaaaaacatgatcgtatgatgaatgatattattttgttatttatatttactgtgattgataactgttgaaccaaaataataaaataattaatttaaacaatgtcaaaatcctttagcagttatgtatatattttctccattgtgtgtttaaattatgtcatgtccagttgccaagcacaatgaaaaagatgtattattttttaaattgaataaaaaattaggaaaaataaaatttctaattattatttttagtatgatatttttaacaagagtctataggcaaacaatatagggtgtgctgtgcattgtcagccctatactgtggtcttaataatgccagcttaaaaatcactgttgtgctctgcatttcgtgtgttagaagctgattctaggctgaggaaagcaagagttctctacttttgctcaatattgaggcttacccagtttgactctacagccagtgaagtggtttattgcttcaataaaaatatacttgaatgatgaatttatttatgttttgttttgtttttatttagagatggggttttgccatgttggccaggctggtcttgaactcctgacctcaggtgatccacctgcctcagcctcccaacttgctgggattacaggtgtgagccaccatgcccagcctgaatgatgaatttatgtgaacacaaagccctctgaaaaattaatgattttcaatttgttgtcttcttgaaaactgaatttaagtattatttaaacagaaaagtgtcagaaatcaaatgcagtatctccctctcccttttttaaatgttgaattagtagggtttttgtatagctttttgtattgtgtgtatttatgatatgtgaaatgtacataaaattaaacaatgtg

SEQ ID NO: 194346 - DNA, 2439 bp, Homo sapiens
  Payload ID: 18401
  Gene Name: transmembrane protein 69
  Uniprot ID: Q5SWH9
  ENST ID: ENST00000372025
  CDS Start-End: 1158-1901
gggattccggcgagagcctgcgcttgcgacagtgccgtttctcctacctgaagtctcattgggtatcgcactactggaaggggcggcgctgccatgacagagaaggcaataaaactgaaggcctagctcgactaaaagcgcttactattaaggaagacttcgctgtggctccatccggcacggaaagctaaaccgtgtaatggctggcaaccaggaagctagactacctagaatccggaggattggagggactggccggcgtgggcccctgagatctcctactacatgtcttcagttttatccatagacacggaagggcactaaaattgcctggtgccatttcctgtgaaacaagtctagataagagaagggacttgcccaaggtcacatagccgagaaataaagccgagggcagtaggagaaatgatctgactttccgaaccacccccaagcctagggcccttatcaccacacctttcatggaagtgaaaatcctgctcttgtgctctttaacccttaatgaagtttataggtcccagcaaagaaaatggatgtaagaactgggcttttttccccctctaaatgatagtaaagggccctaatgcagtgagatgtgtccccataggccttataaaccctgttttgcaaagtaaaacataagtcccacagatggcaagcaattcaggtcacactgggcctaaaatcccgtctcttaccttccttcaccaccatcattctgagattgtttcagtacttgcactctacttacccgaactctgtgggcagattctgctgcctgggagccctggaatagaacttcaaggaccgttcaacatctggattcaactagaaattaagaatggcccccaaacagaaagccgggcctaggaaccaattagcgcaggtcaagtccctacccggactcattttttttcagccctcaggaagtaggggcctctctgaatccacttgccggaagtgcctttccagtggacctgggctgttgttgcggttgttttccttctctccgtgcaacgctggcaagtctcaaagtcgccacagaaacatgcccctgattcagtgcctctgcttagctgtaacatgttaatcagaactacctggcatcttcctgaacaagactttcaataggggccagtatgcttcgcttcatccagaagttttctcaagcatcttcaaagatactgaagtactctttcccagtgggactaagaaccagcagaacagatatactttctctcaagatgtctctccagcaaaacttttccccatgtccaaggccttggctttcctcatcatttccagcgtatatgagcaagacacagtgctatcatacatccccctgcagctttaaaaagcagcagaagcaagcacttctagccagaccctcaagcaccatcacttacctaactgacagcccaaagccagcattatgtgtaactctggcaggactaatccccttcgttgctccaccactggtcatgctgatgacaaaaacttatattcccatattagcttttactcagatggcttatggagccagtttcctatctttcttgggtgggatcagatggggttttgctctaccagaaggtagtccagccaaaccagactaccttaatttagctagcagtgcagctcctcttttcttttcatggtttgccttccttatttctgaaagacttagtgaagccatagtcacagtaataatgggtatgggagtagcattccaccttgaactttttctcttaccacattatcccaactggtttaaagccctgaggatagtagtcactttattggccactttttcatttataatcactttagtagttaaaagtagttttccagaaaaaggacataagagacctggtcaagtataaaaaatataaaagtctgggaagtgaggagcacctctgcccagctgctgccccgtctgggaagtgaggagcgcctctgcctggccgcctgaccatctgggaagtgtgacaagcgcctctgcccggccgctgtgcaaccttccacgtgtgaagtgacagccttgtgtgtgatcttttctgtcttccccaagtttgcattttcgacattaaagtttactttttagttaaaagttttaaaaatatatatatataaatacactgtagataacatttgtatgccagctacacctttttctacttctgtttggctttttttccccacaccaatggtaatttatcttcacagattgttcttcatttctagaaattgttacttcatggtaattacttgagcaaaagcttgaaaatccctgacaagtacttttcatctcatagtatattagttttcactcagtcattttatgaataatatagttatccacttaaacatttcaatattttaaccatcttgaaaattaaagattaaaaatcccctttgtta

SEQ ID NO: 194347 - DNA, 2018 bp, Homo sapiens
  Payload ID: 18402
  Gene Name: transmembrane protein 70
  Uniprot ID: Q9BUB7
  ENST ID: ENST00000312184
  CDS Start-End: 74-856
cgggtgggaagccgtgtctcgcagtcgtggactcgtgcagctggggcgtccgcagccgctcgtcacccgcgtgatgctgtttctggcgttgggcagcccgtgggcggtcgaactgcctctctgcggaaggaggactgcattgtgtgcggccgccgcgctccgaggtccccgggcctctgtctcccgggcgtcctccagcagcgggccttcggggccggtagccggctggagtacggggccttcgggagccgcgcgccttctccggcgtccgggtcgagcgcagatccctgtttattgggaaggatatgttcgattcttaaatacgccatctgacaaatcagaagatggaaggctaatttatactggcaatatggcccgagcagtgtttggtgtgaaatgtttctcttattctacgagtctgattggccttacatttctgccatacatttttacacaaaataatgctatttctgaaagtgtgcctctgcctattcaaatcatattctatggcatcatgggaagctttacggtgatcaccccagtgctgcttcactttattacaaaaggctatgtcattcgattgtaccatgaggccacaacagacacttataaagccattacctacaatgctatgcttgcagaaacgagtacagtgtttcaccagaatgatgtgaagattccagatgctaaacatgtatttaccacattttatgctaaaacaaaatcactgttagttaatccagtgctctttccaaaccgtgaagactatatccatctaatgggttatgacaaagaagaatttattttgtatatggaagaaaccagtgaagagaaacggcataaagatgacaaatgagcctatttgttagtgttcgtgctcaaatgtgatttacgttttaatgtataataataaaattgccttttgcattccgttagtgactgattgttaaaaataatttgaaattatcaaagcttttaatttccagagaatgatgtttgtttataataaaacaagctatgtttgaaaaccaaaatgtagtatctaccattcgtgttttagaaaggtatgtgaataaatatgttcatgctagtataagagttctgtgttactgtggttgactctaaactggggatctgatgtcagtagcaaatgggagagttgctttattctttgtgtatggatttttctaagtgtataaatattttccgacattaaaagacattttctctttgaggaagacacagtcataggtggtgcggagctgtggtccacctgctcctgctcctgactcactgctctttgctgttgcctgaggaccaagtctgtcaggaagctggctaggaagccttgcagcagccatggcttttaaacataccagaaaaacacccgtggagtcagaggtggcaattcaccgaattcatatcactctaacgagttgcaacgtaaaatccctggataaggtgtgtgctgacttgatctgaggagcaaaggaaaagaatcagtgaaaggaccagtttgaatgcctaccaagactttgagaatcactacaagaaaaacttacggtgaaggttctaaggcatgggatcgtttccagatgagaatccacaagcgactcattgacttgcgcagtcctcagatagttaagcagattacttccatcagtattgagccaggagttgagatggaagtcaccattgcaaatgcttaagtcaactgttttcataaattgattaccagttgttaaaaaattttcaaaaaaccgcaaaatttcaagaaattcacaaattatgggagcagttttaagtcttctttggttcagaacacaggtttttgcctaacccctggcatgattgcccataagaacatacatgtacagttgaactggtggttagctatacgggaaatggtaagtagtgttgtcttcagtatcttaatttgtttctgcaactgtgcactcctcccttggtggcaccctatgggtgtaggaaaaccactgttattaaacaggtgaaaaata

SEQ ID NO: 194348 - DNA, 928 bp, Homo sapiens
  Payload ID: 18402
  Gene Name: transmembrane protein 70
  ENST ID: ENST00000416961
  CDS Start-End: 88-423
acttgtgcggcagtcgggtgggaagccgtgtctcgcagtcgtggactcgtgcagctggggcgtccgcagccgctcgtcacccgcgtgatgctgtttctggcgttgggcagcccgtgggcggtcgaactgcctctctgcggaaggaggactgcattgtgtgcggccgccgcgctccgaggtccccgggcctctgtctcccgggcgtcctccagcagcgggccttcggggccggtagccggctggagtacggggccttcgggagccgcgcgccttctccggcgtccgggtcgagcgcagatccctgtttattgggaaggatatgttcgattcttaaatacgccatctgacaaatcagaagatggaaggctaatttatactggcaatatggcccgagcagtgtttggctggagtgcagtggcatgatcttggttcaccatactcttcgcctcccatgttcaagcgattctcctggctcagcctcctgctgggattacaggtgtgaaatgtttctcttattctacgagtctgattggccttacatttctgccatacatttttacacaaaataatgctatttctgaaagtgtgcctctgcctattcaaatcatattctatggcatcatgggaagctttacggtgatcaccccagtgctgcttcactttattacaaaaggctatgtcattcgattgtaccatgaggccacaacagacacttataaagccattacctacaatgctatgcttgcagaaacgagtacagtgtttcaccagaatgatgtgaagattccagatgctaaacatgtatttaccacattttatgctaaaacaaaatcactgttagttaatccagtgctctttccaaaccgtgaagactatatccatctaatgggttatgacaaagaagaatttattttgtatatggaagaaa

SEQ ID NO: 194349 - DNA, 617 bp, Homo sapiens
  Payload ID: 18402
  Gene Name: transmembrane protein 70
  Uniprot ID: Q9BUB7
  ENST ID: ENST00000517439
  CDS Start-End: 76-399
gtcgggtgggaagccgtgtctcgcagtcgtggactcgtgcagctggggcgtccgcagccgctcgtcacccgcgtgatgctgtttctggcgttgggcagcccgtgggcggtcgaactgcctctctgcggaaggaggactgcattgtgtgcggccgccgcgctccgaggtccccgggcctctgtctcccgggcgtcctccagcagcgggccttcggggccggtagccggctggagtacggggccttcgggagccgcgcgccttctccggcgtccgggtcgagcgcagatccctgtttattgggaaggatatgttcgattcttaaatacgccatctgacaaatcagaagatggaaggctaatttatactggcaatatggcccgagcagtgtttggtaagtaattggaggtgtgaaatgtttctcttattctacgagtctgattggccttacatttctgccatacatttttacacaaaataatgctatttctgaaagtgtgcctctgcctattcaaatcatattctatggcatcatgggaagctttacggtgatcaccccagtgctgcttcactttattacaaaaggctatgtcattcgattgtaccatgaggccacaaca

SEQ ID NO: 194350 - DNA, 1993 bp, Homo sapiens
  Payload ID: 18403
  Gene Name: transmembrane protein 71
  Uniprot ID: Q6P5X7
  ENST ID: ENST00000356838
  CDS Start-End: 144-974
actcatttataccaggaaacagacaagagaacaagaggctgccgaagacaaaacttctctgcaagcacctgtgcacagcaatgtgcgtgggcatctgtgagaagaagagaatctgtgaagtttgagcaagcggccttcccaagatgtaccgaatatctcaactgatgtcaacaccagtagcaagttcttccaggttggaaagagaatatgctggagagctgtctcccacgtgcattttcccaagtttcacctgtgattccctggatggttaccattcttttgaatgcggctccatagatcccctgacaggctcccactatacctgtcgccgaagtcccagactcctcaccaatggctactatatttggactgaagacagcttcctgtgcgacaaagatggcaacataactctgaacccatcccagaccagcgttatgtataaggagaacttagttagtacctccaaatcttggctgcatggaagtatctttggtgacatcaactcttctccaagtgaagacaactggttgaaggggaccaggaggttggacacagaccattgcaatggaaatgcagatgatttagactgttcttctctgactgatgactgggagtcagggaagatgaatgcagagtctgtgatcacctcctcttccagccacatcatatctcagcctcctggaggaaactcccatagcttgtctcttcagtcccagttgacagcttctgaacgtttccaagagaatagttcggatcattcagaaaccaggttgttgcaagaggtcttctttcaggcaatcctgcttgctgtgtgcttaatcatttctgcatgtgcaagatggtttatgggagaaatattagccagtgtcttcacatgctcattgatgataactgtagcttatgtgaaatcattgtttctcagccttgccagctatttcaaaaccactgcctgtgctcggtttgtcaaaatttgacaaccatttaggaatgccttcgatgaatgtcctccatctgaatatctggaaattgtccaacttgcagtctacttggaatcaagtgttttattggaagggagtaagcgagtaatggagaaaaagccattttagtttgactatgtgattttaaaatgatctcagtttttccatcaaaattataatatgctcatgaaaataatattaatttgccttccctttgcaaacaccggcagttgaaaggaaaaggacggggaatgtgatggaaaagagaccgcctggaataaatgtccccctatgattctttaaggcagtggttctcgagcttgaattttcattaggaaattctgtgaggagcttgtaaccagatttctgggtctgccacatgcacctatctcttgctgaattgctttaatagaataatgagagcaagtttgtctaactaataccaacctgacaacttgaataacaataaatgcaatttgtacataaaatataatgctgcaaaagtttgtcattcacctcagtggagtgacttgatattaggtggtaaccgtagatgatggttaatatgaaaatggacaggaaagaagcattttctgaaagttatattcttttgaaccacgttctaaaccaagtttttaatcttcttggggctcgtaattacctttcactttaatgtcacttaaagatataacacagaaaaatgccttgagggcaaaatataggcaaaacaccaatgcgctttcaaatgcatgaaaatggtgcagttgtacccttgagccttgactcaagggctgtagatgttccctttccaccccccacacttggtgcgtgttcacaaagcaaatatggcctgtaattcaaatttgttctatgtgatactctctgagtaaaaactcatacatgcagaaaattgtctttgctcgaaatgataatgccaaaatataactttatatataatttgcatttagtacatttttggttaaaaaataaactaataaataagtgaagtcatcagc

SEQ ID NO: 194351 - DNA, 1861 bp, Homo sapiens
  Payload ID: 18403
  Gene Name: transmembrane protein 71
  Uniprot ID: Q6P5X7
  ENST ID: ENST00000377901
  CDS Start-End: 144-842
actcatttataccaggaaacagacaagagaacaagaggctgccgaagacaaaacttctctgcaagcacctgtgcacagcaatgtgcgtgggcatctgtgagaagaagagaatctgtgaagtttgagcaagcggccttcccaagatgtaccgaatatctcaactgatgtcaacaccagtagcaagttcttccaggttggaaagagaatatgctggagagctgtctcccacgtgcattttcccaagtttcacctgtgattccctggatggttaccattcttttgaatgcggctccatagatcccctgacaggctcccactatacctgtcgccgaagtcccagactcctcaccaatggctactatatttggactgaagacagcttcctgtgcgacaaagatggcaacataactctgaacccatcccagaccagcgttatgtataaggagaacttagttaggatatttagaaagaaaaagagaatctgccattccttttcttctctcttcaacctcagtacctccaaatcttggctgcatggaagtatctttggtgacatcaactcttctccaagtgaagacaactggttgaaggggaccaggaggttggacacagaccattgcaatggaaatgaaaccaggttgttgcaagaggtcttctttcaggcaatcctgcttgctgtgtgcttaatcatttctgcatgtgcaagatggtttatgggagaaatattagccagtgtcttcacatgctcattgatgataactgtagcttatgtgaaatcattgtttctcagccttgccagctatttcaaaaccactgcctgtgctcggtttgtcaaaatttgacaaccatttaggaatgccttcgatgaatgtcctccatctgaatatctggaaattgtccaacttgcagtctacttggaatcaagtgttttattggaagggagtaagcgagtaatggagaaaaagccattttagtttgactatgtgattttaaaatgatctcagtttttccatcaaaattataatatgctcatgaaaataatattaatttgccttccctttgcaaacaccggcagttgaaaggaaaaggacggggaatgtgatggaaaagagaccgcctggaataaatgtccccctatgattctttaaggcagtggttctcgagcttgaattttcattaggaaattctgtgaggagcttgtaaccagatttctgggtctgccacatgcacctatctcttgctgaattgctttaatagaataatgagagcaagtttgtctaactaataccaacctgacaacttgaataacaataaatgcaatttgtacataaaatataatgctgcaaaagtttgtcattcacctcagtggagtgacttgatattaggtggtaaccgtagatgatggttaatatgaaaatggacaggaaagaagcattttctgaaagttatattcttttgaaccacgttctaaaccaagtttttaatcttcttggggctcgtaattacctttcactttaatgtcacttaaagatataacacagaaaaatgccttgagggcaaaatataggcaaaacaccaatgcgctttcaaatgcatgaaaatggtgcagttgtacccttgagccttgactcaagggctgtagatgttccctttccaccccccacacttggtgcgtgttcacaaagcaaatatggcctgtaattcaaatttgttctatgtgatactctctgagtaaaaactcatacatgcagaaaattgtctttgctcgaaatgataatgccaaaatataactttatatataatttgcatttagtacatttttggttaaaaaataaactaataaataagtgaagtcatcagc

SEQ ID NO: 194352 - DNA, 1974 bp, Homo sapiens
  Payload ID: 18403
  Gene Name: transmembrane protein 71
  ENST ID: ENST00000523829
  CDS Start-End: 123-1064
gacaagagaacaagaggctgccgaagacaaaacttctctgcaagcacctgtgcacagcaatgtgcgtgggcatctgtgagaagaagagaatctgtgaagtttgagcaagcggccttcccaagatgtaccgaatatctcaactgatgtcaacaccagtagcaagttcttccaggttggaaagagaatatgctggagagctgtctcccacgtgcattttcccaagtttcacctgtgattccctggatggttaccattcttttgaatgcggctccatagatcccctgacaggctcccactatacctgtcgccgaagtcccagactcctcaccaatggctactatatttggactgaagacagcttcctgtgcgacaaagatggcaacataactctgaacccatcccagaccagcgttatgtataaggagaacttagttaggatatttagaaagaaaaagagaatctgccattccttttcttctctcttcaacctcagtacctccaaatcttggctgcatggaagtatctttggtgacatcaactcttctccaagtgaagacaactggttgaaggggaccaggaggttggacacagaccattgcaatggaaatgcagatgatttagactgttcttctctgactgatgactgggagtcagggaagatgaatgcagagtctgtgatcacctcctcttccagccacatcatatctcagcctcctggaggaaactcccatagcttgtctcttcagtcccagttgacagcttctgaacgtttccaagagaatagttcggatcattcagaaaccaggttgttgcaagaggtcttctttcaggcaatcctgcttgctgtgtgcttaatcatttctgcatgtgcaagatggtttatgggagaaatattagccagtgtcttcacatgctcattgatgataactgtagcttgtttgtcaaaatttgacaaccatttaggaatgccttcgatgaatgtcctccatctgaatatctggaaattgtccaacttgcagtctacttggaatcaagtgttttattggaagggagtaagcgagtaatggagaaaaagccattttagtttgactatgtgattttaaaatgatctcagtttttccatcaaaattataatatgctcatgaaaataatattaatttgccttccctttgcaaacaccggcagttgaaaggaaaaggacggggaatgtgatggaaaagagaccgcctggaataaatgtccccctatgattctttaaggcagtggttctcgagcttgaattttcattaggaaattctgtgaggagcttgtaaccagatttctgggtctgccacatgcacctatctcttgctgaattgctttaatagaataatgagagcaagtttgtctaactaataccaacctgacaacttgaataacaataaatgcaatttgtacataaaatataatgctgcaaaagtttgtcattcacctcagtggagtgacttgatattaggtggtaaccgtagatgatggttaatatgaaaatggacaggaaagaagcattttctgaaagttatattcttttgaaccacgttctaaaccaagtttttaatcttcttggggctcgtaattacctttcactttaatgtcacttaaagatataacacagaaaaatgccttgagggcaaaatataggcaaaacaccaatgcgctttcaaatgcatgaaaatggtgcagttgtacccttgagccttgactcaagggctgtagatgttccctttccaccccccacacttggtgcgtgttcacaaagcaaatatggcctgtaattcaaatttgttctatgtgatactctctgagtaaaaactcatacatgcagaaaattgtctttgctcgaaatgataatgccaaaatataactttatatataatttgcatttagtacatttttggttaaaaaataaactaataaataagtgaagtcatcagcaaa

SEQ ID NO: 194353 - DNA, 545 bp, Homo sapiens
  Payload ID: 18403
  Gene Name: transmembrane protein 71
  ENST ID: ENST00000519016
  CDS Start-End: 422-545
aaaagaaaacaagagaagttgtaagactgactttcccaagaactatacactcatttataccaggaaacagacaagagaacaagaggctgccgaagacaaaacttctctgcaagcacctgtgcacagcaatgtgcgtgggcatctgtgagaagaagagaatctgtgaagtttgagcaagcggccttcccaagatgtaccgaatatctcaactgatgtcaacaccagtagcaatttcacctgtgattccctggatggttaccattcttttgaatgcggctccatagatcccctgacaggctcccactatacctgtcgccgaagtcccagactcctcaccaatggctactatatttggactgaagacagcttcctgtgcgacaaagatggcaacataactctgaacccatcccagaccagcgttatgtataaggagaacttagttaggatatttagaaagaaaaagagaatctgccattccttttcttctctcttcaacctcagtacctccaaatcttggctgcatggaagtatctttggtgacatca

SEQ ID NO: 194354 - DNA, 558 bp, Homo sapiens
  Payload ID: 18403
  Gene Name: transmembrane protein 71
  ENST ID: ENST00000522780
  CDS Start-End: 1-302
cagatgatttagactgttcttctctgactgatgactgggagtcagggaagatgaatgcagagtctgtgatcacctcctcttccagccacatcatatctcagcctcctggaggaaactcccatagcttgtctcttcagtcccagttgacagcttctgaacgtttccaagagaatagttcggatcattcagaaaccaggttgttgcaagaggtcttctttcaggcaatcctgcttgctgtgtgcttaatcatttctgcatgtgcaagaaacaacaatgccaaccacacgatgggtgaggattaaacaggagaatgcacaggaagcttgcagcacctggtgagaactcaacgaaggtgtgggtccgccttctgatgacggaacctgttacagctgtctgtctgaagcgatgagatgaggcaacccttgctctgggaaggcagagtcacctggcatcatcaaggcctttagcacctgctaccacttgtctgctacgaagtaccagaaaatgacaaaaacctcggacttgaagcaaataaactaagtaaaaactctgaacacc

SEQ ID NO: 194355 - DNA, 556 bp, Homo sapiens
  Payload ID: 18403
  Gene Name: transmembrane protein 71
  ENST ID: ENST00000519187
  CDS Start-End: 260-556
gaggctgccgaagacaaaacttctctgcaagcacctgtgcacagcaatgtgcgtgggcatctgtgagaagaaggaatgtccaggctgataaaaactattaaaatcactctctgtgactacctgtcaatggttcaagttgttgggaaaaagacagacaccaatctccaagcactgtttgaaacttgataatgaagttgacttgtgtcagatgattaaaatacacagaatctgtgaagtttgagcaagcggccttcccaagatgtaccgaatatctcaactgatgtcaacaccagtagcaagttcttccaggttggaaagagaatatgctggagagctgtctcccacgtgcattttcccaagtttcacctgtgattccctggatggttaccattcttttgaatgcggctccatagatcccctgacaggctcccactatacctgtcgccgaagtcccagactcctcaccaatggctactatatttggactgaagacagcttcctgtgcgacaaagatggcaacataactctgaacccatcccagaccagcgttatgtat

SEQ ID NO: 194356 - DNA, 496 bp, Homo sapiens
  Payload ID: 18403
  Gene Name: transmembrane protein 71
  ENST ID: ENST00000519304
  CDS Start-End: 222-496
actcatttataccaggaaacagacaagagaacaagaggctgccgaagacaaaacttctctgcaagcacctgtgcacagcaatgtgcgtgggcatctgtgagaagaaggaagcttcgtatttcagtaataattttgtcctttgtcaattggaagaagaggctgggaactccctttggaaggaacacagaatctgtgaagtttgagcaagcggccttcccaagatgtaccgaatatctcaactgatgtcaacaccagtagcaagttcttccaggttggaaagagaatatgctggagagctgtctcccacgtgcattttcccaagtttcacctgtgattccctggatggttaccattcttttgaatgcggctccatagatcccctgacaggctcccactatacctgtcgccgaagtcccagactcctcaccaatggctactatatttggactgaagacagcttcctgtgcgacaaagatggcaacataactctgaaccc

SEQ ID NO: 194357 - DNA, 596 bp, Homo sapiens
  Payload ID: 18403
  Gene Name: transmembrane protein 71
  ENST ID: ENST00000522334
  CDS Start-End: 407-596
aaaagaaaacaagagaagttgtaagactgactttcccaagaactatacactcatttataccaggaaacagacaagagaacaagaggctgccgaagacaaaacttctctgcaagcacctgtgcacagcaatgtgcgtgggcatctgtgagaagaaggttcttccaggttggaaagagaatatgctggagagctgtctcccacgtgcattttcccaagtttcacctgtgattccctggatggttaccattcttttgaatgcggctccatagatcccctgacaggctcccactatacctgtcgccgaagtcccagactcctcaccaatggctactatatttggactgaagacagcttcctgtgcgacaaagatggcaacataactctgaacccatcccagaccagcgttatgtataaggagaacttagttaggatatttagaaagaaaaagagaatctgccattccttttcttctctcttcaacctcagtacctccaaatcttggctgcatggaagtatctttggtgacatcaactcttctccaagtgaagacaactggttgaaggggaccaggaggttggacacagaccattgcaatg

SEQ ID NO: 194358 - DNA, 3009 bp, Homo sapiens
  Payload ID: 18404
  Gene Name: transmembrane protein 72
  Uniprot ID: A0PK05
  ENST ID: ENST00000389583
  CDS Start-End: 314-1141
gatctcaggcggctgggctgcgctggggctgagcggctccagcccaggctggggttgtgtgagcagcaggagcattcttccaaggtaatgattaagctgagtgcctggcaagggcacgggctgagagcacagaaggtgagccctattcacacctcggccaggctgcggtggccaggactggtttgggaaggcagggccccggtgtgcagccacagccagcagcctcctacctacacaagggtgttcgggagcatctcagggccgaagactttgctgcctgccctgccaggactttgtcctcacccctggcaccatgcagctccaggtgttctggactgggctggaatacacctgccggctcctgggcatcaccactgctgcagtgttgatcggcgtgggcactgagaccttcctccagggccagttcaaaagcctggctttctatctgctgtttacaggagccgctgtctccatatgtgaaggggcctactttgtggctcagctgctggccatctgcttccagtgtcaaccagggtccctggcagacagagtaagggagaaagcccactggctgggctgcttccagaagttcctggcctacctgctgctgtcggtggcctgcttcctccacccggtcctggtctggcacgtgaccatcccaggctccatgctcatcatcaccggcctggcctacttccttctgagcaagcggaagaagaggaaagctgcccccgaggtgctggcctccccagagcagtacacagacccctctagcagcgctgtgagcaccaccggctctggggacacagagcaaacctacactttccatggggccctcaaggaggggcccagctcccttttcatccacatgaagagtatcctgaaggggactaagaagcccagtgccctccagccccccaacaccctgatggagctgagcctggagccagccgactccctggccaagaagaagcaggtgcactttgaagacaacttggtccgcatagtcccctccctcgccgaaggtctggatgatggggacagtgagccagaggagaccacctctgacacgacacccatcattccccctccccaggccccactcttcctgtcatctcttacagccaccggcctgttctgagcgcttgctccagcctggaggacgctcagtgaggggtctacctagctcaatggccctccctggagtttcagggtcttctctggtcagcttttcaaggggtaaccagacacccccacactggctgggcccctgaggccatcaggaggtgtgactggccagcatttctggagaggcctcgagggaggcacaaacaaggctcacgccacctcaagccagcacaagctccttcctcctggccacaggtggggaaacccttatgcttccccaacaagaccatcactgccactgcgcacgaggctgcaggtgccattgactcagcccagaagggacagaggatgtctgcccagcaaaagcctctgggcttttcttactcccaacccagggcacaacactcagtgaggaacctatggtccacccatctctgcaggcccagggaagtgtcagtaacttaagcatctctaaggcagagaaggtggctgtgggtcttgaccaaccaagactgctcagggtcgggaggggaggctgcaggcctctggtgggagcagccgggccgtgggccacattctctgcatgctctagggctggggctgagctgctcaggaaaacaatgccgctctgtgctcactgtgggaaagccaggccagatgagcaaagctcattccagaaacatggctggggacttccagcctccttaccacatggcctttccaagattccaggttgatgatgcaaactgaacgcagtgaatgccagggcccagaaggcaatgtctgctgtgggcaggaccacagaggctgcccaggggtggcacagcacagagaagtgtcagtgccgtgtttaggcacttggtagcagaataggtgataaatataaatgtcttcaaaatgaaaggaagtgaggggggaagaagaggagggaaaatgggaggataggaggaagtgggcaggcaggcaagttctctgccatggggccacggaagtgacagttaacccagaaggaacaaagacatctgaatcagatattcctttgtaaatctgtaaaggatttgcaatataggctttacttctaaaaattgttgtcgggtccatgaggctgttgccaggaagagcacacacaccattcttcatggcaactgcagtgagggagcagtcaggaggaagagtcctgtggcttctcagtccctgtggaggctaacgcaaagctctgtagaacaagccttagagtgcatgctctatggtctaatgagaaacttgtgtttgtgcttgcacacgtttcaatgttccctacaggatattttacaaaggtatgaaaataatggccaaccagaagctagtatcagtttggggcctaaatgcagcaggtgttcctgataagcagataagcagagctcttcctgcagtagcccaggtctcaccaaatgacaaatggctaatcaagacactcctgcaagcccttgatggtgagagctgcagagctgtttcttcagctgccatcaaggcaggacctcaggacctgactgtctacagtcagggaatagtgaacaatatgggatatgggtataggtaggtggtagacaaggatcgtgccccatggctgatgggccgggtgtctcaggcaggccccctgtgcacagaaagagcctaagtgcagagaagccaggcatctttcccctgtcaactgtggaaggggaatgtgatggccacagacaccctcatggcacagacatggccagcctctgacgttcctctgcatcagagtagttctgtcctcgaagccccagtcagcagagctggatgaccagatcgcaagaagcaaaccagaaagtgtgatggcagagatgtcagatcccgtttaataaacacttcagt

SEQ ID NO: 194359 - DNA, 1018 bp, Homo sapiens
  Payload ID: 18404
  Gene Name: transmembrane protein 72
  Uniprot ID: A0PK05
  ENST ID: ENST00000544540
  CDS Start-End: 485-958
cgggctgagagcacagaaggtgagccctattcacacctcggccaggctgcggtggccaggactggtttgggaaggcagggccccggtgtgcagccacagccagcagcctcctacctacacaagggtgttcgggagcatctcagggccgaagactttgctgcctgccctgccaggactttgtcctcacccctggcaccatgcagctccaggtgttctggactgggctggaatacacctgccggctcctgggcatcaccactgctgcaggtttacaggagccgctgtctccatatgtgaaggggcctactttgtggctcagctgctggccatctgcttccagtgtcaaccagggtccctggcagacagagtaagggagaaagcccactggctgggctgcttccagaagttcctggcctacctgctgctgtcggtggcctgcttcctccacccggtcctggtctggcacgtgaccatcccaggctccatgctcatcatcaccggcctggcctacttccttctgagcaagcggaagaagaggaaagctgcccccgaggtgctggcctccccagagcagtacacagacccctctagcagcgctgtgagcaccaccggctctggggacacagagcaaacctacactttccatggggccctcaaggaggggcccagctcccttttcatccacatgaagagtatcctgaaggggactaagaagcccagtgccctccagccccccaacaccctgatggagctgagcctggagccagccgactccctggccaagaagaagcaggtgcactttgaagacaacttggtccgcatagtcccctccctcgccgaaggtctggatgatggggacagtgagccagaggagaccacctctgacacgacacccatcattccccctccccaggccccactcttcctgtcatctcttacagccaccggcctgttctgagcgcttgctccagcctggaggacgctcagtgaggggtctacctagctcaatggccctccc

SEQ ID NO: 194360 - DNA, 1741 bp, Homo sapiens
  Payload ID: 18405
  Gene Name: transmembrane protein 74
  Uniprot ID: Q96NL1
  ENST ID: ENST00000297459
  CDS Start-End: 180-1097
ggcgggcgctgcccacccggcggagccgagcggcgtgcagaggctacaagtgccgtagctggtgattgggggactttctccgggaaccgtgccgggagagcgcgcggtgctggagccgcaccgggtggccgaagcagaagactttccggaagctgctgggggatgtctgactagctctcatggagctccactaccttgctaagaagagcaaccaggcagacctctgtgatgccagggactggagttcaagagggctgcctggtgaccaggcagatacagcagccacaagagctgctctctgctgtcagaaacagtgtgcatccaccccaagagcaaccgagatggaagggtctaaacttagttcttctccagcatccccctcctcctctctgcaaaacagtactcttcagccagatgcctttccaccaggacttctccactcagggaacaaccaaataacagcggaacggaaagtctgtaactgctgcagccaggaattagaaacttcttttacctatgtggacaaaaacatcaacttggagcagcggaaccggagctcgccatcagcaaaagggcataatcaccctggggagcttggctgggaaaatccaaatgagtggtcccaagaggctgccatatctttgatatctgaagaggaggatgatacaagttcagaagccacgtcttcagggaagtctatagactatggtttcatcagcgccatcttgttcttggtcactgggatcctgctcgtgatcatctcttacatcgtcccacgggaagtgactgtggaccccaacactgtggcagcccgggagatggagcgcctggagaaggagagtgcgaggctgggggctcacctggaccgctgtgtgattgcggggctctgcctcctcacgctggggggcgtcatcctgtcctgcttgttaatgatgtccatgtggaagggggagctctatcgtcgaaacagatttgcctcttccaaagagtctgcaaaactctatggttctttcaacttcaggatgaaaaccagcacgaatgaaaacactctggaactgtccttggtagaggaagatgcgcttgctgtacagagttaattctggttgtgaatatcttgagagtctgccttggcattttataatatgaaaaaagttaatttataaaaattcacagtgcaatttatttgcctggcaagaaaagtttatttcacaaaccaacagccagtaagtgtttttgttctctatgtgtcttctatttagaagaaaagccatgtaagatgtataagaaaccacaaccagccacacctatccttctgaagagctgaaggctaattaatctgtaatggccaagaacttctacttcgatagaaaaatatttctaatgacccagtctacaaattatttcttttacacaaatatatgatgttattctttggacactaggtggtcctacacacagtaggatcaattgctaatctactttgtgaaaaagaactaagcactaatcaataataaggcttacatctaattctcaaaggtgcttatccattttcttgctaaattatccttcttgtaatttggctaaacactaaaacatggaatttttagtttgaatattttgaagtttgaggatgttgggctttccttattgtaaaaaatgttatgtttgaaattattcctgttttcaaaaatggtaattaagtcattaggataaactttctaataaaaaaaaattatgtaaa

SEQ ID NO: 194361 - DNA, 1730 bp, Homo sapiens
  Payload ID: 18406
  Gene Name: transmembrane protein 74B
  Uniprot ID: Q9NUR3
  ENST ID: ENST00000381894
  CDS Start-End: 673-1443
gactgcagatgaaattagtaactggtggggtcgtggggtgtgaatggtgggcgggagcagctatgtcagttggtgtgtttctgcttatgttagggtaattgggcacggcctttgtgtaactggtgaatatctctgaacctgggcatgaaacagagagatgtcctaactctgggtgagaggaatcctcatttttctctgccctctcactgtggcatcctaagaaaaaagttttgggttcctgcagcatgaaggagagctctgctcccagaatttgggagctccagatttcttccagggtgtggaggcatcaatatatcagtctgggaaaggggttcctgggccactccaggagctgagttgggtggaaggtgctgagggtgtgggtgggggccacttctgagcacccatgtggcacccactgctggtccctgtttgtggctgggcactcaggaaaatgtttttggtgctaagagtaaaaagccaaccaacaaacacatctcttttttctgtctattcactggaaagtaaaagcagtctgggcgcaggctggggacccagatggaattcaaacttatgcctgctctcaaggtgctcacggttgctgataaacagctggataaaatgaagagtctatgagtgagggatgcagagccagggaaggctggtggagtgatgccaccagcacaggggtatgagtttgcagctgccaaggggccaagggatgagctggggccctccttcccaatggcatctccccctggtctggaactgaagacactgagcaatggtccccaagccccaaggagatcagctcccctgggcccagtggccccaaccagggagggtgtggagaatgcctgcttctcctcagaggagcatgagacccatttccagaaccctgggaacacgagactgggcagctcacccagtccccctgggggtgtctcctcactgccccgatcccagcgggatgatctgtcccttcattcagaggaggggccagccctggagcccgtgagccgcccggtggattatggctttgtttccgccctcgttttcctggtgagtgggattcttctggtggtgacagcatacgccatcccccgtgaggctcgagtcaatccggacacagtgacagcgcgggagatggaacgactggagatgtactacgcccgcctaggctcccacctggacaggtgcatcatcgcaggcctcgggctgctcacggtgggcggcatgctcttgtcggtgctgctcatggtctccctgtgcaagggcgagctgtaccgccggaggaccttcgtccccggcaagggctccaggaagacctacggctccattaacctgcgcatgagacagctcaatggggatgggggccaggccctggtggagaatgaagttgtccaggtctcagagactagccacaccctccagaggtcttaagaactagcccaccttatctggctgctttagctccagtgctacaaggtccaccccctgctcccgcccacctgacccctgccaaggccctggggttttaaactgagctcacatagggccttgtggaagaagtactgggtgctggagggagagctcggggcccagcccatgccccacacgggcaagcagcccactgatctgttttgtagctgaggttttgcatacggttttgtttggaggatggcttctgctgctaaaaatacaaaagtttggaaaccgctgctcttgga

SEQ ID NO: 194362 - DNA, 983 bp, Homo sapiens
  Payload ID: 18406
  Gene Name: transmembrane protein 74B
  ENST ID: ENST00000429036
  CDS Start-End: 522-983
ctcactcccaggggcactttgtgtgtgtgtgtgtgtgtgtgtgtgtgtgtgtgtacgcgcgtgtgcgtgtgacggggtactcgcgtggcccgaagatccgagggtcacactacgtgacttctgggtgtctgtgggtactgctgtgggaacagctgctgggggagtgtgtgtggaactggagtgttcctttcaggacctgtctgactgcagatgaaattagtaactggtggggtcgtggggtgtgaatggtgggcgggagcagctatgtcagttggtgtgtttctgcttatgttagggtaattgggcacggcctttgtgtaactggtgaatatctctgaacctgggcatgaaacagagagatgtcctaactctggtaaaagcagtctgggcgcaggctggggacccagatggaattcaaacttatgcctgctctcaaggtgctcacggttgctgataaacagctggataaaatgaagagtctatgagtgagggatgcagagccagggaaggctggtggagtgatgccaccagcacaggggtatgagtttgcagctgccaaggggccaagggatgagctggggccctccttcccaatggcatctccccctggtctggaactgaagacactgagcaatggtccccaagccccaaggagatcagctcccctgggcccagtggccccaaccagggagggtgtggagaatgcctgcttctcctcagaggagcatgagacccatttccagaaccctgggaacacgagactgggcagctcacccagtccccctgggggtgtctcctcactgccccgatcccagcgggatgatctgtcccttcattcagaggaggggccagccctggagcccgtgagccgcccggtggattatggctttgtttccgccctcgttttcctggtgagtgggattcttctggtggtgacagcatacgccatcccccgtgaggctcgagtcaatccggacacagtg

SEQ ID NO: 194363 - DNA, 2175 bp, Homo sapiens
  Payload ID: 18407
  Gene Name: transmembrane protein 78
  Uniprot ID: Q5T7P6
  ENST ID: ENST00000323223
  CDS Start-End: 60-470
aaggtagagacaaccatgaaagttgaacacgtcatctgtgcaggaccgttcatactgacatgtggcttgacaccagaaatctgggtattgtaatatcatgttggaaaggagtttgtgtgcctcaaacaactactctagagatgttttacaatgacaatgatagagtagaggaatcttctaattcctaccaaatcagaagggaattcctccttcctgcctgcctgcctgccttcctttctttctctacttccttttctttctttctttccttccttcctctctctctttctctctttcttcctttctttccttctttctttctttctctctctctctccccttccttccttccttccttcctgagacaaggtcttgctctgtctcccaggctagaatgcgatggtgcaatcatgattcactgcagcctcaacatcccaggctcaagtgatcctcccacctcagcctcctgagtagctgggactacaggggcttgccaccacgcccagctaatttgcgtgtgtgtgtgtgtgtgtgtgtgtatgtggtagagatggggtctcactatgttgcccagctggtctcaaactcctggtcataagcaatcctccacctcggcctcccaaagtgttgggattacacgtgtgagccaccatgcccagtctctatttcttaatagtgtcagcaactgaaagatatagaaaaggaagtctgtttggtgtgtctgttgcctccccaaaatcttcagcctttgtaggacagtgcatcccactgggcaaaaccagagaatattcttttgtgagcccgtaagtaattgtctgcaatagacatgcaggggcctctactgtcatctcttatgcaactgaacttcctaaaaactgtggtgtttatctcttctgttgctcagcactgctgggactgggactgcaaaaaacaaaaaagcacccaggtttactgcccttaaaaaactgactgctagaggagatgagcatatacatgacaggatgtgataagatattaagcagaatgtgatcagaatcataggaagtatatacaaaagatgggaacactaatagaggtgactacaaccacctgctttgtagaggagatgacattcaagctgagttttaaaggatgagtaggagttggccagaaatggagagggagaataaaccatggggaagtagtacacaggcatggcatgtttagagcatttttggagcagggtaaccagaatatactggaggttgctagtagaggagattggaaaagaaagggtcagattattaatggatttacgtattatgcaaagaagtttatatttgaccctttttttgacaatctggcatttagccttatcataaaataaagatctctcaatgcttcacatagaaacttcatctgatctcttgaggatcaaaaaatggctttctgggttttttttctttctctctctcttttgtttttaatatctcacatatactttaaccaccataaattcaagttttctcttactcagacatgagttgcttaacaatggaataattcatttctttatttctcaacattgcccttttgaaggttttaggttttaggttttctaaaactctgaatacttttggctatcattatccagggaaagcctgaagacactccaaagcacaaggacaaaagagaccttgttagatctaattaagcgctccagcaccaggggcacggggagcaagagaaaaatacagagtcagaaactgagccgagttctatggtggtacagagtgaggcctgcttcactgtgggctggggctggggcagggaggccttcatcttgctctaagctgtgcaaagtacctcccacgaggctaagtatagagctactcaataaaaattatgcaatgtggctgggcacggtggctcacatctgtagtcctagcactttgggaggctgaggcaggtggattgcctgagctcaggagttcgagaccagcttgggcaacacggtgaaacctcgtctctactaaaatacaaaaaattagctgtgcatggcagcatgtgcttataatcccagctactggggaggctgaggcaggagaatcgcttgaacctgggaggcggacgttgcagtggggcaagatggcgccattgcactccagcctgggtgacaacgcgagactccatctc

SEQ ID NO: 194364 - DNA, 2191 bp, Homo sapiens
  Payload ID: 18408
  Gene Name: transmembrane protein 79
  Uniprot ID: Q9BSE2
  ENST ID: ENST00000295694
  CDS Start-End: 162-1346
ggcagcatggcgtctttccggcttctccaaacccttgcgaaaaactttattggcaaagctatcagagaacggacagtgtacccactgaggcggccaaagcttaactggatcagggcaggatgacatgaccttgtggtagatcccagaactgaggccccaggatgacagaacaggagaccctggccctactggaagtgaagaggtctgattccccagagaagagctcaccccaggccttggttcccaatggccggcagccagaaggggaaggtggggccgaatccccgggagctgagtccctcagagtggggtcttcagctggatctcccacagccatagagggggctgaggatggtctagacagcacagtaagtgaggctgccaccttgccctgggggactggccctcagcccagtgctccgttcccggatccccctggctggcgggacattgaaccagagccccctgagtcagaaccacttaccaagctagaggagctgcccgaagacgatgccaacctgctgcctgagaaagcggcccgtgccttcgtgcctattgacctacagtgcattgagcggcagccccaagaagaccttatcgtgcgctgtgaggcaggcgagggcgagtgccgaaccttcatgcccccccgggtcacccaccccgaccccactgagcgcaagtgggctgaggcagtggtgaggccgcctggctgttcctgtgggggctgcgggagctgtggagaccgtgagtggctaagggctgtggcctccgtgggagccgcactcattctcttcccttgcctactatacggggcatatgccttcctgccgtttgatgtcccacggctgcccaccatgagttcccgcctgatctacacactgcgctgcggggtctttgccaccttccccattgtgctggggatcctggtgtacgggctgagcctgttatgcttttctgcccttcggccctttggggagccacggcgggaggtggagatccaccggcgatatgtggcccagtcggtccagctctttattctctacttcttcaacctggccgtgctttccacttacctgccccaggataccctcaaactgctccctctgctcactggtctctttgccgtctcccggctgatctactggctgacctttgccgtgggccgctccttccgaggcttcggctacggcctgacgtttctgccactgctgtcgatgctgatgtggaacctctactacatgttcgtggtggagccggagcgcatgctcactgccaccgagagccgcctggactacccggaccacgcccgctcggcctccgactacaggccccgcccctggggctgagcctctccgccctcgccctcggagtagggggtagcggcttgggtctgacacatctttgaaccttgtggccaggcctggacttcgcccccaggcctaggaccgcggtgggtggaaccctgctactgccccaacagggactccaatcaatcggagttctccccttgccggagctgcccttcacctttggggcccgagacagtcataagggatggacttagttttcttgcagggaaaaaggtggacagccgtgtttcttaaggatgctgagggcatggggccaggaccaggggagaggcacagctccttcctgagcagcctctcaccactgccacaaggctccctaatgctggtctctgctccactccccggcttcccgtgaggcaggaggcagagccacagccaaggccctgaccacttctgtgccagttgtctaagcagagcgcctcagggacgctggaaatgccttaaggatagaggctgggcatcacatcaaatgggactgtggtgtttggtgaaaaccttcctgaggatctggattcaggaccctccatgactggcctatttactgtttacagctggccagtgcagagctgctgctcttttacctttttaggcccctgtaacttcccacctttaaactgcccagaaggcatgcctctcccacaggaagaggggagcagacagggaaatctgcctaccaagaggggtgtgtgtgtctttgtgcccacacgtggtggctggggagtgcctggatggtgcggtggttgatgttaacctagtgtgtgtgtgtgtgtgtgtgtgtgtgtgtgtgtgtgtgtgtgtgtaacaataaattactaccagtc

SEQ ID NO: 194365 - DNA, 975 bp, Homo sapiens
  Payload ID: 18408
  Gene Name: transmembrane protein 79
  ENST ID: ENST00000357501
  CDS Start-End: 157-684
catggcgtctttccggcttctccaaacccttgcgaaaaactttattggcaaagctatcagagaacggacagtgtacccactgaggcggccaaagcttaactggatcagggcaggatgacatgaccttgtggtagatcccagaactgaggccccaggatgacagaacaggagaccctggccctactggaagtgaagagggatcctggtgtacgggctgagcctgttatgcttttctgcccttcggccctttggggagccacggcgggaggtggagatccaccggcgatatgtggcccagtcggtccagctctttattctctacttcttcaacctggccgtgctttccacttacctgccccaggataccctcaaactgctccctctgctcactggtctctttgccgtctcccggctgatctactggctgacctttgccgtgggccgctccttccgaggcttcggctacggcctgacgtttctgccactgctgtcgatgctgatgtggaacctctactacatgttcgtggtggagccggagcgcatgctcactgccaccgagagccgcctggactacccggaccacgcccgctcggcctccgactacaggccccgcccctggggctgagcctctccgccctcgccctcggagtagggggtagcggcttgggtctgacacatctttgaaccttgtggccaggcctggacttcgcccccaggcctaggaccgcggtgggtggaaccctgctactgccccaacagggactccaatcaatcggagttctccccttgccggagctgcccttcacctttggggcccgagacagtcataagggatggacttagttttcttgcagggaaaaaggtggacagccgtgtttcttaaggatgctgagggcatggggccaggaccaggggagaggcacagctccttcctgagcagcctctcaccactgccacaaggctccctaatgctgg

SEQ ID NO: 194366 - DNA, 2201 bp, Homo sapiens
  Payload ID: 18408
  Gene Name: transmembrane protein 79
  Uniprot ID: Q9BSE2
  ENST ID: ENST00000405535
  CDS Start-End: 172-1356
aggttttgagacacaggtaaagggagggagacagagagaaatacttgcagagccagcaggtagctgggcagctccttcccggacggacggatggacagacgctggggaccctccactccatatggaaagatgacatgaccttgtggtagatcccagaactgaggccccaggatgacagaacaggagaccctggccctactggaagtgaagaggtctgattccccagagaagagctcaccccaggccttggttcccaatggccggcagccagaaggggaaggtggggccgaatccccgggagctgagtccctcagagtggggtcttcagctggatctcccacagccatagagggggctgaggatggtctagacagcacagtaagtgaggctgccaccttgccctgggggactggccctcagcccagtgctccgttcccggatccccctggctggcgggacattgaaccagagccccctgagtcagaaccacttaccaagctagaggagctgcccgaagacgatgccaacctgctgcctgagaaagcggcccgtgccttcgtgcctattgacctacagtgcattgagcggcagccccaagaagaccttatcgtgcgctgtgaggcaggcgagggcgagtgccgaaccttcatgcccccccgggtcacccaccccgaccccactgagcgcaagtgggctgaggcagtggtgaggccgcctggctgttcctgtgggggctgcgggagctgtggagaccgtgagtggctaagggctgtggcctccgtgggagccgcactcattctcttcccttgcctactatacggggcatatgccttcctgccgtttgatgtcccacggctgcccaccatgagttcccgcctgatctacacactgcgctgcggggtctttgccaccttccccattgtgctggggatcctggtgtacgggctgagcctgttatgcttttctgcccttcggccctttggggagccacggcgggaggtggagatccaccggcgatatgtggcccagtcggtccagctctttattctctacttcttcaacctggccgtgctttccacttacctgccccaggataccctcaaactgctccctctgctcactggtctctttgccgtctcccggctgatctactggctgacctttgccgtgggccgctccttccgaggcttcggctacggcctgacgtttctgccactgctgtcgatgctgatgtggaacctctactacatgttcgtggtggagccggagcgcatgctcactgccaccgagagccgcctggactacccggaccacgcccgctcggcctccgactacaggccccgcccctggggctgagcctctccgccctcgccctcggagtagggggtagcggcttgggtctgacacatctttgaaccttgtggccaggcctggacttcgcccccaggcctaggaccgcggtgggtggaaccctgctactgccccaacagggactccaatcaatcggagttctccccttgccggagctgcccttcacctttggggcccgagacagtcataagggatggacttagttttcttgcagggaaaaaggtggacagccgtgtttcttaaggatgctgagggcatggggccaggaccaggggagaggcacagctccttcctgagcagcctctcaccactgccacaaggctccctaatgctggtctctgctccactccccggcttcccgtgaggcaggaggcagagccacagccaaggccctgaccacttctgtgccagttgtctaagcagagcgcctcagggacgctggaaatgccttaaggatagaggctgggcatcacatcaaatgggactgtggtgtttggtgaaaaccttcctgaggatctggattcaggaccctccatgactggcctatttactgtttacagctggccagtgcagagctgctgctcttttacctttttaggcccctgtaacttcccacctttaaactgcccagaaggcatgcctctcccacaggaagaggggagcagacagggaaatctgcctaccaagaggggtgtgtgtgtctttgtgcccacacgtggtggctggggagtgcctggatggtgcggtggttgatgttaacctagtgtgtgtgtgtgtgtgtgtgtgtgtgtgtgtgtgtgtgtgtgtgtaacaataaattactaccagtc

SEQ ID NO: 194367 - DNA, 524 bp, Homo sapiens
  Payload ID: 18408
  Gene Name: transmembrane protein 79
  ENST ID: ENST00000456810
  CDS Start-End: 129-524
cttgcagagccagcaggtagctgggcagctccttcccggacggacggatggacagacgctggggaccctccactccatatggaaagatgacatgaccttgtggtagatcccagaactgaggccccaggatgacagaacaggagaccctggccctactggaagtgaagagggatcctggtgtacgggctgagcctgttatgcttttctgcccttcggccctttggggagccacggcgggaggtggagatccaccggcgatatgtggcccagtcggtccagctctttattctctacttcttcaacctggccgtgctttccacttacctgccccaggataccctcaaactgctccctctgctcactggtctctttgccgtctcccggctgatctactggctgacctttgccgtgggccgctccttccgaggcttcggctacggcctgacgtttctgccactgctgtcgatgctgatgtggaacctctactacatgttcgtggtggagccggagcgcatgctcactgc

SEQ ID NO: 194368 - DNA, 1094 bp, Homo sapiens
  Payload ID: 18409
  Gene Name: transmembrane protein 80
  ENST ID: ENST00000397510
  CDS Start-End: 182-832
aggcggctgtcgtccccggccgacagggctggacggctctaggcagattctcgccggcggccggcgcaattctgcctctcagagagagcttagtgccgcgggtttcgcccgttcccgccgccggcggaagccgagtcagcccgaggccgagccgagacgagccgaatgtccccgaggccgaatgctcccgaacgtcggttctccacctcttcccttccgaaagtgcccgagcggtgccggacggactaatcgggcctcggccgtggctcggacgtccgctcccgaaacgcggcgcggtcgggccccttcgtcaggagacgcgaaaatggccgaaggagcgcgagcgcgcgggccgagaggctgccgggatcgcgacggaccggcgggcggggcgggtaagatggcggccccgcggcgagggagaggatcctccacagtgctctcttcagttccccttcaaatgctgttttatctcagcggaacgtactacgccctgtatttcctcgccacgctcctgatgatcacgtataaaagtcaggtgttcagctatcctcaccgctacctggtcctcgatcttgctctgctgtttctgatggggattctagaagcagttcggttatacctgggcaccaggggcaacctgacagaggctgagaggccgctggccgccagcctggccctcacggctggcaccgccctcctctctgcccacttcctgctttggcaggccctagtgttgtgggcggactgggccctcagcgccacgctcctggcccttcacggcctggaggccgtcctgcaggtggttgccatcgcggccttcaccaggtagctacggacacccgggataccccacactggggccctcctcctgggcctgaccagtcccccagctgtcacctccccattcctggacaggaagggcacttttcctagtgactggccatagatggttttggatggttccatctgttctggcaggagtgggagcaggagccagggcagaacaaactgctggaggccctggtgttgggaacagctgcggggagggtagggaccagacagaactgccttcaagatgagtcccaggagcg

SEQ ID NO: 194369 - DNA, 1572 bp, Homo sapiens
  Payload ID: 18409
  Gene Name: transmembrane protein 80
  Uniprot ID: Q96HE8
  ENST ID: ENST00000397512
  CDS Start-End: 111-593
tccgaaagtgcccgagcggtgccggacggactaatcgggcctcggccgtggctcggacgtccgctcccgaaacgcggcgcggtcgggccccttcgtcaggagacgcgaaaatggccgaaggagcgcgagcgcgcgggccgagaggctgccgggatcgcgacggaccggcgggcggggcggggagaggatcctccacagtgctctcttcagttccccttcaaatgctgttttatctcagcggaacgtactacgccctgtatttcctcgccacgctcctgatgatcacgtataaaagtcaggtgttcagctatcctcaccgctacctggtcctcgatcttgctctgctgtttctgatggggattctagaagcagttcggttatacctgggcaccaggggcaacctgacagaggctgagaggccgctggccgccagcctggccctcacggctggcaccgccctcctctctgcccacttcctgctttggcaggccctagtgttgtgggcggactgggccctcagcgccacgctcctggcccttcacggcctggaggccgtcctgcaggtggttgccatcgcggccttcaccaggtagctacggacacccgggataccccacactggggccctcctcctgggcctgaccagtcccccagctgtcacctccccattcctggacaggaagggcacttttcctagtgactggccatagatggttttggatggttccatctgttctggcaggagtgggagcaggagccagggcagaacaaactgctggaggccctggtgttgggaacagctgcggggagggtagggaccagacagaactgccttcaagatgagtcccaggagcgcacactcagccctgtcagtggggtctggctttagcagccaggcctccacagacccccatgggcccccagggccgagagggaggacagagcccttcagaacagaggcctcatctcactgcatcccccatcaccccctagttccccaatggtcctaatttgtgttctgagatcccagtttactccgtggccaggccccacctgtgtttccaagtcgggctggagacgcaggatggggtaggccttgtgctctgagcaaccccagctctgcctcacaggcaggcaggcccggtgcaagagtggactctgggttcctaaagcaataaatgcaaacaagccaacagctctgctgcctagcaatttccatcttagccacacttctcccttcaggggcttcggaggagaggtcagggctaaggccggggatgagactgcaggagagagagcagcggagggccacattcggagcctccgtccactccagttttatcagcttttgccttttgcacggagtgctaaacaaattctagctctgtgtttttttcccattcccagatttactatcagttctccttaaaaagtatctaagctgttacagtagctttcccttcacttgattctattgtgtgttttctatgtttggaataattacacccaaatatctagatattttctcttcaccgcattttgtaaataaagagatgtgtatgcctccctgaa

SEQ ID NO: 194370 - DNA, 1047 bp, Homo sapiens
  Payload ID: 18409
  Gene Name: transmembrane protein 80
  ENST ID: ENST00000526170
  CDS Start-End: 1-665
atcgcgacggaccggcgggcggggcgggtaagatggcggccccgcggcgagggagaggatcctccacagtgctctcttcagttccccttcaaatgctgttttatctcagcggaacgtactacgccctgtatttcctcgccacgctcctgatgatcacgtataaaagtcaggtgttcagctatcctcaccgctacctggtcctcgatcttgctctgctgtttctgatggggattctagaagcagttcggttatacctgggcaccaggggcaacctgacagaggctgagaggccgctggccgccagcctggccctcacggctggcaccgccctcctctctgcccacttcctgctttggcaggccctagtgttgtgggcggactgggccctcagcgccacgctcctggcccttcacggcctggaggccgtcctgcaggtggttgccatcgcggccttcaccagtggccacggtgagctgcaggacagccctgaggacccacttcacacaccagcgcctgagcgcctcgggccacctccctcaccagcgcctgcactcgcagaagaccagctgggcacacctgccatctggaggacccagcccacaaaccatgcagaccagggaaggaccccctccctgaagctggagacctgttgccttcatggttaatggatcctgatacctccagtctcagcgagcacacaaaggcagtggtcacctgttccacagggaacgccatggctccaggtgacccggagtggatggggcccgagaggccagcctggactgtctcctgagggcaggctccgcactcaaaatcgtgttgacaggcacccgtttaggagtggagagggaccccaccccccagctgtcctctccagcgcctgtttcccacttggccactcccagctctgcctccaggaagggtgagggcacgggtgcaccgaggggttggcgtgtgtgaccctgagctctgggtcagggcaagctcatgcatggagcaggatcacggcaggttcctggagatcaaacggcaaaggctgtaaaccag

SEQ ID NO: 194371 - DNA, 669 bp, Homo sapiens
  Payload ID: 18409
  Gene Name: transmembrane protein 80
  ENST ID: ENST00000488769
  CDS Start-End: 1-287
gaccggcgggcggggcgggtaagatggcggccccgcggcgagggagaggatcctccacagtgctctcttcagttccccttcaaatgctgttttatctcagcggaacgtactacgccctgtatttcctcgccacgctcctgatgatcacgtataaaagtcaggtgttcagctatcctcaccgctacctggtcctcgatcttgctctgctgtttctgatggggattctagaagcagttcggttatacctgggtgagtggactgttaacaccgtgaagaacctgtcctaagagttgctatctgtttccacagcctttcaagagtaattattttatagtgtggttctcagagacattttttatccaaactgcttacccagttgctttgcaggctcaccttacagtgtcattaagtattaatcaagaagttttgtcccagagacaaataacactgggggcatcgttgggagagactctgtgtttggaagcatgtcttgtagaagccactgggtaatggcactgagatcagaaaagcccagcccaccaccacatctggagctccggaatattcaccagcacccctttccttccccttgcccttagctgtctgaggagagagccctggagagttctgccaggtcccaaaaggcagcagagtctggaggggtgggag

SEQ ID NO: 194372 - DNA, 800 bp, Homo sapiens
  Payload ID: 18409
  Gene Name: transmembrane protein 80
  ENST ID: ENST00000608174
  CDS Start-End: 19-408
gaatgtccccgaggccgaatgctcccgaacgtcggttctccacctcttcccttccgaaagtgcccgagcggtgccggacggactaatcgggcctcggccgtggctcggacgtccgctcccgaaacgcggcgcggtcgggccccttcgtcaggagacgcgaaaatggccgaaggagcgcgagcgcgcgggccgagaggctgccgggatcgcgacggaccggcgggcggggcgggtaagatggcggccccgcggcgagggagaggatcctccacagtgctctcttcagttccccttcaaatgctgttttatctcagcggaacgtactacgccctgtatttcctcgccacctctgcctcacaggcaggcaggcccggtgcaagagtggactctgggttcctaaagcaataaatgcaaacaagccaacagctctgctgcctagcaatttccatcttagccacacttctcccttcaggggcttcggaggagaggtcagggctaaggccggggatgagactgcaggagagagagcagcggagggccacattcggagcctccgtccactccagttttatcagcttttgccttttgcacggagtgctaaacaaattctagctctgtgtttttttcccattcccagatttactatcagttctccttaaaaagtatctaagctgttacagtagctttcccttcacttgattctattgtgtgttttctatgtttggaataattacacccaaatatctagatattttctcttcaccgcattttgtaaataaagagatgtgtatgcctccctg

SEQ ID NO: 194373 - DNA, 1332 bp, Homo sapiens
  Payload ID: 18410
  Gene Name: transmembrane protein 81
  Uniprot ID: Q6P7N7
  ENST ID: ENST00000367167
  CDS Start-End: 141-908
gttttattgacaatacatgcatcatatcttttgactttgaaggatatctcatgtcaaaggaatcaagttatgatttatagaggattcagctggaataccttgtgggtgctggctgagggtggcaaaacgcctaccgagacatgaaggttttagccactagttttgtccttgggagcctggggttggccttctacctgcctttggtggtgactacacctaaaacactggccatccctgagaagctgcaagaagctgtggggaaagttatcatcaatgccacaacctgtactgtcacctgtggccttggctataaggaggagaccgtctgtgaggtgggccctgatggagtgagaaggaaatgtcagactcggcgcttagaatgtctgaccaactggatctgtgggatgctccatttcaccattctcattggcaaggaatttgagcttagctgtctgagttcagacatcttggagtttggacaggaagctttccggttcacctggagacttgctcgaggtgtcatctccactgacgatgaggtcttcaaaccctttcaagccaactcccactttgtgaagtttaaatatgctcaggagtatgactctgggacatatcgctgtgatgtgcagctggtaaaaaacttgagactcgtcaagaggctctattttgggttgagggtccttcctcctaacttggtgaatctgaatttccatcagtcacttactgaggatcagaagttaatagatgagggattggaagttaatctggacagctactccaagcctcaccacccaaagtggaaaaagaaggtggcgtcagccttgggaataggaattgccattggagtggttggtggcgtgttggtgaggattgtcctctgtgcgctaagggggggcctgcagcagtgacagcttcaagaacttaacagccttgctcctgaagaactggctgcccaggaagccaagctagctttttaggggagtgttccagctgctggtagtggatcagcttagagggaacactcccacagccaaaagaatgagtgggagaaatggaggggacaatctcctgggagctatgcgcagtaacctaacttccttatgtcccatggatctcttcctgatcttccctgcccattgggtacccaggaaactgcaagcattgcctgtgttcctgggaagagttctaagaagcttgcattcattttctaccctttatgacttggatgcctccccacctccatttcccctcttctgagctgtgtattcatgtagagggatgtattcagcctttttagtgaacattttttttcaataaaagtaattcacagta

SEQ ID NO: 194374 - DNA, 1520 bp, Homo sapiens
  Payload ID: 18411
  Gene Name: transmembrane protein 82
  Uniprot ID: A0PJX8
  ENST ID: ENST00000375782
  CDS Start-End: 139-1170
gctctcctcccctcccctcccctgggcctttgacccctcccagcctctctccttccctccaccgacacctttgcccagtgacgttggtctgtccttacgcagacctggccggaggctggggctccttccggggctgccatgttctctcttccatccctcccctcctggctccccggcctcccctccctcgagtggggctctagcctccttgactccctcctgcaaggcctgatcggggcccttggagtcttggtcctgaacagcctcctgaaagtttacttcttcgtgggctgtgccaatgacccgcagcggcgacccgaaaaggagcggcttcgggcccagtgggcctccctggaaacggtgcacctggcagggctggccctgtttctgacggtcgtggggtcccgggtggctgccctcgtggtgctcgagttctccctccgggccgtgtccacgctgctgtccctgggcaagggctcccagggtgccgccgagaggctgcagctctacctgctgtgccagtactcgctgggctgcgggctgacctgtggcctgagcttcctgcaggagggcgcccctcaccgcacgctgaacctgctgctgagcctcgggctggccacgctgctgggcctgggtgcccggcgcctccaccgccacgtctgccgcctctacgagctgcacagcagccagcgctactgtggggtgtgcctgggcctgctggcccatgcacatggcctcccccagctgctgggccgtgccctggccatagcctttgccgtgggtgacctggcagctgtggccctcatcaaccaggacttcctgaccacctcggaggccatgcggttctggacaccgctcaccatctgctacacgctgctggtcatctacatgcaggaggagcagcggcagcaccccggcctgcagagccaggtgcagacggtgctggtgcgcatgggcggcctcttcgtgctgctgctgactgtgggtcgctggctggacctgctgggcatccttgtctccctactgggcgagctctggtgtctcgtgggcgtccgcaccctgcttgacctctgccagatacaggattttccatcccagaggcctccagtgtcaacaccaagccagcccctgccctcggcaccccagtcccagagttcggccccctcttgacctgcctcagggaggatctggagtctgtctcaagcccactagcctgatctccgaggccttgaccccagggcgatgcctggaggcagagtggcagagctggcctcctgcccagagctcagcacaggccctgggagccccgagaagggaaggcaggatttggggatgggagcctctggagaggggacacctggggacccctggttgaaccctctttttcttggggtgggcaatgatgcagcctctcagacctgccttcctgggcaggggtgggggtgcatcctcaggagggctccccctttactggtctcccttcccttctccatgaacaataaagacgatgtctttctcaa

SEQ ID NO: 194375 - DNA, 3595 bp, Homo sapiens
  Payload ID: 18412
  Gene Name: transmembrane protein 86A
  Uniprot ID: Q8N2M4
  ENST ID: ENST00000280734
  CDS Start-End: 97-819
tccgggctttgtagaatcgtcgccggcttacctggccgtgggcgcgtcctggccgctgcagcccggagcagggtgccagccgccgccgccgccgccatggtgtccccggtcactgtggtgaagagtgaaggacccaaactggtgccgttcttcaaggccacctgcgtgtattttgtgctctggctgccctcatctagcccatcgtgggtcagcaccctcatcaagtgcctgcctatcttctgcctctggctcttccttctggcccatggcctgggattcctgctggcccaccccagcgccacccgcatctttgtggggcttgtcttctctgctgtaggtgacgccttcctcatctggcaggaccaaggatacttcgtgcatggtctgctgatgtttgctgtgacccacatgttctacgcctcggcctttggcatgcagccactggctcttcggacaggtctggtgatggcagcgctgtcgggcctgtgctatgccctcctctacccatgcctctcaggtgccttcacctacctggtgggggtctatgtggcccttatcggcttcatgggctggcgagctatggcagggctgcggctggccggggcagactggcgctggacagagctggcagctggcagtggtgcactcttctttatcatctcagacctgaccatcgccctcaacaaattctgttttcctgtgccctactctcgggcgcttatcatgtccacctactatgtggcccagatgctcgtcgccttgtcagctgtcgaaagccgggagcctgtggaacactacagactgaccaaggccaactgaggtgccagggtctggtcacccctctctcctcctggggctggggcccagatcctggggacctgcaggagctggatcaggatggctgcagtgccagcctggggcagcaggtactgcctgaggaatttgcaagttcgtgtggggaggctggaaaaggatctccctagcagaactcgtggttcaggacaatgctgagagctaaaagagccagcctaatatcagactggagccagaagtagacatctccccacctctaccctatcaggactttcaaaacccccctggaaggtgatggtgctcagcttcttgacacccccccacccacttcccctaccaggtggaagagtctgactccatgtgttatgcctaggaccaatggcagtgctgggttcacccactcctcccctttttcatctgcacaaagttgagggaaacgggagaatctgtgctgagaagactcagacccaggagcccctttcacaggcccctagttgggaagactggatgagagtggagcctccgtttcttttccctcttctatccttgttacttgaacaatctcagtctctaagtggtgggtggggacatgaagaggtgtgggtccaggttaggcaggagagagaacttctttggtctcggagtttggggtctcaagaattcaagtagccccatctctctctcgggcaagcccaaagctcaggtcccatacgctacccttagatcctatccccagggctagggtgaaccatgccaaaggaaggggccagcttctctgtgtgtgtgtgtagcctgtctcctagtctgcctatgtctttctctgctatatgtttctgtcctgctgtctgtcaaaagtctcacagagagagggcctcagggagctgctgaggggtgctgagcctggctcagggagctgggacccctcccctccaacacacatactcacagtgctttcctccttgtccctcctacactaggagcaagaggagggggctccaatgacactccggggttttaagacccaaggcacattcaatgcaaggggagcaaggatgggacaactccatcttctgctgcccatgtgaaaaataataaaaatcaagagccattggctgccctgcttgtgggcctgtgtggcacatgcctatcttggagagggcatgggggcatggtgccagaggctctggctgtcctcacagcctagtcacagtcctgggcagtgcatcttggtgccaggctggctacctggctctggtgacactgtgccggttggagtgtgtctcacttccctggtgtgggtgaggatgtggtttaggaggatgggggatgagtggtatttgccactgtccaaatttgtccttgatgtactcccctgtgcacaggtgcccagcacccttggtgacctttagttacccagtgtcatctattgctgcccacctcctcccctccccacttgagacctgctgcttccttcaaaatgatccagattcccttcaagcatctccctcatcctggactctgggcttagttgaacagctgggagcaatgggattagattggctgattcattcattagttgtaaagccctggcagaataatacatcactctgctccaggagcatttgtaacttaacagacaatgccctaacccagaagtagaaagggaagccttgggtggtggtggatatgccatcagtagaggtgttgctcatttgtggggatgtgatttaggagactcaagtctcaggggtggttggatgagtcagtgatttccaaattagtttttacagagattcctggtaagggggtagtgaaggaataatgagagaaggcaggctcaaagacctcctatccttatttcaagtccagtagcttcttaggttgtgtttttttttgttttgttttgttttggaaggattccactgaaaaacgtaagtttgaaacttagtgagctggatgatcaatcccttctagctctgaaccctggacactaaagagggaagatcttgatcctttcaaacttcagaactctgaacacagacctacctagtgtgaagaaatgggagggagcaggatggagagcaggatgaagtcagcaggacttgcccccaagctctgaggggagggggaaagtgccatgtagatgtggaggaggggaagggaagaccaggcccagtcacaagaaggctggtcactgccttgtgggtgggtttggactaggctttcaggggtccaggtctgggattccctatcatgcaatcacatccatccccttggtccctgctgtatatcaccctcaggaacgggaaaggatgagttacgtttattgccccatcccttcactgaatgtttacattaacaaacaccagagagcaaactgggcttcctacactgggccatgcagaggacaggccaagaaactccacatcataacagcctcctgatgcctgggcttggctggagctcacatgaggtgctttgatttcttctgcagactctcggtgatggatgctacaactgacttatcatctttgtctgaaagagcaaaggaagtattcgttatattaatgatgctggcgaccagggaaattccaaactgctggacttcctatgcaggaaaccaggagctggaccctgggacccttaatcttgggttggcagagtgtgaaggggcaagagctgccatttatctagcacttaatatttgccagacattgtgccaggcagttgtgtactgtctcatttaagcctcatagtcctataaagaagatgagaaaacagg

SEQ ID NO: 194376 - DNA, 1637 bp, Homo sapiens
  Payload ID: 18413
  Gene Name: transmembrane protein 86B
  Uniprot ID: Q8N661
  ENST ID: ENST00000327042
  CDS Start-End: 524-1204
cctggtcacccattgaagcagtgtttgtggtggagcccctgagggcttggtggggttgagcagaatgaggaaaggtttcatggagcagggagggagacggctagggcagcaagtgaaggacagactcgccttcccatccctccaggggcactcctgccagccagcccctctcccgcttcccatgatggggtggctgttggaattctgcaccccatctcttctgattgttggggcccaggacaaggggacaggcatttgtgggcctaacctccccaggcagataggaggaggaagccatgtcccagcaggctagggcagagggacccccagtgccaacagtgctttatcagcgggcgccaggcagggccatccccagggtgaggacaacatctccctgggccctgttatcagtcacagagtccacaggacgctccttgggttaacgtgtaaccatgagccctcccctccaccccctgaagccactcgctcccagattaggtcgctctggggctatcaggccagcatggacgctggcaaagcggggcagaccctgaagactcactgctcagcccagcgcccagatgtctgcaggtggctgagccccttcatcctctcctgctgcgtgtacttctgcctctggattcccgaggaccagctgtcctggttcgctgccctggtcaagtgcctgcccgtcctctgcctggctgggttcctgtgggtcatgtccccaagcgggggctacacccagctcctccagggagcccttgtgtgctcggctgtgggggacgcttgcctcatctggccggcagccttcgtccctggcatggccgcctttgccaccgcccacctcctctacgtctgggccttcggcttctctcccctgcagcccggcctgctgctgctcatcatcctggcccctggcccctacctcagccttgtgctccagcacctcgagccggatatggtcctgccggtggcagcctatgggctgatcctgatggccatgctgtggcgcggcctggcccagggcgggagtgccggctggggcgcgctgctcttcacgctctctgatggcgtgctggcctgggacaccttcgcccagcccctgccccatgcccacctggtgatcatgaccacctactatgctgcccagctcctcatcacactgtcagccctcaggagcccggtgcccaagactgactgactagggagcttgaagggccggtgttcaggccctctcctcctgcaaggacctgggcctcccagcccagcccagcctgagaaataccctcagcagcgaagcttcctgacgcctgtctgcaggcgccgctgccgccgtcgcttctggctgaagacgtttgaggacgatttgcggaattccaagtccactactgggttccagctgccttcccccggttctgactccagatccctggctcctcagccaggcccacatggagccctcccagccaccagcctgcctccatgttcactgtcggccccacagcctgcccgccccctgctgctgctctgaatccgttttccctgtgggtgtggaaccgtagatgttgctgttaccgtaggagaggcctcggggagggtcatgattgtgataaaccatcgcggttaatgacagc

SEQ ID NO: 194377 - DNA, 1598 bp, Homo sapiens
  Payload ID: 18414
  Gene Name: transmembrane protein 87A
  Uniprot ID: Q8NBN3
  ENST ID: ENST00000307216
  CDS Start-End: 39-584
ggtgaaatgctttcggtaggcactccacggctgtgaagatggcggcggctgcgtggcttcaggtgttgcctgtcattcttctgcttctgggagctcacccgtcaccactgtcgtttttcagtgcgggaccggcaaccgtagctgctgccgaccggtccaaatggcacattccgataccgtcggggaaaaattattttagttttggaaagatcctcttcagaaataccactatcttcctgaagtttgatggagaaccttgtgacctgtctttgaatataacctggtatctgaaaagcgctgattgttacaatgaaatctataacttcaaggcagaagaagtagagttgtatttggaaaaacttaaggaaaaaagaggcttgtctgggaaatatcaaacatcatcaaaattgttccagaactgcagtgaactctttaaaacacagaccttttctggagattttatgcatcgactgcctcttttaggagaaaaacaggaggctaaggagaatggaacaaaccttacctttattggagacaaaaccattcagatgcctttcttgaagaaacatttcttggattgttgaaagactttaataatttccaaagttccaaaagttgattttgatagtttttgccagtgttttcgttgcttttatggatgagtagattttcagagtttcttattctgccattctgaaagtgttctcactacctaaaccccagttttatttgtacagaattttaactgaatgtaagttaggcatgacagtctttgttaatttttttaaacaaaagatagccattaggactgggtacagtggctcacgcctgtaatgccaacactttgggaggccaaggtgggcagatgacttgaggttgggagttcgagaccagcttggccaatgtggtgaaactttgtctttactaaaaatacaaaaattagttgctcatggtggcaggcacctgtaatccaagctactcaggaggctgaggcaggagaatcgcgtgaacttgggaggtggaggctgcagtgagctgagatcacgctactgcactccagcctgggcagccagtgagattccatctcaaaaaaaaaagaaaaaagatattcattggattttctcttactaataggtatatattcactgtgaaaatggagacgatatacataaatgaaaagaagaaaatagtaatctataataccatgcagtgatatatttatcttcctattcttttgtatatgggcatgtttatattattttaaaaagggaatcttagagtatgtattatatgacttttttttgtagcttagcaatataacatggacatgtcgtcagtttggtaaatattgtattgcatcgttacttaaatgcttgtatagtgtcttattgtatgagtacattgcaatttgttcaattctctgttcttgaacttttatgagtttcattatcttggaattttatgcagtgttgtgattaatattttaactacatttgcttttaagtctttattttctgatctcagaagaattgtatattgggataagtttttaattctataacttaaaagtaaaaatcctttgtaattttatgttctaa
